(19) United States
(12) Patent Application Publication
(10) Pub. No.: US 2026/0152733 A1
(43) Pub. Date: Jun. 4, 2026

(54) COMPOSITIONS AND METHODS FOR THE TARGETING OF LPA

(71) Applicant: Scribe Therapeutics Inc., Alameda, CA (US)

(72) Inventors: Dena LEEMAN, Lafayette, CA (US); Sarah DENNY, San Francisco, CA (US); Sean HIGGINS, Alameda, CA (US); Brett T. STAAHL, Tiburon, CA (US); Oleh KRUPA, Oakland, CA (US); Benjamin DEMAREE, Berkeley, CA (US); Matthew HARMS, Alameda, CA (US); Benjamin OAKES, El Cerrito, CA (US); Addison WRIGHT, El Cerrito, CA (US)

(21) Appl. No.: 19/343,806

(22) Filed: Sep. 29, 2025

Related U.S. Application Data
(63) Continuation of application No. PCT/US2024/022042, filed on Mar. 28, 2024.
(60) Provisional application No. 63/492,875, filed on Mar. 29, 2023.
(60) Provisional application No. 63/505,885, filed on Jun. 2, 2023.
(60) Provisional application No. 63/563,109, filed on Mar. 8, 2024.

(51) Int. Cl. C12N 9/22; C12N 15/11; C12N 15/88; C12N 15/90

(52) U.S. Cl. CPC C12N 9/226; C12N 15/11; C12N 15/88; C12N 15/907; C12N 2310/20; C12N 2310/315; C12N 2310/321

(57) ABSTRACT

Provided herein are systems comprising Class 2, Type V CRISPR proteins and guide nucleic acids (gRNA) useful in the modification of a target nucleic acid of a lipoprotein (a) (LPA) gene. The systems are also useful for introduction into cells, for example eukaryotic cells. Also provided are methods for treating subjects having a LPA-related disease and methods for optimizing the encoding sequences.

### CROSS REFERENCE TO RELATED APPLICATIONS

[0001] This application is a Continuation of International Application No. PCT/US2024/022042, filed on Mar. 28, 2024, which claims priority to U.S. Provisional Applications No. 63/492,875, filed on Mar. 29, 2023, 63/505,885 filed on Jun. 2, 2023, and 63/563,109 filed on Mar. 8, 2024, the contents of each of which are incorporated herein by reference in their entirety.

### REFERENCE TO AN ELECTRONIC SEQUENCE LISTING

[0002] The contents of the electronic sequence listing (SCRB_051_03US_SeqList_ST26.xml; Size: 19,230,224 bytes; and Date of Creation: Sep. 28, 2025) are herein incorporated by reference in its entirety.

### BACKGROUND

[0003] Lipoproteins are globular, micelle-like particles that consist of a non-polar core of acylglycerols and cholesteryl esters surrounded by an amphiphilic coating of protein, phospholipid and cholesterol. Lipoproteins have been classified into at least five categories based on their functional and physical properties: chylomicrons, very low-density lipoproteins (VLDL), intermediate density lipoproteins (IDL), low density lipoproteins (LDL), and high-density lipoproteins (HDL). Chylomicrons transport dietary lipids from intestine to tissues, VLDLs, IDLs and LDLs all transport triacylglycerols and cholesterol from the liver to tissues, and HDLs transport endogenous cholesterol from tissues to the liver.

[0004] Lipoprotein particles undergo continuous metabolic processing and have variable properties and compositions. Lipoprotein densities increase without increasing particle diameter because the density of their outer coatings is less than that of the inner core. The protein components of lipoproteins are known as apolipoproteins and at least nine different forms of apolipoproteins are distributed in significant amounts among the various human lipoproteins.

[0005] The lipoprotein (a) particle (Lp (a)) was identified nearly 50 years ago and is comprised of a highly unique LDL particle in which one apolipoprotein B (apoB) protein is linked via a disulfide bond to a single apolipoprotein (a) (apo (a)) protein. The apo (a) protein shares a high degree of homology with plasminogen, particularly within the kringle IV (KIV) type 2 repetitive domain. Generally, levels of circulating Lp (a) are inversely proportional to the number of kringle IV type 2 variable repeats present in the molecule and, as both alleles are co-expressed within individuals, can display heterozygous isoform profiles in the plasma (Kraft et al., Eur J Hum. Genet. 4 (2): 74 (1996)). It is thought that this kringle repeat domain in apo (a) may be responsible for its pro-thrombotic and anti-fibrinolytic properties, potentially enhancing atherosclerotic progression. Importantly, recent genetic association studies revealed that Lp (a) was an independent risk factor for myocardial infarction, stroke, peripheral vascular disease and abdominal aortic aneurysm (Rifai et al., Clin. Chem. 2004; 50:1364-71; Erqou et al., JAMA 2009; 302:412-23; Kamstrup et al., Circulation 2008; 117: 176-84). Further, in the recent Precocious Coronary Artery Disease (PROCARDIS) study, Clarke et al. (Clarke et al., NEJM (2009) 361:2518-2528) described robust and independent associations between coronary heart disease and plasma Lp (a) concentrations. To date, therapeutic strategies to treat cardiovascular disease by directly targeting Lp (a) and/or apo (a) levels have been limited. Thus, there remains a need for improved compositions and methods to regulate Lp (a).

### SUMMARY

[0006] Aspects of the present disclosure are directed to systems and methods of modulating expression of a lipoprotein (a) (IPA) gene target nucleic acid in a cell.

[0007] The present disclosure provides systems comprising or encoding engineered CasX proteins and guide ribonucleic acid variants (gRNA) that have utility in the modification of a target nucleic acid of a lipoprotein (a) (LPA) gene in eukaryotic cells. The systems and compositions are useful in a variety of methods for target nucleic acid modification, which methods are also provided. The present disclosure also provides vectors and LNP formulations for the delivery of the systems to cells for the modification of the LPA gene. The present disclosure also provides methods for treating subjects having an LPA-related disease. The present disclosure also provides methods for optimizing the encoding sequences.

### INCORPORATION BY REFERENCE

[0008] All publications, patents, and patent applications mentioned in this specification are herein incorporated by reference to the same extent as if each individual publication, patent, or patent application was specifically and individually indicated to be incorporated by reference. The contents of WO 2020247882, WO 2020247883, WO 2021113772, WO 2022120095, WO 2022125843, WO 2022261150, WO 2022261149, WO 2023049872, WO 2023235818, WO 2023240027, and WO 2023240162, which disclose CasX variants and gRNA variants, and methods of delivering same, are hereby incorporated by reference in their entirety.

### BRIEF DESCRIPTION OF THE DRAWINGS

[0009] The novel features of the disclosure are set forth with particularity in the appended claims. A better understanding of the features and advantages of the present disclosure will be obtained by reference to the following detailed description that sets forth illustrative embodiments, in which the principles of the disclosure are utilized, and the accompanying drawings of which:

[0010] FIG. 1 depicts a schematic of the relative locations in the human LPA locus that the 142 TTC spacers target, as described in Example 1. Spacers are indicated by black vertical bars. “KIV” denotes a Kringle IV domain, followed by the domain type (e.g., “KIV-1”=Kringle IV Type 1). “KV” denotes a Kringle V domain.

[0011] FIG. 2 is a bar graph showing the quantification of percent editing measured as indel rate detected by next-generation sequencing (NGS) at the mouse PCSK9 locus in Hepal-6 cells transfected with the indicated engineered CasX mRNAs and targeting spacers and harvested at 20 hours post-transfection, as described in Example 5.

[0012] FIG. 3A is a plot illustrating the percent reduction of secreted PCSK9 level, relative to the non-targeting (NT) control, for primary human hepatocytes from lot #31 treated with the indicated doses of lipid nanoparticles (LNPs) formulated with CasX 515 or CasX 812 mRNA and a PCSK9-targeting gRNA with spacer 6.1, as described in Example 6.

[0013] FIG. 3B is a plot illustrating the percent reduction of secreted PCSK9 level, relative to the non-targeting (NT) control, for primary human hepatocytes from lot #31 treated with the indicated doses of LNPs formulated with CasX 515 or CasX 812 mRNA and a PCSK9-targeting gRNA with spacer 6.8, as described in Example 6.

[0014] FIG. 3C is a plot illustrating the percent reduction of secreted PCSK9 level, relative to the non-targeting (NT) control, for primary human hepatocytes from lot #51 treated with the indicated doses of LNPs formulated with CasX 515 or CasX 812 mRNA and a PCSK9-targeting gRNA with spacer 6.1, as described in Example 6.

[0015] FIG. 3D is a plot illustrating the percent reduction of secreted PCSK9 level, relative to the non-targeting (NT) control, for primary human hepatocytes from lot #51 treated with the indicated doses of LNPs formulated with CasX 515 or CasX 812 mRNA and a PCSK9-targeting gRNA with spacer 6.8, as described in Example 6.

[0016] FIG. 4A is a plot depicting the results of an editing assay measured as indel rate detected by NGS at the PCSK9 locus in primary human hepatocytes from lot #31 treated with the indicated doses of LNPs formulated with CasX 515 or CasX 812 mRNA and a PCSK9-targeting gRNA with spacer 6.8, as described in Example 6.

[0017] FIG. 4B is a plot depicting the results of an editing assay measured as indel rate detected by NGS at the PCSK9 locus in primary human hepatocytes from lot #51 treated with the indicated doses of LNPs formulated with CasX 515 or CasX 812 mRNA and a PCSK9-targeting gRNA with spacer 6.1, as described in Example 6.

[0018] FIG. 4C is a plot depicting the results of an editing assay measured as indel rate detected by NGS at the PCSK9 locus in primary human hepatocytes from lot #51 treated with the indicated doses of LNPs formulated with CasX 515 or CasX 812 mRNA and a PCSK9-targeting gRNA with spacer 6.8, as described in Example 6.

[0019] FIG. 5A is a schematic illustrating versions 1-3 (“V1-V3”) of chemical modifications made to gRNA scaffold variant 235, as described in Example 5. Structural motifs are highlighted. Standard ribonucleotides are depicted as open circles, and 2′OMe-modified ribonucleotides are depicted as black circles. Phosphorothioate bonds are indicated with * below or beside the bond. For the v2 profile, the addition of three 3′ uracils (3 UUU) is annotated with “U”s in the relevant circles.

[0020] FIG. 5B is a schematic illustrating versions 4-6 (“V4-V6”) of chemical modifications made to gRNA scaffold variant 235, as described in Example 5. Structural motifs are highlighted. Standard ribonucleotides are depicted as open circles, and 2′OMe-modified ribonucleotides are depicted as black circles. Phosphorothioate bonds are indicated with * below or beside the bond.

[0021] FIG. 6 is a plot illustrating the quantification of percent knockout of B2M in HepG2 cells co-transfected with 100 ng of CasX 491 mRNA and with the indicated doses of end-modified (v1) or unmodified (v0) B2M-targeting gRNAs with spacer 7.37, as described in Example 5. Editing level was determined by flow cytometry as the population of cells with loss of surface presentation of the HLA complex due to successful editing at the B2M locus.

[0022] FIG. 7 is a schematic illustrating versions 7-9 (“V7-V9”) of chemical modifications made to gRNA scaffold variant 316, as described in Example 7. Structural motifs are highlighted. Standard ribonucleotides are depicted as open circles, and 2′OMe-modified ribonucleotides are depicted as black circles. Phosphorothioate bonds are indicated with * below or beside the bond.

[0023] FIG. 8A is a schematic of gRNA scaffold variant 174, as described in Example 7. Structural motifs are highlighted (gRNA scaffold variant 174 sequence: SEQ ID NO: 464).

[0024] FIG. 8B is a schematic of gRNA scaffold variant 235, as described in Example 7. Highlighted structural motifs are the same as in FIG. 8A. The differences between variant 174 and variant 235 lie in the extended stem motif and several single-nucleotide changes (indicated with asterisks). Variant 316 maintains the shorter extended stem from variant 174 but harbors the four substitutions found in scaffold 235 (gRNA scaffold variant 235 sequence: SEQ ID NO: 465).

[0025] FIG. 8C is a schematic of gRNA scaffold variant 316, as described in Example 7. Highlighted structural motifs are the same as in FIG. 8A (gRNA scaffold variant 316 sequence: SEQ ID NO: 466). Variant 316 maintains the shorter extended stem from variant 174 (FIG. 8A) but harbors the four substitutions found in scaffold 235 (FIG. 8B).

[0026] FIG. 9 is a plot displaying a correlation between indel rate (depicted as edit fraction) at the PCSK9 locus as measured by NGS (x-axis) and secreted PCSK9 levels (ng/ml) detected by enzyme-linked immunosorbent assay (ELISA) (y-axis) in HepG2 cells lipofected with CasX 491 mRNA and PCSK9-targeting gRNAs containing the indicated scaffold variant and spacer combination, as described in Example 7.

[0027] FIG. 10A is a plot depicting the results of an editing assay measured as indel rate detected by NGS at the human B2M locus in HepG2 cells treated with the indicated doses of LNPs formulated with CasX 491 mRNA and the indicated B2M-targeting gRNA, as described in Example 7.

[0028] FIG. 10B is a plot illustrating the quantification of percent knockout of B2M in HepG2 cells treated with the indicated doses of LNPs formulated with CasX 491 mRNA and the indicated B2M-targeting gRNA, as described in Example 7. Editing level was determined by flow cytometry as population of cells that did not have surface presentation of the HLA complex due to successful editing at the B2M locus.

[0029] FIG. 11A is a plot depicting the results of an editing assay measured as indel rate detected by NGS at the mouse ROSA26 locus in Hepal-6 cells treated with the indicated doses of LNPs formulated with CasX 676 mRNA #2 and the indicated ROSA26-targeting gRNA with either the v1 or v5 modification profile, as described in Example 7.

[0030] FIG. 11B is a plot illustrating the quantification of percent editing measured as indel rate detected by NGS at the ROSA26 locus in mice treated with LNPs formulated with CasX 676 mRNA #2 and the indicated chemically-modified ROSA26-targeting gRNA, as described in Example 7.

[0031] FIG. 12 is a bar graph showing the results of the editing assay measured as indel rate detected by NGS as the mouse PCSK9 locus in mice treated with LNPs formulated with CasX 676 mRNA #1 and the indicated chemically-modified PCSK9-targeting gRNA, as described in Example 7. Untreated mice served as experimental control.

[0032] FIG. 13A is a schematic illustrating versions 1-3 (“V1-V3”) of chemical modifications made to gRNA scaffold variant 316, as described in Example 7. Structural motifs are highlighted. Standard ribonucleotides are depicted as open circles, and 2′OMe-modified ribonucleotides are depicted as black circles. Phosphorothioate bonds are indicated with * below or beside the bond.

[0033] FIG. 13B is a schematic illustrating versions 4-6 (“V4-V6”) of chemical modifications made to gRNA scaffold variant 316, as described in Example 7. Structural motifs are highlighted. Standard ribonucleotides are depicted as open circles, and 2′OMe-modified ribonucleotides are depicted as black circles. Phosphorothioate bonds are indicated with * below or beside the bond.

[0034] FIG. 14 is a bar graph showing the level of apo (a) secretion in primary human hepatocytes treated with mRNA encoding CasX 515 and indicated gRNA, relative to cells treated with a non-targeting (NT) gRNA. Treatment with LPA targeted gRNA shows reduction greater than 90% as measured by protein analysis normalized to total secreted protein, as described in Example 9.

[0035] FIG. 15 is a plot illustrating the quantification of editing rate as the percent of on-target editing of LPA in HEK293 cells nucleofected with one of 7 gRNAs targeting LPA and a plasmid encoding CasX 515 as described in Example 10. Guide RNA IDs are displayed in order of decreasing estimated guide specificity.

### DETAILED DESCRIPTION

[0036] While exemplary embodiments have been shown and described herein, it will be obvious to those skilled in the art that such embodiments are provided by way of example only. Numerous variations, changes, and substitutions will now occur to those skilled in the art without departing from the disclosures claimed herein. It should be understood that various alternatives to the embodiments described herein may be employed in practicing the embodiments of the disclosure. It is intended that the claims define the scope of the disclosure and that methods and structures within the scope of these claims and their equivalents be covered thereby.

[0037] Unless otherwise defined, all technical and scientific terms used herein have the same meaning as commonly understood by one of ordinary skill in the art to which this disclosure belongs. Although methods and materials similar or equivalent to those described herein can be used in the practice or testing of the present embodiments, suitable methods and materials are described below. In case of conflict, the patent specification, including definitions, will control. In addition, the materials, methods, and examples are illustrative only and not intended to be limiting. Numerous variations, changes, and substitutions will now occur to those skilled in the art without departing from the invention.

### Definitions

[0038] As used in this specification and the appended claims, the singular forms “a,” “an,” and “the” include plural referents unless the context clearly dictates otherwise. Thus, for example, reference to “a host cell” includes two or more such host cells, reference to “an engineered CasX protein” includes one or more engineered CasX protein(s), reference to “a nucleic acid sequence” includes one or more nucleic acid sequences, and the like.

[0039] As used herein, the term “about” is understood by persons of ordinary skill in the art and may vary to some extent depending upon the context in which it is used. If there are uses of the term which are not clear to persons of ordinary skill in the art given the context in which the term “about” is used, “about” will mean up to plus or minus 10% of the particular term.

[0040] As will be understood by one skilled in the art, for any and all purposes, all ranges disclosed herein also include any and all possible subranges and combinations of subranges thereof. Furthermore, as will be understood by one skilled in the art, a range includes each individual member. Thus, for example, a group having 1-3 members refers to groups having 1, 2, or 3 members. Similarly, a group having 1-5 members refers to groups having 1, 2, 3, 4, or 5 members, and so forth.

[0041] The term “combinations thereof” includes every possible combination of elements to which the term refers.

[0042] The term “exemplary” as used herein, refers to an example or illustration, and is not intended to imply any preference or value.

[0043] The term “CasX protein,” as used herein, refers to a family of proteins, including e.g., all naturally-occurring CasX proteins (“reference CasX”), as well as engineered CasX proteins with sequence modifications possessing one or more improved characteristics relative to a CasX protein from which it was derived, described more fully, herein below.

[0044] The term “specificity” as used herein with respect to editing refers to the ratio of average level of on-targeting editing divided by the average level of off-target editing.

[0045] The term “off-target effects” as used herein refers to unintended cleavage and mutations at untargeted genomic sites showing a similar but not an identical sequence compared to the target site. In some embodiments the off-target effects are determined in an in vitro cell-free assay. In some embodiments the off-target effects are determined in a cell-based assay.

[0046] The terms “polynucleotide” and “nucleic acid,” used interchangeably herein, refer to a polymeric form of nucleotides of any length, either ribonucleotides or deoxyribonucleotides. Thus, terms “polynucleotide” and “nucleic acid” encompass single-stranded DNA; double-stranded DNA; multi-stranded DNA; single-stranded RNA; double-stranded RNA; multi-stranded RNA; genomic DNA; cDNA; DNA-RNA hybrids; and a polymer comprising purine and pyrimidine bases or other natural, chemically or biochemically modified, non-natural, or derivatized nucleotide bases.

[0047] “Hybridizable” or “complementary.” are used interchangeably to mean that a nucleic acid (e.g., RNA, DNA) comprises a sequence of nucleotides that enables it to non-covalently bind, i.e., form Watson-Crick base pairs and/or G/U base pairs, “anneal”, or “hybridize,” to another nucleic acid in a sequence-specific, antiparallel, manner (i.e., a nucleic acid specifically binds to a complementary nucleic acid) under the appropriate in vitro and/or in vivo conditions of temperature and solution ionic strength. It is understood that the sequence of a polynucleotide need not be 100% complementary to that of its target nucleic acid to be specifically hybridizable; it can have at least about 70%, at least about 80%, or at least about 90%, or at least about 95% sequence identity and still hybridize to the target nucleic acid. Moreover, a polynucleotide may hybridize over one or more segments such that intervening or adjacent segments are not involved in the hybridization event (e.g., a loop structure or hairpin structure, a ‘bulge’, ‘bubble’ and the like). Thus, the skilled artisan will understand that while individual bases within a sequence may not be complementary to another sequence, the sequence as a whole is still considered to be complementary.

[0048] A “gene,” for the purposes of the present disclosure, includes a DNA region encoding a gene product (e.g., a protein, RNA), as well as all DNA regions which regulate the production of the gene product, whether or not such regulatory sequences are adjacent to coding and/or transcribed sequences. Accordingly, a gene may include accessory element sequences including, but not necessarily limited to, promoter sequences, terminators, translational regulatory sequences such as ribosome binding sites and internal ribosome entry sites, enhancers, silencers, insulators, boundary elements, replication origins, matrix attachment sites and locus control regions. Coding sequences encode a gene product upon transcription or transcription and translation: the coding sequences of the disclosure may comprise fragments and need not contain a full-length open reading frame. A gene can include both the strand that is transcribed as well as the complementary strand containing the anticodons.

[0049] The term “downstream” refers to a nucleotide sequence that is located 3′ to a reference nucleotide sequence. In certain embodiments, downstream nucleotide sequences relate to sequences that follow the starting point of transcription. For example, the translation initiation codon of a gene is located downstream of the start site of transcription.

[0050] The term “upstream” refers to a nucleotide sequence that is located 5′ to a reference nucleotide sequence. In certain embodiments, upstream nucleotide sequences relate to sequences that are located on the 5′ side of a coding region or starting point of transcription. For example, most promoters are located upstream of the start site of transcription.

[0051] The term “adjacent to” with respect to polynucleotide or amino acid sequences refers to sequences that are next to, or adjoining each other in a polynucleotide or polypeptide. The skilled artisan will appreciate that two sequences can be considered to be adjacent to each other and still encompass a limited amount of intervening sequence, e.g., 1, 2, 3, 4, 5, 6, 7, 8, 9 or 10 nucleotides or amino acids.

[0052] The term “regulatory element” is used interchangeably herein with the term “regulatory sequence,” and is intended to include promoters, enhancers, and other expression regulatory elements. It will be understood that the choice of the appropriate regulatory element will depend on the encoded component to be expressed (e.g., protein or RNA) or whether the nucleic acid comprises multiple components that require different polymerases or are not intended to be expressed as a fusion protein.

[0053] The term “accessory element” is used interchangeably herein with the term “accessory sequence,” and is intended to include coding and non-coding sequences that enhance expression, trafficking of the nucleic acid, or the function of mRNA or protein and include, inter alia, polyadenylation signals (poly (A) signal), enhancer elements, introns, posttranscriptional regulatory elements (PTREs), nuclear localization signals (NLS), deaminases, DNA glycosylase inhibitors, additional promoters, factors that stimulate CRISPR-mediated homology-directed repair (e.g. in cis or in trans), self-cleaving sequences, and fusion domains, for example a fusion domain fused to a CRISPR protein. It will be understood that the choice of the appropriate accessory element or elements will depend on the encoded component to be expressed (e.g., protein or RNA) or whether the nucleic acid comprises multiple components that require different polymerases or are not intended to be expressed as a fusion protein.

[0054] The term “promoter” refers to a DNA sequence that contains a transcription start site and additional sequences to facilitate polymerase binding and transcription. Exemplary eukaryotic promoters include elements such as a TATA box, and/or B recognition element (BRE) and assists or promotes the transcription and expression of an associated transcribable polynucleotide sequence and/or gene (or transgene). A promoter can be synthetically produced or can be derived from a known or naturally occurring promoter sequence or another promoter sequence. A promoter can be proximal or distal to the gene to be transcribed. A promoter can also include a chimeric promoter comprising a combination of two or more heterologous sequences to confer certain properties. A promoter of the present disclosure can include variants of promoter sequences that are similar in composition, but not identical to, other promoter sequence(s) known or provided herein. A promoter can be classified according to criteria relating to the pattern of expression of an associated coding or transcribable sequence or gene operably linked to the promoter, such as constitutive, developmental, tissue-specific, inducible, etc. A promoter can also be classified according to its strength. As used in the context of a promoter, “strength” refers to the rate of transcription of the gene controlled by the promoter. A “strong” promoter means the rate of transcription is high, while a “weak” promoter means the rate of transcription is relatively low.

[0055] A promoter of the disclosure can be a Polymerase II (Pol II) promoter. Polymerase II transcribes all protein coding and many non-coding genes. A representative Pol II promoter includes a core promoter, which is a sequence of about 100 base pairs surrounding the transcription start site, and serves as a binding platform for the Pol II polymerase and associated general transcription factors. The promoter may contain one or more core promoter elements such as the TATA box, BRE, Initiator (INR), motif ten element (MTE), downstream core promoter element (DPE), downstream core element (DCE), although core promoters lacking these elements are known in the art.

[0056] A promoter of the disclosure can be a Polymerase III (Pol III) promoter. Pol III transcribes DNA to synthesize small ribosomal RNAs such as the 5S rRNA, tRNAs, and other small RNAs. Representative Pol III promoters use internal control sequences (sequences within the transcribed section of the gene) to support transcription, although upstream elements such as the TATA box are also sometimes used. All Pol III promoters are envisaged as within the scope of the instant disclosure.

[0057] The term “enhancer” refers to regulatory DNA sequences that, when bound by specific proteins called transcription factors, regulate the expression of an associated gene. Enhancers may be located in the intron of the gene, or 5′ or 3′ of the coding sequence of the gene. Enhancers may be proximal to the gene (i.e., within a few tens or hundreds of base pairs (bp) of the promoter), or may be located distal to the gene (i.e., thousands of bp, hundreds of thousands of bp, or even millions of bp away from the promoter). A single gene may be regulated by more than one enhancer, all of which are envisaged as within the scope of the instant disclosure.

[0058] As used herein, a “post-transcriptional regulatory element (PTRE),” such as a hepatitis PTRE, refers to a DNA sequence that, when transcribed creates a tertiary structure capable of exhibiting post-transcriptional activity to enhance or promote expression of an associated gene operably linked thereto.

[0059] “Recombinant,” as used herein, means that a particular nucleic acid (DNA or RNA) is the product of various combinations of cloning, restriction, and/or ligation steps resulting in a construct having a structural coding or non-coding sequence distinguishable from endogenous nucleic acids found in natural systems. Generally, DNA sequences encoding the structural coding sequence can be assembled from cDNA fragments and short oligonucleotide linkers, or from a series of synthetic oligonucleotides, to provide a synthetic nucleic acid which is capable of being expressed from a recombinant transcriptional unit contained in a cell or in a cell-free transcription and translation system. Such sequences can be provided in the form of an open reading frame uninterrupted by internal non-translated sequences, or introns, which are typically present in eukaryotic genes. Genomic DNA comprising the relevant sequences can also be used in the formation of a recombinant gene or transcriptional unit. Sequences of non-translated DNA may be present 5′ or 3′ from the open reading frame, where such sequences do not interfere with manipulation or expression of the coding regions, and may indeed act to modulate production of a desired product by various mechanisms (see “enhancers” and “promoters”, above).

[0060] The term “recombinant polynucleotide” or “recombinant nucleic acid” refers to one which is not naturally occurring, e.g., is made by the artificial combination of two otherwise separated segments of sequence through human intervention. This artificial combination is often accomplished by either chemical synthesis means, or by the artificial manipulation of isolated segments of nucleic acids, e.g., by genetic engineering techniques. Such is usually done to replace a codon with a redundant codon encoding the same or a conservative amino acid, while typically introducing or removing a sequence recognition site. Alternatively, it is performed to join together nucleic acid segments of desired functions to generate a desired combination of functions. This artificial combination is often accomplished by either chemical synthesis means, or by the artificial manipulation of isolated segments of nucleic acids, e.g., by genetic engineering techniques.

[0061] Similarly, the term “recombinant polypeptide” or “recombinant protein” refers to a polypeptide or protein which is not naturally occurring, e.g., is made by the artificial combination of two otherwise separated segments of amino sequence through human intervention. Thus, e.g., a protein that comprises a heterologous amino acid sequence is recombinant.

[0062] As used herein, “Lp (a)” or “lipoprotein (a)” comprises apo (a) and an LDL-like particle containing apoB. The apo (a) protein is linked to the apoB by a disulfide bond.

[0063] As used herein, “apolipoprotein A” or “apo (a)” means a protein sequence comprising apo (a). The apo (a) is encoded by the LPA gene.

[0064] As used herein, “apolipoprotein B” or “apoB” means a protein sequence comprising apoB. The apoB protein is encoded by the APOB gene.

[0065] As used herein, “lipoprotein”, such as VLDL, LDL and HDL, refers to a group of proteins found in the serum, plasma and lymph and are important for lipid transport. The chemical composition of each lipoprotein differs, for example, in that the HDL has a higher proportion of protein versus lipid, whereas the VLDL has a lower proportion of protein versus lipid.

[0066] As used herein, “atherosclerosis” means a hardening of the arteries affecting large and medium-sized arteries and is characterized by the presence of fatty deposits. The fatty deposits are called “atheromas” or “plaques,” which consist mainly of cholesterol and other fats, calcium and scar tissue, and damage the lining of arteries.

[0067] As used herein, “coronary heart disease (CHD)” means a narrowing of the small blood vessels that supply blood and oxygen to the heart, which is often a result of atherosclerosis.

[0068] As used herein, “dyslipidemia” refers to a disorder of lipid and/or lipoprotein metabolism, including lipid and/or lipoprotein overproduction or deficiency. Dyslipidemias can be manifested by elevation of lipids such as chylomicron, cholesterol and triglycerides as well as lipoproteins such as low-density lipoprotein (LDL) cholesterol.

[0069] As used herein, “high density lipoprotein-C” or “HDL-C” means cholesterol associated with high-density lipoprotein particles. Concentration of HDL-C in serum (or plasma) is typically quantified in mg/dL or nmol/L. “Serum HDL-C” and “plasma HDL-C” mean HDL-C in serum and plasma, respectively.

[0070] As used herein, “low density lipoprotein-cholesterol (LDL-C)” means cholesterol carried in low density lipoprotein particles. Concentration of LDL-C in serum (or plasma) is typically quantified in mg/dL or nmol/L. “Serum LDL-C” and “plasma LDL-C” mean LDL-C in the serum and plasma, respectively.

[0071] As used herein, “hypercholesterolemia” means a condition characterized by elevated cholesterol or circulating (plasma) cholesterol, LDL-cholesterol and VLDL-cholesterol, as per the guidelines of the Expert Panel Report of the National Cholesterol Educational Program (NCEP) of Detection, Evaluation of Treatment of high cholesterol in adults (see, Arch. Int. Med. 148:36 (1988)).

[0072] As used herein, “hyperlipidemia” or “hyperlipemia” is a condition characterized by elevated serum lipids or circulating (plasma) lipids. This condition manifests an abnormally high concentration of fats. The lipid fractions in the circulating blood are cholesterol, low-density lipoproteins, very low density lipoproteins, chylomicrons and triglycerides. The Fredrickson classification of hyperlipidemias is based on the pattern of TG and cholesterol-rich lipoprotein particles, as measured by electrophoresis or ultracentrifugation and is commonly used to characterize primary causes of hyperlipidemias such as hypertriglyceridemia.

[0073] As used herein, “triglyceride” or “TG” means a lipid or neutral fat consisting of glycerol combined with three fatty acid molecules.

[0074] As used herein, “hypertriglyceridemia” means a condition characterized by elevated triglyceride levels. Its etiology includes primary (i.e., genetic causes) and secondary (other underlying causes such as diabetes, metabolic syndrome/insulin resistance, obesity, physical inactivity, cigarette smoking, excess alcohol, and a diet very high in carbohydrates) factors or, most often, a combination of both

[0075] As used herein, “diabetes mellitus” or “diabetes” is a syndrome characterized by disordered metabolism and abnormally high blood sugar (hyperglycemia) resulting from insufficient levels of insulin or reduced insulin sensitivity. The characteristic symptoms are excessive urine production (polyuria) due to high blood glucose levels, excessive thirst and increased fluid intake (polydipsia) attempting to compensate for increased urination, blurred vision due to high blood glucose effects on the eye's optics, unexplained weight loss, and lethargy.

[0076] As used herein, “diabetic dyslipidemia” or “type 2 diabetes with dyslipidemia” means a condition characterized by Type 2 diabetes, reduced HDL-C, elevated triglycerides (TG), and elevated small, dense LDL particles.

[0077] As used herein, “lipid nanoparticle” or “LNP” refers to a particle having at least one dimension on the order of nanometers (e.g., 1-1,000 nm) comprising one or more lipids (e.g., cationic lipids, non-cationic lipids, helper phospholipids, and PEG-modified lipids), as well as cholesterol. Specific components of LNP are described more fully, below. In some embodiments, lipid nanoparticles are included in a formulation that can be used to deliver an active agent or therapeutic agent, such as a nucleic acid (e.g., mRNA) to a target site of interest (e.g., cell, tissue, organ, tumor, and the like). In some embodiments, the lipid nanoparticles of the disclosure comprise a nucleic acid. Such lipid nanoparticles typically comprise neutral lipids, charged lipids, steroids and polymer conjugated lipids. In some embodiments, the active agent or therapeutic agent, such as a nucleic acid, may be encapsulated in the lipid portion of the lipid nanoparticle or an aqueous space enveloped by some or all of the lipid portion of the lipid nanoparticle, thereby protecting it from enzymatic degradation or other undesirable effects induced by the mechanisms of the host organism or cells; e.g., an adverse immune response.

[0078] As used herein, “lipid nanoparticle” refers to particles having at least one dimension on the order of nanometers (e.g., 1-1,000 nm) comprising one or more lipids (e.g., cationic lipids, non-cationic lipids, and PEG-modified lipids). In some embodiments, lipid nanoparticles are included in a formulation that can be used to deliver an active agent or therapeutic agent, such as a nucleic acid (e.g., mRNA) to a target site of interest (e.g., cell, tissue, organ, tumor, and the like). In some embodiments, the lipid nanoparticles of the disclosure comprise a nucleic acid. Such lipid nanoparticles typically comprise neutral lipids, charged lipids, steroids and polymer conjugated lipids. In some embodiments, the active agent or therapeutic agent, such as a nucleic acid, may be encapsulated in the lipid portion of the lipid nanoparticle or an aqueous space enveloped by some or all of the lipid portion of the lipid nanoparticle, thereby protecting it from enzymatic degradation or other undesirable effects induced by the mechanisms of the host organism or cells e.g. an adverse immune response.

[0079] As used herein, “lipid encapsulated” refers to a lipid nanoparticle that provides an active agent or therapeutic agent, such as a nucleic acid (e.g., mRNA), with full encapsulation, partial encapsulation, or both. In an embodiment, the nucleic acid (e.g., mRNA) is fully encapsulated in the lipid nanoparticle.

[0080] As used herein, the term “contacting” means establishing a physical connection between two or more entities. For example, contacting a target nucleic acid with a guide nucleic acid means that the target nucleic acid and the guide nucleic acid are made to share a physical connection; e.g., can hybridize if the sequences share sequence similarity.

[0081] The disclosure provides systems and methods useful for editing a target nucleic acid sequence. As used herein “editing” is used interchangeably with “modifying” and “modification” and includes but is not limited to cleaving, nicking, deleting, knocking in, knocking out, and the like.

[0082] By “cleavage” it is meant the breakage of the covalent backbone of a target nucleic acid molecule (e.g., RNA, DNA). Cleavage can be initiated by a variety of methods including, but not limited to, enzymatic or chemical hydrolysis of a phosphodiester bond. Both single-stranded cleavage and double-stranded cleavage are possible, and double-stranded cleavage can occur as a result of two distinct single-stranded cleavage events.

[0083] The term “knock-out” refers to the elimination of a gene or the expression of a gene. For example, a gene can be knocked out by either a deletion or an addition of a nucleotide sequence that leads to a disruption of the reading frame. As another example, a gene may be knocked out by replacing a part of the gene with an irrelevant sequence. The term “knock-down” as used herein refers to reduction in the expression of a gene or its gene product(s). As a result of a gene knock-down, the protein activity or function may be attenuated or the protein levels may be reduced or eliminated.

[0084] As used herein, “homology-directed repair” (HDR) refers to the form of DNA repair that takes place during repair of double-strand breaks in cells. This process requires nucleotide sequence homology, and uses a donor template to repair or knock-out a target DNA, leading to the transfer of genetic information from the donor to the target. Homology-directed repair can result in an alteration of the sequence of the target sequence by insertion, deletion, or mutation if the donor template differs from the target DNA sequence and part or all of the sequence of the donor template is incorporated into the target DNA.

[0085] As used herein, “non-homologous end joining” (NHEJ) refers to the repair of double-strand breaks in DNA by direct ligation of the break ends to one another without the need for a homologous template (in contrast to homology-directed repair, which requires a homologous sequence to guide repair). NHEJ often results in the loss (deletion) or insertion of nucleotide sequence near the site of the double-strand break.

[0086] As used herein “micro-homology mediated end joining” (MMEJ) refers to a mutagenic double-strand break repair mechanism, which always associates with deletions flanking the break sites without the need for a homologous template (in contrast to homology-directed repair, which requires a homologous sequence to guide repair). MMEJ often results in the loss (deletion) of nucleotide sequence near the site of the double-strand break.

[0087] A polynucleotide or polypeptide has a certain percent “sequence similarity” or “sequence identity” to another polynucleotide or polypeptide, meaning that, when aligned, that percentage of bases or amino acids are the same, and in the same relative position, when comparing the two sequences. Sequence similarity (sometimes referred to as percent similarity, percent identity, or homology) can be determined in a number of different manners. To determine sequence similarity, sequences can be aligned using the methods and computer programs that are known in the art, including BLAST, available over the world wide web at ncbi.nlm.nih.gov/BLAST. Percent complementarity between particular stretches of nucleic acid sequences within nucleic acids can be determined using any convenient method. Example methods include BLAST programs (basic local alignment search tools) and PowerBLAST programs (Altschul et al., J. Mol. Biol., 1990, 215, 403-410; Zhang and Madden, Genome Res., 1997, 7, 649-656) or by using the Gap program (Wisconsin Sequence Analysis Package, Version 8 for Unix, Genetics Computer Group, University Research Park, Madison Wis.), e.g., using default settings, which uses the algorithm of Smith and Waterman (Adv. Appl. Math., 1981, 2, 482-489).

[0088] The terms “protein,” “polypeptide,” and “peptide” are used interchangeably herein to refer to a polymer of amino acid residues linked via peptide bonds and which may be composed of two or more polypeptide chains. Polypeptide chains can be of any length, and in some embodiments can include coded and non-coded amino acids, chemically or biochemically modified or derivatized amino acids, and polypeptides having modified peptide backbones. The term includes fusion proteins, including, but not limited to, fusion proteins with a heterologous amino acid sequences. Typically, the terms “polypeptide,” “protein,” and/or “peptide” refer to a polymer of at least two amino acid monomers joined together through peptide bonds. An amino acid may be the L-optical isomer or the D-optical isomer. More specifically, the terms “polypeptide,” “protein,” and “peptide” refer to a molecule composed of two or more amino acids in a specific order; for example, the order as determined by the base sequence of nucleotides in the gene or RNA coding for the protein. In some cases, a protein can be a portion of a larger protein, for example, a domain, a subdomain, or a motif of the protein. In some cases, a protein can be a variant (or mutation) of a protein, wherein one or more amino acid residues are inserted into, deleted from, and/or substituted into the naturally occurring, or reference, amino acid sequence of a protein. A polypeptide can be a single linear polymer chain of amino acids bonded together by peptide bonds between the carboxyl and amino groups of adjacent amino acid residues. Polypeptides can be modified, for example, by the addition of carbohydrate, phosphorylation, etc. Proteins can comprise one or more polypeptides.

[0089] A protein or a variant thereof can be naturally occurring or recombinant. Methods for detection and/or measurement of polypeptides in biological material are well known in the art and include, but are not limited to, Western-blotting, flow cytometry, ELISAs, RIAS, and various proteomics techniques. An exemplary method to measure or detect a polypeptide is an immunoassay, such as e.g., an ELISA This type of protein quantitation can be based on an antibody capable of capturing a specific antigen, and a second antibody capable of detecting the captured antigen. Exemplary assays for detection and/or measurement of polypeptides/proteins are described e.g., in Harlow, E. and Lane, D. Antibodies: A Laboratory Manual, (1988), Cold Spring Harbor Laboratory Press.

[0090] In the context of proteins, the term “fragment,” or equivalent terms refers, as used herein refers to a portion of a protein that has less than the full length of the protein and optionally maintains the function of the protein.

[0091] A “vector” or “expression vector” is a replicon, such as plasmid, phage, virus, or cosmid, which can include another DNA segment, i.e., an expression cassette, so as to bring about the replication or expression of the other DNA segment in a cell.

[0092] The term “naturally-occurring” or “unmodified” or “wild type” as used herein as applied to a nucleic acid, a polypeptide, a cell, or an organism, refers to a nucleic acid, polypeptide, cell, or organism that is found in nature.

[0093] As used herein, a “mutation” refers to an insertion, deletion, substitution, duplication, or inversion of one or more amino acids or nucleotides as compared to a wild-type or reference amino acid sequence or to a wild-type or reference nucleotide sequence.

[0094] As used herein the term “isolated” is meant to describe a polynucleotide, a polypeptide, or a cell that is in an environment different from that in which the polynucleotide, the polypeptide, or the cell naturally occurs. An isolated genetically modified host cell may be present in a mixed population of genetically modified host cells.

[0095] A “host cell,” as used herein, denotes a eukaryotic cell, a prokaryotic cell, or a cell from a multicellular organism (e.g., a cell line) cultured as a unicellular entity, which eukaryotic or prokaryotic cells are used as recipients for a nucleic acid (e.g., a vector), and include the progeny of the original cell which has been genetically modified by the nucleic acid. It is understood that the progeny of a single cell may not necessarily be completely identical in morphology or in genomic or total DNA complement as the original parent, due to natural, accidental, or deliberate mutation. A “recombinant host cell” (also referred to as a “genetically modified host cell”) is a host cell into which has been introduced a heterologous nucleic acid, e.g., a vector.

[0096] The term “conservative amino acid substitution” refers to the interchangeability in proteins of amino acid residues having similar side chains. For example, a group of amino acids having aliphatic side chains consists of glycine, alanine, valine, leucine, and isoleucine; a group of amino acids having aliphatic-hydroxyl side chains consists of serine and threonine; a group of amino acids having amide-containing side chains consists of asparagine and glutamine; a group of amino acids having aromatic side chains consists of phenylalanine, tyrosine, and tryptophan; a group of amino acids having basic side chains consists of lysine, arginine, and histidine; and a group of amino acids having sulfur-containing side chains consists of cysteine and methionine. Exemplary conservative amino acid substitution groups are: valine-leucine-isoleucine, phenylalanine-tyrosine, lysine-arginine, alanine-valine, and asparagine-glutamine.

[0097] The terms “therapeutically effective amount,” “effective amount,” and “therapeutically effective dose,” are used interchangeably herein, to refer to an amount of a drug or a biologic, alone or as a part of a composition, that is capable of having any detectable, beneficial effect on any symptom, aspect, measured parameter or characteristics of a disease state or condition when administered in one or repeated doses to a subject in need thereof, such e.g., as a human or an experimental animal. Such effect need not be absolute to be beneficial.

[0098] As used herein, “administering” means a method of giving a dosage of a compound (e.g., a composition of the disclosure) or a composition (e.g., a pharmaceutical composition) to a subject.

[0099] As used herein, “treatment” or “treating,” are used interchangeably herein and refer to an approach for obtaining beneficial or desired results, including but not limited to a therapeutic benefit and/or a prophylactic benefit. Therapeutic benefit refers to eradication or amelioration of the underlying disorder or disease being treated. A therapeutic benefit can also be achieved with the eradication or amelioration of one or more of the symptoms or an improvement in one or more clinical parameters associated with the underlying disease such that an improvement is observed in the subject, notwithstanding that the subject may still be afflicted with the underlying disorder.

[0100] A “subject” is a mammal. Mammals include, but are not limited to, domesticated animals, non-human primates, humans, dogs, rabbits, mice, rats and other rodents.

[0101] The term “low-density lipoprotein (LDL)” refers to one of the five major groups of lipoprotein, from least dense (lower weight-volume ratio particles) to most dense (larger weight-volume ratio particles): chylomicrons, very low-density lipoproteins (VLDL), low-density lipoproteins (LDL), intermediate-density lipoproteins (IDL), and high-density lipoproteins (HDL). Lipoproteins transfer lipids (fats) around the body in the extracellular fluid thereby facilitating the transfer of fats to the cells body via receptor-mediated endocytosis. An LDL particle is about 220-275 angstroms in diameter.

[0102] “Low-density lipoprotein (LDL) receptor” refers to a receptor protein of 839 amino acids (after removal of 21-amino acid signal peptide) that mediates the endocytosis of cholesterol-rich LDL particles. It is a cell-surface receptor that recognizes the apoprotein B100 and apoE protein found in chylomicron remnants and VLDL remnants (IDL) resulting in the binding and endocytosis of LDL-cholesterol. This process occurs in all nucleated cells, but mainly in the liver which removes approximately 70% of LDL from the circulation. The human LDLR gene is described in part in the NCBI database (ncbi.nlm.nih.gov) as Reference Sequence NG_009060.1, which is incorporated by reference herein.

[0103] All publications, patents, and patent applications mentioned in this specification are herein incorporated by reference to the same extent as if each individual publication, patent, or patent application was specifically and individually indicated to be incorporated by reference.

### I. General Methods

[0104] The practice of the present invention employs, unless otherwise indicated, conventional techniques of immunology, biochemistry, chemistry, molecular biology, microbiology, cell biology, genomics and recombinant DNA, which can be found in such standard textbooks as Molecular Cloning: A Laboratory Manual, 3rd Ed. (Sambrook et al., Harbor Laboratory Press 2001); Short Protocols in Molecular Biology, 4^{th} Ed. (Ausubel et al. eds., John Wiley & Sons 1999); Protein Methods (Bollag et al., John Wiley & Sons 1996); Nonviral Vectors for Gene Therapy (Wagner et al. eds., Academic Press 1999); Viral Vectors (Kaplift & Loewy eds., Academic Press 1995); Immunology Methods Manual (I. Lefkovits ed., Academic Press 1997); and Cell and Tissue Culture: Laboratory Procedures in Biotechnology (Doyle & Griffiths, John Wiley & Sons 1998), the disclosures of which are incorporated herein by reference. Where a range of values is provided, it is understood that endpoints are included and that each intervening value, to the tenth of the unit of the lower limit unless the context clearly dictates otherwise, between the upper and lower limit of that range and any other stated or intervening value in that stated range, is encompassed. The upper and lower limits of these smaller ranges may independently be included in the smaller ranges, and are also encompassed, subject to any specifically excluded limit in the stated range. Where the stated range includes one or both of the limits, ranges excluding either or both of those included limits are also included.

[0105] Unless defined otherwise, all technical and scientific terms used herein have the same meaning as commonly understood by one of ordinary skill in the art to which this invention belongs. All publications mentioned herein are incorporated herein by reference to disclose and describe the methods and/or materials in connection with which the publications are cited.

[0106] It will be appreciated that certain features of the disclosure, which are, for clarity, described in the context of separate embodiments, may also be provided in combination in a single embodiment. In other cases, various features of the disclosure, which are, for brevity, described in the context of a single embodiment, may also be provided separately or in any suitable sub-combination. It is intended that all combinations of the embodiments pertaining to the disclosure are specifically embraced by the present disclosure and are disclosed herein just as if each and every combination was individually and explicitly disclosed. In addition, all sub-combinations of the various embodiments and elements thereof are also specifically embraced by the present disclosure and are disclosed herein just as if each and every such sub-combination was individually and explicitly disclosed herein.

### II. Systems for Genetic Editing of LPA Genes

[0107] In a first aspect, the present disclosure provides systems comprising an engineered CasX nuclease protein and one or more guide ribonucleic acids (gRNA), as well as nucleic acids encoding the engineered CasX nuclease proteins and gRNA, for use in modifying an LPA gene, inclusive of coding and non-coding regions. As used herein, a “system”, used interchangeably with “composition”, can comprise an engineered CasX nuclease protein and one or more gRNAs of the disclosure as gene editing pairs, nucleic acids (DNA, RNA or vectors) encoding the engineered CasX nuclease proteins and gRNA, as well as vectors or lipid nanoparticles (LNP) comprising the nucleic acids or engineered CasX nuclease protein and one or more gRNAs the disclosure.

[0108] The LPA gene encodes a serine proteinase that inhibits the activity of tissue-type plasminogen activator I. The encoded protein constitutes a substantial portion of lipoprotein (a). Apo (a) is known to be proteolytically cleaved, leading to the formation of the so-called mini-Lp (a). Apo (a) fragments accumulate and attach to atherosclerotic lesions and promote thrombogenesis.

[0109] The gene comprises the sequence that spans chr6: 160,531,482-160,664 of the human genome (GRCh38/hg38) (the notation refers to the chromosome 6 (chr6), starting at the 160,531,482 bp to 160,664,275 bp on chromosome 6. The human LPA gene is described in part in the NCBI database (ncbi.nlm.nih.gov) as Reference Sequence NG_016147.1, which is incorporated by reference herein. The LPA locus has 39 exons that produces an mRNA of 13938 bp, encoding apo (a), having 2040 amino acids, the main constituent of lipoprotein (a) (Lp (a)).

[0110] The human LPA gene (HGNC: 6667 NCBI Entrez Gene: 4018) encodes a protein (P08519) having the sequence

(SEQ ID NO: 543)
MEHKEVVLLLLLFLKSAAPEQSHVVQDCYHGDGQSYRGTYSTTVTGRTCQAWSSMTPHQHNRTTENYPN
AGLIMNYCRNPDAVAAPYCYTRDPGVRWEYCNLTQCSDAEGTAVAPPTVTPVPSLEAPSEQAPTEQRPG
VQECYHGNGQSYRGTYSTTVTGRTCQAWSSMTPHSHSRTPEYYPNAGLIMNYCRNPDAVAAPYCYTRDP
GVRWEYCNLTQCSDAEGTAVAPPTVTPVPSLEAPSEQAPTEQRPGVQECYHGNGQSYRGTYSTTVTGRT
CQAWSSMTPHSHSRTPEYYPNAGLIMNYCRNPDAVAAPYCYTRDPGVRWEYCNLTQCSDAEGTAVAPPT
VTPVPSLEAPSEQAPTEQRPGVQECYHGNGQSYRGTYSTTVTGRTCQAWSSMTPHSHSRTPEYYPNAGL
IMNYCRNPDAVAAPYCYTRDPGVRWEYCNLTQCSDAEGTAVAPPTVTPVPSLEAPSEQAPTEQRPGVQE
CYHGNGQSYRGTYSTTVTGRTCQAWSSMTPHSHSRTPEYYPNAGLIMNYCRNPDAVAAPYCYTRDPGVR
WEYCNLTQCSDAEGTAVAPPTVTPVPSLEAPSEQAPTEQRPGVQECYHGNGQSYRGTYSTTVTGRTCQA
WSSMTPHSHSRTPEYYPNAGLIMNYCRNPDAVAAPYCYTRDPGVRWEYCNLTQCSDAEGTAVAPPTVTP
VPSLEAPSEQAPTEQRPGVQECYHGNGQSYRGTYSTTVTGRTCQAWSSMTPHSHSRTPEYYPNAGLIMN
YCRNPDAVAAPYCYTRDPGVRWEYCNLTQCSDAEGTAVAPPTVTPVPSLEAPSEQAPTEQRPGVQECYH
GNGQSYRGTYSTTVTGRTCQAWSSMTPHSHSRTPEYYPNAGLIMNYCRNPDPVAAPYCYTRDPSVRWEY
CNLTQCSDAEGTAVAPPTITPIPSLEAPSEQAPTEQRPGVQECYHGNGQSYQGTYFITVTGRTCQAWSS
MTPHSHSRTPAYYPNAGLIKNYCRNPDPVAAPWCYTTDPSVRWEYCNLTRCSDAEWTAFVPPNVILAPS
LEAFFEQALTEETPGVQDCYYHYGQSYRGTYSTTVTGRTCQAWSSMTPHQHSRTPENYPNAGLTRNYCR
NPDAEIRPWCYTMDPSVRWEYCNLTQCLVTESSVLATLTVVPDPSTEASSEEAPTEQSPGVQDCYHGDG
QSYRGSFSTTVTGRTCQSWSSMTPHWHQRTTEYYPNGGLTRNYCRNPDAEISPWCYTMDPNVRWEYCNL
TQCPVTESSVLATSTAVSEQAPTEQSPTVQDCYHGDGQSYRGSFSTTVTGRTCQSWSSMTPHWHQRTTE
YYPNGGLTRNYCRNPDAEIRPWCYTMDPSVRWEYCNLTQCPVMESTLLTTPTVVPVPSTELPSEEAPTE
NSTGVQDCYRGDGQSYRGTLSTTITGRTCQSWSSMTPHWHRRIPLYYPNAGLTRNYCRNPDAEIRPWCY
TMDPSVRWEYCNLTRCPVTESSVLTTPTVAPVPSTEAPSEQAPPEKSPVVQDCYHGDGRSYRGISSTTV
TGRTCQSWSSMIPHWHQRTPENYPNAGLTENYCRNPDSGKQPWCYTTDPCVRWEYCNLTQCSETESGVL
ETPTVVPVPSMEAHSEAAPTEQTPVVRQCYHGNGQSYRGTFSTTVTGRTCQSWSSMTPHRHQRTPENYP
NDGLTMNYCRNPDADTGPWCFTMDPSIRWEYCNLTRCSDTEGTVVAPPTVIQVPSLGPPSEQDCMFGNG
KGYRGKKATTVTGTPCQEWAAQEPHRHSTFIPGTNKWAGLEKNYCRNPDGDINGPWCYTMNPRKLFDYC
DIPLCASSSFDCGKPQVEPKKCPGSIVGGCVAHPHSWPWQVSLRTRFGKHFCGGTLISPEWVLTAAHCL
KKSSRPSSYKVILGAHQEVNLESHVQEIEVSRLFLEPTQADIALLKLSRPAVITDKVMPACLPSPDYMV
TARTECYITGWGETQGTFGTGLLKEAQLLVIENEVCNHYKYICAEHLARGTDSCQGDSGGPLVCFEKDK
YILQGVTSWGLGCARPNKPGVYARVSRFVTWIEGMMRNN.

[0111] In some embodiments, the disclosure provides systems specifically designed to modify the LPA gene in eukaryotic cells. In some cases, the systems of the disclosure are designed to knock-down or knock-out the LPA gene. Generally, any portion of the LPA gene can be targeted using the programable compositions and methods provided herein, described more fully, herein.

[0112] In some embodiments, the disclosure provides systems comprising one or more engineered CasX proteins or nucleic acids encoding the engineered CasX proteins, and one or more guide nucleic acid variants (gRNA) as a CasX:gRNA system designed to target and edit specific locations in the target nucleic acid sequence of the LPA gene. In some embodiments, the disclosure provides vectors encoding the CasX:gRNA components, which, when delivered to the target cells, are expressed and associate as gene editing pairs capable of modifying the LPA gene. In some embodiments, the disclosure provides LNP that comprise an mRNA that encodes the CasX component and one or more gRNA that, when delivered to the target cells, express the CasX, which associates with the gRNA as a gene editing pair capable of modifying the LPA gene. Each of these components and their use in the editing of the LPA gene is described herein, below.

### III. CasX Proteins for Modifying a Target Nucleic Acid of an LPA Gene

[0113] The present disclosure provides engineered CasX nuclease proteins, and nucleic acids encoding same, that can be used to modify a target nucleic acid of an LPA gene in eukaryotic cells.

[0114] The engineered CasX proteins employed in the systems described herein are Class 2, Type V nucleases. Although members of Class 2, Type V CRISPR-Cas systems have differences, they share some common characteristics that distinguish them from the Cas9 systems. Firstly, the Class 2, Type V nucleases possess a single RNA-guided RuvC domain-containing effector but no HNH domain, and they recognize a TC motif protospacer adjacent motif (PAM) 5′ upstream to the target region on the non-targeted strand, which is different from Cas9 systems which rely on G-rich PAM at 3′ side of target sequences. Type V nucleases generate staggered double-stranded breaks distal to the PAM sequence, unlike Cas9, which generates a blunt end in the proximal site close to the PAM. In addition, Type V nucleases degrade ssDNA in trans when activated by target dsDNA or ssDNA binding in cis. In some embodiments, the CasX proteins of the embodiments recognize a 5′-TC PAM motif and produce staggered ends cleaved solely by the RuvC domain.

[0115] Engineered CasX proteins of the disclosure comprise the following domains: a non-target strand binding (NTSB) domain, a target strand loading (TSL) domain, a helical I domain, a helical II domain, an oligonucleotide binding domain (OBD), and a RuvC DNA cleavage domain, and, in some cases, domains can be further divided into subdomains, as listed in Tables 2 and 3.

[0116] In some embodiments, an engineered CasX protein can bind and/or modify (e.g., catalyze a single strand break (a “nickase”), or catalyze a double strand break) a target nucleic acid at a specific sequence targeted by an associated gRNA, which hybridizes to a sequence within the target nucleic acid sequence. In some embodiments, the engineered CasX comprises a nuclease domain having double-stranded cleavage activity that generates a double-stranded break within 18-26 nucleotides 5′ of a PAM site on the target strand and 10-18 nucleotides 3′ on the non-target strand, resulting in overhangs that can facilitate a higher degree of editing efficiency or insertion of a donor template nucleic acid by HDR or HITI repair mechanisms of the host cell, compared to other CRISPR systems.

a. Reference CasX Proteins

[0117] The disclosure provides naturally-occurring CasX proteins (referred to herein as a “reference CasX protein”), which were subsequently modified to create the engineered CasX proteins of the disclosure. For example, reference CasX proteins can be isolated from naturally occurring prokaryotes, such as Deltaproteobacteria, Planctomycetes, or Candidatus Sungbacteria species. A reference CasX protein (interchangeably referred to herein as a reference CasX polypeptide) is a Class 2, Type V CRISPR/Cas endonuclease belonging to the CasX (interchangeably referred to as Cas12e) family of proteins that interacts with a guide RNA to form a ribonucleoprotein (RNP) complex.

[0118] In some cases, a reference CasX protein is isolated or derived from Deltaproteobacter, and comprises a sequence of SEQ ID NO: 1.

[0119] In some cases, a reference CasX protein is isolated or derived from Planctomycetes, and comprises a sequence of SEQ ID NO: 2.

[0120] In some cases, a reference CasX protein is isolated or derived from Candidatus Sungbacteria, and comprises a sequence of SEQ ID NO: 3.

b. Engineered CasX Proteins

[0121] The present disclosure provides highly-modified engineered CasX proteins having multiple mutations relative to one or more reference CasX proteins. Any changes in the amino acid sequence of a reference CasX protein which results in a CasX and that leads to an improved characteristic relative to the reference CasX protein is considered an engineered CasX protein of the disclosure, provided the CasX retains the ability to form an RNP with a gRNA and retains nuclease activity. Exemplary improved characteristics of the engineered CasX embodiments, relative to reference CasX comprising sequences of SEQ ID NOS: 1-3 (described, supra) include, but are not limited to improved ability to utilize a greater spectrum of PAM sequences in the editing and/or binding of target nucleic acid, increased nuclease activity, improved editing efficiency, improved editing specificity for the target nucleic acid, decreased off-target editing or cleavage, increased percentage of a eukaryotic genome that can be efficiently edited, increased activity of the nuclease, improved ability to form cleavage-competent ribonucleoprotein (RNP) complexes with gRNA, and improved ribonucleoprotein (RNP) complex stability. In particular, the engineered CasX proteins of the disclosure have an enhanced ability to efficiently edit and/or bind target DNA, when complexed with a guide RNA scaffold as an RNP, utilizing a PAM TC motif, including PAM sequences selected from TTC, ATC, GTC, or CTC, compared to an RNP of a reference CasX protein and a reference gRNA. In the foregoing, the PAM sequence is located at least l nucleotide 5′ to the non-target strand of the protospacer having identity with the targeting sequence of the gRNA in an assay system compared to the editing efficiency and/or binding of an RNP comprising the reference CasX protein and reference gRNA in a comparable assay system. In the foregoing embodiments, the one or more of the improved characteristics of the engineered CasX is at least about 1.1 to about 100,000-fold improved relative to the reference CasX protein of SEQ ID NO: 1, SEQ ID NO: 2, or SEQ ID NO: 3, when assayed in a comparable fashion. In other embodiments, the improvement is at least about 1.1-fold, at least about 2-fold, at least about 5-fold, at least about 10-fold, at least about 50-fold, at least about 100-fold, at least about 500-fold, at least about 1000-fold, at least about 5000-fold, at least about 10,000-fold, or at least about 100,000-fold compared to the reference CasX protein of SEQ ID NO: 1, SEQ ID NO: 2, or SEQ ID NO: 3.

[0122] The engineered CasX protein can comprise one or more amino acid substitutions, insertions, deletions, swapped domains from a second CasX protein, or any combinations thereof, relative to a reference CasX protein sequence or a parental CasX variant protein from which it was derived. In some embodiment, the disclosure provides engineered CasX proteins wherein the engineered CasX protein comprises a RuvC cleavage domain, wherein the RuvC cleavage domain comprises the sequence of amino acids 648-812 of SEQ ID NO: 2 with one or more amino acid modifications relative to the RuvC cleavage domain sequence. In some embodiments, the one or more amino acid modifications of the RuvC domain comprise a modification at a position selected from the group consisting of 1658, A708, and P793 relative to SEQ ID NO: 2. Mutations can be introduced in any one or more domains of the reference CasX protein or in a CasX variant to result in an engineered CasX protein, and may include, for example, deletion of part or all of one or more domains, or one or more amino acid substitutions, deletions, or insertions in any domain of the reference CasX protein or the CasX variant protein from which it was derived.

[0123] In some embodiments, an engineered CasX protein comprises a sequence of SEQ ID NOS: 4-7, as set forth in Table 1. In some embodiments, an engineered CasX protein consists of a sequence of SEQ ID NOS: 4-7, as set forth in Table 1. In other embodiments, an engineered CasX protein comprises a sequence at least 70% identical, at least 75% identical, at least 80% identical, at least 81% identical, at least 82% identical, at least 83% identical, at least 84% identical, at least 85% identical, at least 86% identical, at least 86% identical, at least 87% identical, at least 88% identical, at least 89% identical, at least 90% identical, at least 91% identical, at least 92% identical, at least 93% identical, at least 94% identical, at least 95% identical, at least 96% identical, at least 97% identical, at least 98% identical, at least 99% identical, at least 99.5% identical to a sequence of SEQ ID NOS: 4, as set forth in Table 1. In some embodiments, an engineered CasX protein comprises a sequence of SEQ ID NO: 4. In some embodiments, an engineered CasX protein comprises a sequence of SEQ ID NO: 5, or a sequence at least 60% identical, at least 65% identical, at least 70% identical, at least 75% identical, at least 80% identical, at least 81% identical, at least 82% identical, at least 83% identical, at least 84% identical, at least 85% identical, at least 86% identical, at least 86% identical, at least 87% identical, at least 88% identical, at least 89% identical, at least 90% identical, at least 91% identical, at least 92% identical, at least 93% identical, at least 94% identical, at least 95% identical, at least 96% identical, at least 97% identical, at least 98% identical, at least 99% identical, at least 99.5% identical thereto. In some embodiments, an engineered CasX protein comprises a sequence of SEQ ID NO: 5. In some embodiments, an engineered CasX protein comprises a sequence of SEQ ID NO: 6, or a sequence at least 60% identical, at least 65% identical, at least 70% identical, at least 75% identical, at least 80% identical, at least 81% identical, at least 82% identical, at least 83% identical, at least 84% identical, at least 85% identical, at least 86% identical, at least 86% identical, at least 87% identical, at least 88% identical, at least 89% identical, at least 90% identical, at least 91% identical, at least 92% identical, at least 93% identical, at least 94% identical, at least 95% identical, at least 96% identical, at least 97% identical, at least 98% identical, at least 99% identical, at least 99.5% identical thereto. In some embodiments, an engineered CasX protein comprises a sequence of SEQ ID NO: 6. In some embodiments, an engineered CasX protein comprises a sequence of SEQ ID NO: 7, or a sequence at least 60% identical, at least 65% identical, at least 70% identical, at least 75% identical, at least 80% identical, at least 81% identical, at least 82% identical, at least 83% identical, at least 84% identical, at least 85% identical, at least 86% identical, at least 86% identical, at least 87% identical, at least 88% identical, at least 89% identical, at least 90% identical, at least 91% identical, at least 92% identical, at least 93% identical, at least 94% identical, at least 95% identical, at least 96% identical, at least 97% identical, at least 98% identical, at least 99% identical, at least 99.5% identical thereto. In some embodiments, an engineered CasX protein comprises a sequence of SEQ ID NO: 7. In some embodiments, the foregoing engineered CasX proteins retain the functional properties of the ability to form an RNP with a gRNA and retain nuclease activity.

TABLE 1
Engineered CasX Protein Sequences

| SEQ | Variant | |
|---|---|---|
| ID NO | No. | Amino Acid Sequence |
| 4 | 491 | QEIKRINKIRRRLVKDSNTKKAGKTGPMKTLLVRVMTPDLRERLENLRKKPENIPQPI |
| | | SNTSRANLNKLLTDYTEMKKAILHVYYEEFQKDPVGLMSRVAQPASKKIDQNKLKPEM |
| | | DEKGNLTTAGFACSQCGQPLFVYKLEQVSEKGKAYTNYFGRCNVAEHEKLILLAQLKP |
| | | EKDSDEAVTYSLGKFGQRALDFYSIHVTKESTHPVKPLAQIAGNRYASGPVGKALSDA |
| | | CMGTIASFLSKYQDIIIEHQKVVKGNQKRLESLRELAGKENLEYPSVTLPPQPHTKEG |
| | | VDAYNEVIARVRMWVNLNLWQKLKLSRDDAKPLLRLKGFPSFPLVERQANEVDWWDMV |
| | | CNVKKLINEKKEDGKVFWQNLAGYKRQEALRPYLSSEEDRKKGKKFARYQLGDLLLHL |
| | | EKKHGEDWGKVYDEAWERIDKKVEGLSKHIKLEEERRSEDAQSKAALTDWLRAKASFV |
| | | IEGLKEADKDEFCRCELKLQKWYGDLRGKPFAIEAENSILDISGFSKQYNCAFIWQKD |
| | | GVKKLNLYLIINYFKGGKLRFKKIKPEAFEANRFYTVINKKSGEIVPMEVNFNFDDPN |
| | | LIILPLAFGKRQGREFIWNDLLSLETGSLKLANGRVIEKTLYNRRTRQDEPALFVALT |
| | | FERREVLDSSNIKPMNLIGVDRGENIPAVIALTDPEGCPLSRFKDSLGNPTHILRIGE |
| | | SYKEKQRTIQAKKEVEQRRAGGYSRKYASKAKNLADDMVRNTARDLLYYAVTQDAMLI |
| | | FENLSRGFGRQGKRTFMAERQYTRMEDWLTAKLAYEGLSKTYLSKTLAQYTSKTCSNC |
| | | GFTITSADYDRVLEKLKKTATGWMTTINGKELKVEGQITYYNRYKRQNVVKDLSVELD |
| | | RLSEESVNNDISSWTKGRSGEALSLLKKRFSHRPVQEKFVCLNCGFETHADEQAALNI |
| | | ARSWLFLRSQEYKKYQTNKTTGNTDKRAFVETWQSFYRKKLKEVWKPAV |
| 5 | 515 | QEIKRINKIRRRLVKDSNTKKAGKTGPMKTLLVRVMTPDLRERLENLRKKPENIPQPI |
| | | SNTSRANLNKLLTDYTEMKKAILHVYWEEFQKDPVGLMSRVAQPASKKIDQNKLKPEM |
| | | DEKGNLTTAGFACSQCGQPLFVYKLEQVSEKGKAYTNYFGRCNVAEHEKLILLAQLKP |
| | | EKDSDEAVTYSLGKFGQRALDFYSIHVTKESTHPVKPLAQIAGNRYASGPVGKALSDA |
| | | CMGTIASFLSKYQDIIIEHQKVVKGNQKRLESLRELAGKENLEYPSVTLPPQPHTKEG |
| | | VDAYNEVIARVRMWVNLNLWQKLKLSRDDAKPLLRLKGFPSFPLVERQANEVDWWDMV |
| | | CNVKKLINEKKEDGKVFWQNLAGYKRQEALRPYLSSEEDRKKGKKFARYQLGDLLLHL |
| | | EKKHGEDWGKVYDEAWERIDKKVEGLSKHIKLEEERRSEDAQSKAALTDWLRAKASFV |
| | | IEGLKEADKDEFCRCELKLQKWYGDLRGKPFAIEAENSILDISGFSKQYNCAFIWQKD |
| | | GVKKLNLYLIINYFKGGKLRFKKIKPEAFEANRFYTVINKKSGEIVPMEVNFNFDDPN |
| | | LIILPLAFGKRQGREFIWNDLLSLETGSLKLANGRVIEKTLYNRRTRQDEPALFVALT |
| | | FERREVLDSSNIKPMNLIGVDRGENIPAVIALTDPEGCPLSRFKDSLGNPTHILRIGE |
| | | SYKEKQRTIQAKKEVEQRRAGGYSRKYASKAKNLADDMVRNTARDLLYYAVTQDAMLI |
| | | FENLSRGFGRQGKRTFMAERQYTRMEDWLTAKLAYEGLPSKTYLSKTLAQYTSKTCSN |
| | | CGFTITSADYDRVLEKLKKTATGWMTTINGKELKVEGQITYYNRYKRQNVVKDLSVEL |
| | | DRLSEESVNNDISSWTKGRSGEALSLLKKRFSHRPVQEKFVCLNCGFETHADEQAALN |
| | | IARSWLFLRSQEYKKYQTNKTTGNTDKRAFVETWQSFYRKKLKEVWKPAV |
| 6 | 676 | QEIKRINKIRRRLVKDSNTKKAGKTRGPMKTLLVRVMTPDLRERLENLRKKPENIPQP |
| | | ISNTSRANLNKLLTDYTEMKKAILHVYWEEFQKDPVGLMSRVAQPASKKIDQNKLKPE |
| | | MDEKGNLTTAGFACSQCGQPLFVYKLEQVSEKGKAYTNYFGRCNVAEHEKLIKLAQLK |
| | | PEKDSDEAVTYSLGKFGQRALDFYSIHVTKESTHPVKPLAQIAGNRYASSPVGKALSD |
| | | ACMGTIASFLSKYQDIIIEHQKVVKGNQKRLESLRELAGKENLEYPSVTLPPQPHTKE |
| | | GVDAYNEVIARVRMWVNLNLWQKLKLSRDDAKPLLRLKGFPSFPLVERQANEVDWWDM |
| | | VCNVKKLINEKKEDGKVFWQNLAGYKRQEALRPYLSSEEDRKKGKKFARYQLGDLLLH |
| | | LEKKHGEDWGKVYDEAWERIDKKVEGLSKHIKLEEERRSEDAQSKAALTDWLRAKASF |
| | | VIEGLKEADKDEFCRCELKLQKWYGDLRGKPFAIEAENSILDISGFSKQYNCAFIWQK |
| | | DGVKKLNLYLIINYFKGGKLRFKKIKPEAFEANRFYTVINKKSGEIVPMEVNFNFDDP |
| | | NLIILPLAFGKRQGREFIWNDLLSLETGSLKLANGRVIEKTLYNRRTRQDEPALFVAL |
| | | TFERREVLDSSNIKPMNLIGVDRGENIPAVIALTDPEGCPLSRFKDSLGNPTHILRIG |
| | | ESYKEKQRTIQAKKEVEQRRAGGYSRKYASKAKNLADDMVRNTARDLLYYAVTQDAML |
| | | IFENLSRGFGRQGKRTFMAERQYTRMEDWLTAKLAYEGLPSKTYLSKTLAQYTSKTCS |
| | | NCGFTITSADYDRVLEKLKKTATGWMTTINGKELKVEGQITYYNRYKRQNVVKDLSVE |
| | | LDRLSEESVNNDISSWTKGRSGEALSLLKKRFSHRPVQEKFVCLNCGFETHADEQAAL |
| | | NIARSWLFLRSQEYKKYQTNKTTGNTDKRAFVETWQSFYRKKLKEVWKPAV |
| 7 | 812 | QEIKRINKIRRRLVKDSNTKKAGKTGPMKTLLVRVMTPDLRERLENLRKKPENIPQPI |
| | | SNTSRANLNKLLTDYTEMKKAILHVYWEEFQKDPVGLMSRVAQPASKKIDQNKLKPEM |
| | | DEKGNLTTAGFACSQCGQPLFVYKLEQVSEKGKAYTNYFGRCNVAEHEKLILLAQLKP |
| | | EKDSDEAVTYSLGKFGQRALDFYSIHVTKESTHPVKPLAQIAGNRYASGPVGKALSDA |
| | | CMGTIASFLSKYQDIIIEHQKVVKGNQKRLESLRELAGKENLEYPSVTLPPQPHTKEG |
| | | VDAYNEVIARVRMWVNLNLWQKLKLSRDDAKPLLRLKKFPSFPLVERQANEVDWWDMV |
| | | CNVKKLINEKKEDGKVFWQNLAGYKRQEALRPYLSSEEDRKKGKKFARYQLGDLLLHL |
| | | EKKHGEDWGKVYDEAWERIDKKVEGLSKHIKLEEERRSEDAQSKAALTDWLRAKASFV |
| | | IEGLKEADKDEFCRCELKLQKWYGDLRGKPFAIEAENSILDISGFSKQYNCAFIWQKD |
| | | GVKKLNLYLIINYFKGGKLRFKKIKPEAFEANRFYTVINKKSGEIVPMEVNFNFDDPN |
| | | LIILPLAFGKRQGREFIWNDLLSLETGSLKLANGRVIEKTLYNRRTRQDEPALFVALT |
| | | FERREVLDSSNIKPMNLIGVDRGENIPAVIALTDPEGCPLSRFKDSLGNPTHILRIGE |
| | | SYKEKQRTIQAKKEVEQRRAGGYSRKYASKAKNLADDMVRNTARDLLYYAVTQDAMLI |
| | | FENLSRGFGRQGKRTFMAERQYTRMEDWLTAKLAYEGLPSKTYLSKTLAQYTSKTCSN |
| | | CGFTITSADYDRVLEKLKKTATGWMTTINGKELKVEGQITYYNRYKRQNVVKDLSVEL |
| | | DRLSEESVNNDISSWTKGRSGEALSLLKKRFSHRPVQEKFVCLNCGFETHADEQAALN |
| | | IARSWLFLRSQEYKKYQTNKTTGNTDKRAFVETWQSFYRKKLKEVWKPAV |

[0124] Additional engineered CasX proteins contemplated for use in the systems of the disclosure are selected from the group consisting of SEQ ID NOS: 8-342 and 19863-20023, or a sequence having at least about at least about 70%, at least about 75%, at least about 80%, at least about 85%, at least about 90%, at least about 95%, at least about 96%, at least about 97%, at least about 98%, or at least about 99% sequence identity thereto.

[0125] In some embodiments, the engineered CasX protein contemplated for use in the systems of the disclosure is a CasX engineered protein comprising an amino acid sequence having two or more modifications relative to a CasX 515 protein of SEQ ID NO: 20024, and wherein the two or more modifications result in an engineered CasX having one or more improved characteristics compared to unmodified parental CasX 515, and wherein the one or more improved characteristics may include an increase in one or more of editing activity, editing specificity, specificity ratio (i.e., the average level of on-targeting editing divided by the average level of off-target editing), editing activity and editing specificity, and editing activity and specificity ratio of the CasX engineered protein. In some embodiments, the improved characteristics are determined compared to the unmodified parental CasX 515 (SEQ ID NO: 20024) in an in vitro assay under comparable conditions.

[0126] In some embodiments, the engineered CasX comprises two or more mutations relative to the CasX protein of SEQ ID NO: 20024 (CasX 515), wherein the two mutations are selected from the group consisting of 4.I.G & 64.R.Q, 4.I.G & 169.L.K, 4.I.G & 169.L.Q, 4.I.G & 171.A.D, 4.I.G & 171.A. Y, 4.I.G & 171.A.S, 4.I.G & 224.G.T, 4.I.G & 304.M.T, 4.I.G & 398. Y.T, 4.I.G & 826. V.M, 4.I.G & 887.T.D, 4.I.G & 891.S.Q, 5.-. G & 64.R.Q, 5.-G & 169.L.K, 5.-. G & 169.L.Q, 5.-. G & 171.A.D, 5.-. G & 171.A. Y, 5.-. G & 171.A.S, 5.-. G & 224.G.T, 5.-. G & 304.M.T, 5.-. G & 398.Y.T, 5.-. G & 826. V.M, 5.-G & 887.T.D, 5.-. G & 891.S.Q, 9.K.G & 64.R.Q, 9.K.G & 169.L.K, 9.K.G & 169.L.Q, 9.K.G & 171.A.D, 9.K.G & 171.A.Y, 9.K.G & 171.A.S, 9.K.G & 224.G.T, 9.K.G & 304.M.T, 9.K.G & 398. Y.T, 9.K.G & 826. V.M, 9.K.G & 887.T.D, 9.K.G & 891.S.Q, 27.-.R & 64. R. Q, 27.-.R & 169.L.K, 27.-.R & 169.L.Q, 27.-.R & 171.A.D, 27.-.R & 171.A.Y, 27.-.R & 171.A.S, 27.-.R & 224.G.T, 27.-.R & 304.M.T, 27.-.R & 398. Y.T, 27.-.R & 826. V.M, 27.-.R & 887.T.D, 27.-.R & 891.S.Q. 35.R.P & 64.R.Q, 35.R.P & 169.L.K, 35.R.P & 169.L.Q, 35.R.P & 171.A.D, 35.R.P & 171.A.Y, 35.R.P & 171.A.S, 35.R.P & 224.G.T, 35.R.P & 304.M.T, 35.R.P & 398. Y.T, 35.R.P & 826.V.M, 35.R.P & 887.T.D, 35.R.P & 891.S.Q, 887.T.D & 891.S.Q, 64.R. Q & 169.L.K, 64.R.Q & 169.L.Q, 64.R.Q & 171.A.D, 64.R.Q & 171.A. Y, 64.R.Q & 171.A.S, 64.R.Q & 224.G.T, 64.R.Q & 304.M.T, 64.R.Q & 398. Y.T, 64.R. Q & 826. V.M, 64.R.Q & 887.T.D, 64.R.Q & 891.S.Q, 169.L.K & 171.A.D, 169.L.K & 171.A. Y, 169.L.K & 171.A.S, 169.L.K & 224.G.T, 169.L.K & 304.M.T, 169.L.K & 398. Y.T, 169.L.K & 826. V.M, 169.L.K & 887.T.D, 169.L.K & 891.S.Q, 169.L.Q & 171.A.D, 169.L.Q & 171.A.Y, 169.L.Q & 171.A.S, 169.L.Q & 224.G.T, 169.L.Q & 304.M.T, 169.L.Q & 398. Y.T, 169.L.Q & 826.V.M, 169.L.Q & 887.T.D, 169.L.Q & 891.S.Q, 171.A.D & 224.G.T, 171.A.D & 304.M.T, 171.A.D & 398. Y.T, 171.A.D & 826. V.M, 171.A.D & 887.T.D, 171.A.D & 891.S.Q, 171.A. Y & 224.G.T, 171.A. Y & 304.M.T, 171.A. Y & 398. Y.T, 171.A. Y & 826. V.M, 171.A. Y & 887.T.D, 171.A.Y & 891.S.Q, 171.A.S & 224.G.T, 171.A.S & 304.M.T, 171.A.S & 398. Y.T, 171.A.S & 826. V.M, 171.A.S & 887.T.D, 171.A.S & 891.S.Q, 4.I.G & 35.R.P, 224.G.T & 304.M.T, 224.G.T & 398. Y.T, 224.G.T & 826. V.M, 224.G.T & 887.T.D, 224.G.T & 891.S.Q, 5.-. G & 35.R.P, 4.I.G & 27.-.R, 304.M.T & 398. Y.T, 304.M.T & 826. V.M, 304.M.T & 887.T.D, 304.M.T & 891.S.Q, 9.K.G & 35.R.P, 5.-. G & 27.-.R, 4.I.G & 9.K.G, 398. Y.T & 826. V.M, 398. Y.T & 887.T.D, 398. Y.T & 891.S.Q, 27.-.R & 35.R.P, 9.K.G & 27.-.R, 5.-. G & 9.K.G, 4.I.G & 5.-. G, 826. V.M & 887.T.D, 826. V.M & 891.S.Q, 5.K.G & 27.-.R, 5.K.G & 169.L.K, 5.K.G & 171.A.D, 5.K.G & 304.M.T, 5.K.G & 398. Y.T, 5.K.G & 891.S.Q, 6.-. G & 27.-.R, 6.-. G & 169.L.K, 6.-. G & 171.A.D, 6.-. G & 304.M.T, 6.-. G & 398. Y.T, 6.-. G & 891.S.Q, 304.M. W & 27.-.R, 304.M. W & 169.L.K, 304.M.W & 171.A.D, 304.M. W & 398. Y.T, 304.M. W & 891.S.Q, 481.E.D & 27.-.R, 481.E.D & 169.L.K, 481.E.D & 171.A.D, 481.E.D & 304.M.T, 481.E.D & 398. Y.T, 481.E.D & 891.S.Q, 698.S.R & 27.-.R, 698.S.R & 169.L.K, 698.S.R & 171.A.D, 698.S.R & 304.M.T, 698.S.R & 398.Y.T, and 698.S.R & 891.S.Q, which may be combined in select permutations. In the foregoing, the number refers to the amino acid residue location in the sequence, the first amino acid letter is the original residue and the second is the residue resulting from the mutation, replacing the first residue.

[0127] In some embodiments, the engineered CasX protein comprises three mutations in the sequence of CasX 515 (SEQ ID NO: 20024), wherein the three mutations are selected from the group consisting of 27.-.R, 169.L.K, and 329.G.K; 27.-.R, 171.A.D, and 224.G.T; and 35.R.P, 171.A.Y, and 304.M.T, which may be combined in select permutations, and wherein the mutations result in one or more improved characteristics compared to unmodified CasX 515.

[0128] Further engineered CasX proteins contemplated for use in the systems of the disclosure are described in International Publication Nos. WO2020247882, WO2022120095, and WO2023235818 which are hereby incorporated by reference in their entirety.

c. CasX Proteins with Domains from Multiple Source Proteins

[0129] Also contemplated within the scope of the disclosure are engineered CasX proteins that are chimeric CasX proteins. As used herein, a “chimeric CasX” protein refers to both a CasX protein containing at least two domains from different sources, as well a CasX protein containing at least one domain that itself is chimeric. Accordingly, in some embodiments, a chimeric CasX protein is one that includes at least two domains isolated or derived from different sources, such as from two different naturally occurring CasX proteins, (e.g., from two different CasX reference proteins). In other embodiments, the chimeric CasX protein is one that contains at least one domain that is a chimeric domain, e.g., in some embodiments, part of a domain comprises a substitution from a different CasX protein (from a reference CasX protein, or another engineered CasX protein).

[0130] In some embodiments, the helical I-II domain of the engineered CasX protein derived from SEQ ID NO: 2 is replaced with the corresponding helical I-II sequence from SEQ ID NO: 1, resulting in a chimeric CasX protein.

[0131] In some embodiments, the helical I-II domain and NTSB domain of the engineered CasX protein derived from SEQ ID NO: 2 is replaced with the corresponding helical I-II and NTSB sequences from SEQ ID NO: 1, resulting in a chimeric CasX protein.

[0132] In some embodiments, an engineered CasX protein is a chimeric CasX protein, and comprises at least one chimeric domain. In some embodiments, the at least one chimeric domain can be any of the NTSB, TSL, helical I, helical II, OBD or RuvC domains as described herein. In the case of split or non-contiguous domains such as helical I, RuvC and OBD, a portion of the non-contiguous domain can be replaced with the corresponding portion from any other source.

[0133] Domain sequences from reference CasX proteins, and their coordinates, are shown in Table 2. As an example of the foregoing, the chimeric RuvC domain comprises amino acids 660 to 823 of SEQ ID NO: 1 and amino acids 921 to 978 of SEQ ID NO: 2. As an alternative example of the foregoing, a chimeric RuvC domain comprises amino acids 647 to 810 of SEQ ID NO: 2 and amino acids 934 to 986 of SEQ ID NO: 1. In some embodiments, the engineered CasX proteins have a NTSB and a portion of the helical I-II domain derived from the reference CasX sequence of SEQ ID NO: 1, while the other domains are derived from the reference CasX sequence of SEQ ID NO: 2, it being understood that the engineered variants have additional amino acid changes at select locations (relative to the reference sequence), and the resulting chimeric CasX proteins were determined to have improved characteristics relative to the reference CasX proteins. In a particular embodiment, the chimeric helical I domain of the chimeric CasX proteins of SEQ ID NOS: 4-7 comprise amino acids 59-102 of SEQ ID NO: 2, or a sequence having at least about 70%, at least about 80%, at least about 90%, at least about 95%, or at least about 99% sequence identity thereto (helical I-I), and comprises amino acids 192-332 of SEQ ID NO: 1, or at least about 70%, at least about 80%, at least about 90%, at least about 95%, or at least about 99% sequence identity thereto (helical I-II). In one embodiment, chimeric CasX 515 (SEQ ID NO: 5) has an NTSB and the helical I-II domain derived from the reference CasX sequence of SEQ ID NO: 1, and an insertion of P793 relative to the sequence of CasX 491 (SEQ ID NO: 4), wherein the resulting CasX 515 exhibits enhanced specificity for the modification of a target nucleic acid relative to CasX 491. The skilled artisan will understand that the domain boundaries indicated in Table 2 below are approximate, and that protein fragments whose boundaries differ from those given in the table below by 1, 2, or 3 amino acids may have the same activity as the domains described below.

TABLE 2
Domain coordinates in Reference CasX Proteins

| | Coordinates in | Coordinates in |
|---|---|---|
| Domain Name | SEQ ID NO: 1 | SEQ ID NO: 2 |
| OBD-I | 1-55 | 1-57 |
| helical I-I | 56-99 | 58-101 |
| NTSB | 100-190 | 102-191 |
| helical I-II | 191-331 | 192-332 |
| helical II | 332-508 | 333-500 |
| OBD-II | 509-659 | 501-646 |
| RuvC-I | 660-823 | 647-810 |
| TSL | 824-933 | 811-920 |
| RuvC-II | 934-986 | 921-978 |

TABLE 3
Exemplary Domain Sequences in Reference CasX Proteins

| | | |
|---|---|---|
| SEQ ID | Domain | Sequence |

Deltaproteobacter sp. (reference CasX of SEQ ID NO: 1)

| | | |
|---|---|---|
| 343 | OBD-I | EKRINKIRKKLSADNATKPVSRSGPMKTLLVRVMTDDLKKRLEKRRKKPEVMPQ |
| 344 | helical I-I | VISNNAANNLRMLLDDYTKMKEAILQVYWQEFKDDHVGLMCKFA |
| 345 | NTSB | QPASKKIDQNKLKPEMDEKGNLTTAGFACSQCGQPLFVYKLEQVSEKGKAYTNYF |
| | | GRCNVAEHEKLILLAQLKPEKDSDEAVTYSLGKFGQ |
| 346 | helical I-II | RALDFYSIHVTKESTHPVKPLAQIAGNRYASGPVGKALSDACMGTIASFLSKYQD |
| | | IIIEHQKVVKGNQKRLESLRELAGKENLEYPSVTLPPQPHTKEGVDAYNEVIARV |
| | | RMWVNLNLWQKLKLSRDDAKPLLRLKGFPSF |
| 347 | helical II | PVVERRENEVDWWNTINEVKKLIDAKRDMGRVFWSGVTAEKRNTILEGYNYLPNE |
| | | NDHKKREGSLENPKKPAKRQFGDLLLYLEKKYAGDWGKVFDEAWERIDKKIAGLT |
| | | SHIEREEARNAEDAQSKAVLTDWLRAKASFVLERLKEMDEKEFYACEIQLQKWYG |
| | | DLRGNPFAVEAE |
| 348 | OBD-II | NRVVDISGFSIGSDGHSIQYRNLLAWKYLENGKREFYLLMNYGKKGRIRFTDGTD |
| | | IKKSGKWQGLLYGGGKAKVIDLTFDPDDEQLIILPLAFGTRQGREFIWNDLLSLE |
| | | TGLIKLANGRVIEKTIYNKKIGRDEPALFVALTFERREVVD |
| 349 | RuvC-I | PSNIKPVNLIGVDRGENIPAVIALTDPEGCPLPEFKDSSGGPTDILRIGEGYKEK |
| | | QRAIQAAKEVEQRRAGGYSRKFASKSRNLADDMVRNSARDLFYHAVTHDAVLVFE |
| | | NLSRGFGRQGKRTFMTERQYTKMEDWLTAKLAYEGLTSKTYLSKTLAQYTSKTC |
| 350 | TSL | SNCGFTITTADYDGMLVRLKKTSDGWATTLNNKELKAEGQITYYNRYKRQTVEKE |
| | | LSAELDRLSEESGNNDISKWTKGRRDEALFLLKKRFSHRPVQEQFVCLDCGHEVH |
| 351 | RuvC-II | ADEQAALNIARSWLFLNSNSTEFKSYKSGKQPFVGAWQAFYKRRLKEVWKPNA |

Planctomycetes sp. (Reference CasX of SEQ ID NO: 2)

| | | |
|---|---|---|
| 352 | OBD-I | QEIKRINKIRRRLVKDSNTKKAGKTGPMKTLLVRVMTPDLRERLENLRKKPENIP |
| | | Q |
| 353 | helical I-I | PISNTSRANLNKLLTDYTEMKKAILHVYWEEFQKDPVGLMSRVA |
| 354 | NTSB | QPAPKNIDQRKLIPVKDGNERLTSSGFACSQCCQPLYVYKLEQVNDKGKPHTNYF |
| | | GRCNVSEHERLILLSPHKPEANDELVTYSLGKFGQ |
| 355 | helical I-II | RALDFYSIHVTRESNHPVKPLEQIGGNSCASGPVGKALSDACMGAVASFLTKYQD |
| | | IILEHQKVIKKNEKRLANLKDIASANGLAFPKITLPPQPHTKEGIEAYNNVVAQI |
| | | VIWVNLNLWQKLKIGRDEAKPLQRLKGFPSF |
| 356 | helical II | PLVERQANEVDWWDMVCNVKKLINEKKEDGKVFWQNLAGYKRQEALLPYLSSEED |
| | | RKKGKKFARYQFGDLLLHLEKKHGEDWGKVYDEAWERIDKKVEGLSKHIKLEEER |
| | | RSEDAQSKAALTDWLRAKASFVIEGLKEADKDEFCRCELKLQKWYGDLRGKPFAI |
| | | EAE |
| 357 | OBD-II | NSILDISGFSKQYNCAFIWQKDGVKKLNLYLIINYFKGGKLRFKKIKPEAFEANR |
| | | FYTVINKKSGEIVPMEVNFNFDDPNLIILPLAFGKRQGREFIWNDLLSLETGSLK |
| | | LANGRVIEKTLYNRRTRQDEPALFVALTFERREVLD |
| 358 | RuvC-I | SSNIKPMNLIGIDRGENIPAVIALTDPEGCPLSRFKDSLGNPTHILRIGESYKEK |
| | | QRTIQAAKEVEQRRAGGYSRKYASKAKNLADDMVRNTARDLLYYAVTQDAMLIFE |
| | | NLSRGFGRQGKRTFMAERQYTRMEDWLTAKLAYEGLPSKTYLSKTLAQYTSKTC |
| 359 | TSL | SNCGFTITSADYDRVLEKLKKTATGWMTTINGKELKVEGQITYYNRYKRQNVVKD |
| | | LSVELDRLSEESVNNDISSWTKGRSGEALSLLKKRFSHRPVQEKFVCLNCGFETH |
| 360 | RuvC-II | ADEQAALNIARSWLFLRSQEYKKYQTNKTTGNTDKRAFVETWQSFYRKKLKEVWK |
| | | PAV |

d. CasX Fusion Proteins

[0134] Also contemplated within the scope of the disclosure are engineered CasX proteins comprising a heterologous protein (i.e., a protein not derived from a CasX) fused to the CasX for use in the systems of the disclosure. This includes engineered CasX comprising N-terminal or C-terminal fusions of the CasX to a heterologous protein or domain thereof. In some embodiments, the engineered CasX protein is fused to one or more proteins or domains thereof that has a different activity of interest, resulting in a fusion protein.

[0135] In some cases, a heterologous polypeptide (a fusion partner) for use with an engineered CasX protein in the systems of the disclosure provides for subcellular localization, i.e., the heterologous polypeptide contains a subcellular localization sequence (e.g., a nuclear localization signal (NLS) for targeting to the nucleus, a sequence to keep the fusion protein out of the nucleus, e.g., a nuclear export sequence (NES) to escort the engineered CasX protein through the nuclear pore complex, a sequence to keep the fusion protein retained in the cytoplasm, a mitochondrial localization signal for targeting to the mitochondria, a chloroplast localization signal for targeting to a chloroplast, an ER retention signal, and the like). In some embodiments, a subject RNA-guided polypeptide or a conditionally active RNA-guided polypeptide and/or subject engineered CasX fusion protein does not include a NLS so that the protein is not targeted to the nucleus (which can be advantageous, e.g., when the target nucleic acid sequence is an RNA that is present in the cytosol). In some embodiments, a fusion partner can provide a tag (i.e., the heterologous polypeptide is a detectable label) for ease of tracking and/or purification (e.g., a fluorescent protein, e.g., green fluorescent protein (GFP), yellow fluorescent protein (YFP), red fluorescent protein (RFP), cyan fluorescent protein (CFP), mCherry, tdTomato, and the like; a histidine tag, e.g., a 6×His tag; a hemagglutinin (HA) tag; a FLAG tag; a Myc tag; and the like).

[0136] In some cases, an engineered CasX protein is fused to one or more nuclear localization signals (NLS). The disclosure contemplates assembly of multiple NLS in various configurations for linkage to the engineered CasX protein utilized in the embodiments described herein. In some embodiments, a single NLS is linked at or near (e.g., within 20 amino acids of) the N-terminus of the engineered CasX protein. In some embodiments, a single NLS is linked at or near the N-terminus and/or at or near the C-terminus of the engineered CasX protein. In some embodiments, the N-terminal NLS comprises one or more a c-MYC NLS. In some embodiments, the C-terminal NLS comprises one or more c-MYC NLS. In some embodiments, 2, 3, 4 or more NLS are linked by linker peptides at or near the C-terminus and/or the N-terminus of the engineered CasX protein. The person of ordinary skill in the art will understand that an NLS at or near the N- or C-terminus of a protein can be within 1, 2, 3, 4, 5, 6, 7, 8, 9, 10, 11, 12, 13, 14, 15, 16, 17, 18, 19 or 20 amino acids of the N- or C-terminus. In some embodiments, the NLS linked to the N-terminus of the engineered CasX protein are identical to the NLS linked to the C-terminus. In other embodiments, the NLS linked to the N-terminus of the engineered CasX protein are different to the NLS linked to the C-terminus. In some cases, non-limiting examples of NLSs suitable for use with an engineered CasX protein in the systems of the disclosure include sequences having at least about 80%, at least about 90%, or at least about 95% identity or are identical to sequences derived from: the NLS of the SV40 virus large T-antigen, having the amino acid sequence PKKKRKV (SEQ ID NO: 361); the NLS from nucleoplasmin (e.g., the nucleoplasmin bipartite NLS with the sequence KRPAATKKAGQAKKKK (SEQ ID NO: 362); the c-MYC NLS having the amino acid sequence PAAKRVKLD (SEQ ID NO: 363) or RQRRNELKRSP (SEQ ID NO: 364). In some embodiments, the NLS linked to the N-terminus of the engineered CasX protein is selected from the group consisting of the N-terminal sequences as set forth in Table 4. In some embodiments, the NLS linked to the C-terminus of the CasX protein is selected from the group consisting of the C-terminal sequences as set forth in Table 5. In some embodiments, NLSs suitable for use with an engineered CasX in the systems of the disclosure include sequences having at least about 80%, at least about 90%, or at least about 95% identity or are identical to one or more sequences of Table 5. The skilled artisan will understand that the disclosure of NLS sequences in Tables 4 and 5 as N- or C-terminal, respectively, is exemplary only. Any of the NLS sequences disclosed in Table 4 or 5 may be located at or near the N or C terminus, or both.

TABLE 4
N-terminal NLS Amino Acid Sequences

| NLS Amino Acid Sequence* | SEQ ID NO |
|---|---|
| PKKKRKVSR | 365 |
| PKKKRKVGGSPKKKRKVGGSPKKKRKVGGSPKKKRKVSR | 366 |
| PKKKRKVGGSPKKKRKVGGSPKKKRKVGGSPKKKRKVGGSPKKKRKVGGSPKKKRKVSR | 367 |
| PAAKRVKLDSR | 368 |
| PAAKRVKLDGGSPAAKRVKLDSR | 369 |
| PAAKRVKLDGGSPAAKRVKLDGGSPAAKRVKLDGGSPAAKRVKLDSR | 370 |
| PAAKRVKLDGGSPAAKRVKLDGGSPAAKRVKLDGGSPAAKRVKLDGGSPAAKRVKLDGGS | 371 |
| PAAKRVKLDSR | |
| KRPAATKKAGQAKKKKSR | 372 |
| KRPAATKKAGQAKKKKGGSKRPAATKKAGQAKKKKSR | 373 |
| PAAKRVKLDGGSPKKKRKVSR | 374 |
| PAAKKKKLDGGSPKKKRKVSR | 375 |
| PAAKKKKLDSR | 376 |
| PAAKKKKLDGGSPAAKKKKLDGGSPAAKKKKLDSR | 377 |
| PAAKKKKLDGGSPAAKKKKLDGGSPAAKKKKLDGGSPAAKKKKLDSR | 378 |
| PAKRARRGYKCSR | 379 |
| PAKRARRGYKCGSPAKRARRGYKCSR | 380 |
| PRRKREESR | 381 |
| PYRGRKESR | 382 |
| PLRKRPRRSR | 383 |
| PLRKRPRRGSPLRKRPRRSR | 384 |
| PAAKRVKLDGGKRTADGSEFESPKKKRKVGGS | 385 |
| PAAKRVKLDGGKRTADGSEFESPKKKRKVPPPPG | 386 |
| PAAKRVKLDGGKRTADGSEFESPKKKRKVGIHGVPAAPG | 387 |
| PAAKRVKLDGGKRTADGSEFESPKKKRKVGGGSGGGSPG | 388 |
| PAAKRVKLDGGKRTADGSEFESPKKKRKVPGGGSGGGSPG | 389 |
| PAAKRVKLDGGKRTADGSEFESPKKKRKVAEAAAKEAAAKEAAAKAPG | 390 |
| PAAKRVKLDGGSPKKKRKVGGS | 391 |
| PAAKRVKLDPPPPKKKRKVPG | 392 |
| PAAKRVKLDPG | 393 |
| PAAKRVKLDGGGSGGGSGGGS | 394 |
| PAAKRVKLDPPP | 395 |
| PAAKRVKLDGGGSGGGSGGGSPPP | 396 |
| PKKKRKVPPP | 397 |
| PKKKRKVGGS | 398 |

*Residues in bold are NLS residues, while unbolded residues are linkers.

TABLE 5
C-terminal NLS Amino Acid Sequences

| NLS Amino Acid Sequence | SEQ ID NO |
|---|---|
| GSPKKKRKVGGSPKKKRKVGGSPKKKRKVGGSPKKKRKV | 399 |
| GSPKKKRKVGGSPKKKRKVGGSPKKKRKVGGSPKKKRKVGGSPKKKRKVGGSPKKKRKV | 400 |
| GSPAAKRVKLDGGSPAAKRVKLD | 401 |
| GSPAAKRVKLDGGSPAAKRVKLDGGSPAAKRVKLDGGSPAAKRVKLD | 402 |
| GSKRPAATKKAGQAKKKK | 403 |
| KRPAATKKAGQAKKKKGGSKRPAATKKAGQAKKKK | 404 |
| GSKLGPRKATGRWGS | 405 |
| GSKRKGSPERGERKRHWGS | 406 |
| GSPKKKRKVGSGSKRPAATKKAGQAKKKKLE | 407 |
| GPKRTADSQHSTPPKTKRKVEFEPKKKRKV | 408 |
| GGGSGGGSKRTADSQHSTPPKTKRKVEFEPKKKRKV | 409 |
| AEAAAKEAAAKEAAAKAKRTADSQHSTPPKTKRKVEFEPKKKRKV | 410 |
| GPPKKKRKVGGSKRTADSQHSTPPKTKRKVEFEPKKKRKV | 411 |
| GPAEAAAKEAAAKEAAAKAPAAKRVKLD | 412 |
| GPGGGSGGGSGGGSPAAKRVKLD | 413 |
| GPPAAKRVKLD | 414 |
| VGSKRPAATKKAGQAKKKK | 415 |
| TGGGPGGGAAAGSGSPKKKRKVGSGSKRPAATKKAGQAKKKKLE | 416 |
| TGGGPGGGAAAGSGSPKKKRKVGSGS | 417 |
| PPPPKKKRKVPPP | 418 |
| GGSPKKKRKVPPP | 419 |
| PPPPKKKRKV | 420 |
| GGSPKKKRKV | 421 |
| GGSPKKKRKVGGSGGSGGS | 422 |
| GGSPKKKRKVGGSPKKKRKV | 423 |
| GGSGGSGGSPKKKRKVGGSPKKKRKV | 424 |
| VGGGSGGGSGGGSPAAKRVKLD | 425 |
| VPPPPAAKRVKLD | 426 |
| VPPPGGGSGGGSGGGSPAAKRVKLD | 427 |
| VGSPAAKRVKLD | 428 |

[0137] In some embodiments, the one or more NLSs are linked to the engineered CasX protein or to adjacent NLS with a linker peptide. In some embodiments, the linker peptide is selected from the group consisting of SR, RS, TS, GS, GGS, PPP, GGS, VGS, (G) n (SEQ ID NO: 429), (GS) n (SEQ ID NO: 430), (GSGGS) n (SEQ ID NO: 431), (GGSGGS) n (SEQ ID NO: 432), (GGGS) n (SEQ ID NO: 433), GGSG (SEQ ID NO: 434), GGSGG (SEQ ID NO: 435), GSGSG (SEQ ID NO: 436), GSGGG (SEQ ID NO: 437), GGGSG (SEQ ID NO: 438), GSSSG (SEQ ID NO: 439), GPGP (SEQ ID NO: 440), GGP, PPP, PPAPPA (SEQ ID NO: 441), PPPG (SEQ ID NO: 442), PPPGPPP (SEQ ID NO: 443), PPP (GGGS) n (SEQ ID NO: 444), (GGGS) nPPP (SEQ ID NO: 445), AEAAAKEAAAKEAAAKA (SEQ ID NO: 446), TPPKTKRKVEFE (SEQ ID NO: 447), GGSGGGS (SEQ ID NO: 448), GSGSGGG (SEQ ID NO: 449), and SSGNSNANSRGPSFSSGLVPLSLRGSH (SEQ ID NO: 450), where n is 1 to 5.

[0138] In general, NLS (or multiple NLSs) are of sufficient strength to drive accumulation of an engineered CasX fusion protein in the nucleus of a eukaryotic cell. Detection of accumulation in the nucleus may be performed by any suitable technique. For example, a detectable marker may be fused to an engineered CasX fusion protein such that location within a cell may be visualized. Cell nuclei may also be isolated from cells, the contents of which may then be analyzed by any suitable process for detecting protein, such as immunohistochemistry, Western blot, or enzyme activity assay. Accumulation in the nucleus may also be determined indirectly.

e. Sequences Encoding Engineered CasX Proteins

[0139] Provided herein are nucleic acids, such as mRNA and DNA, comprising sequences encoding engineered CasX proteins of the disclosure. In some embodiments, the sequences encoding CasX proteins were generated based using one or more parameters. Non-limiting examples of such parameters include the codon usage in human host cells (e.g., utilizing the codon adaptation index (CAI)) or codon-usage tables derived from biologics intended for use as therapeutics. In some embodiments, provided herein are sequences encoding CasX proteins that are codon-optimized for expression in a human cell.

[0140] The disclosure provides an mRNA sequence encoding CasX 491 (SEQ ID NO: 4), or a sequence having at least about 70%, at least about 80%, at least about 85%, at least about 90%, at least about 95%, at least about 96%, at least about 97%, at least about 98%, or having at least about 99% sequence identity thereto. In some embodiments, the mRNA sequence encoding CasX 491 comprises the nucleic acid sequence of SEQ ID NO: 19699, or a sequence having at least about 50%, at least about 60%, at least about 70%, at least about 80%, at least about 85%, at least about 90%, at least about 95%, at least about 96%, at least about 97%, at least about 98%, or having at least about 99% sequence identity thereto.

[0141] The disclosure provides an mRNA sequence encoding CasX 515 (SEQ ID NO: 5), or a sequence having at least about 70%, at least about 80%, at least about 85%, at least about 90%, at least about 95%, at least about 96%, at least about 97%, at least about 98%, or having at least about 99% sequence identity thereto. In some embodiments, the mRNA sequence encoding CasX 515 comprises the nucleic acid sequence of SEQ ID NO: 19700, or a sequence having at least about 50%, at least about 60%, at least about 70%, at least about 80%, at least about 85%, at least about 90%, at least about 95%, at least about 96%, at least about 97%, at least about 98%, or having at least about 99% sequence identity thereto.

[0142] The disclosure provides an mRNA sequence encoding CasX 676 (SEQ ID NO: 6), or a sequence having at least about 70%, at least about 80%, at least about 85%, at least about 90%, at least about 95%, at least about 96%, at least about 97%, at least about 98%, or having at least about 99% sequence identity thereto. In some embodiments, the mRNA sequence encoding CasX 676 comprises the nucleic acid sequence of SEQ ID NO: 19701, or a sequence having at least about 50%, at least about 60%, at least about 70%, at least about 80%, at least about 85%, at least about 90%, at least about 95%, at least about 96%, at least about 97%, at least about 98%, or having at least about 99% sequence identity thereto.

[0143] The disclosure provides an mRNA sequence encoding CasX 812 (SEQ ID NO: 7), or a sequence having at least about 70%, at least about 80%, at least about 85%, at least about 90%, at least about 95%, at least about 96%, at least about 97%, at least about 98%, or having at least about 99% sequence identity thereto. In some embodiments, the mRNA sequence encoding CasX 812 comprises the nucleic acid sequence of SEQ ID NO: 19702, or a sequence having at least about 50%, at least about 60%, at least about 70%, at least about 80%, at least about 85%, at least about 90%, at least about 95%, at least about 96%, at least about 97%, at least about 98%, or having at least about 99% sequence identity thereto.

[0144] Exemplary sequences encoding engineered CasX, including RNA and DNA sequences encoding engineered CasX, are provided as SEQ ID NOS: 19699-19702,19735, 19751, 19752, and 19816-19820 of Table 6. The skilled artisan will appreciate that, for the DNA and RNA sequences such as those disclosed in Table 6, if the sequence is a DNA sequence, T can be substituted by U to generate the corresponding RNA. Similarly, for RNA sequences, U can be substituted with T to generate the corresponding DNA sequence.

TABLE 6
RNA and DNA sequences encoding CasX

| SEQ | CasX | |
|---|---|---|
| ID NO: | Designation | Sequence* |
| 19699 | 491 | CAGGAGAUCAAGCGGAUUAAUAAAAUUCGGAGAAGACUGGUGAAGGAUUCUAA |
| | | CACAAAGAAGGCUGGCAAGACAGGCCCUAUGAAGACACUGCUGGUGAGAGUGA |
| | | UGACACCCGACCUGAGAGAAAGACUGGAAAACCUGAGAAAGAAGCCUGAGAAU |
| | | AUCCCCCAGCCCAUCAGCAACACAAGCCGGGCCAACCUGAAUAAGCUGCUGAC |
| | | CGACUACACCGAAAUGAAGAAGGCCAUCCUGCACGUGUAUUGGGAAGAGUUCC |
| | | AGAAAGACCCAGUCGGCCUGAUGAGCAGAGUGGCUCAGCCUGCCAGCAAGAAG |
| | | AUCGAUCAGAACAAGCUGAAGCCCGAAAUGGACGAGAAGGGGAACCUGACAAC |
| | | CGCCGGCUUUGCCUGUAGCCAGUGCGGCCAGCCCCUGUUUGUGUACAAACUGG |
| | | AACAGGUGAGCGAAAAGGGCAAGGCUUACACGAAUUACUUCGGCAGAUGCAAC |
| | | GUGGCCGAGCACGAGAAGCUGAUCCUGCUGGCCCAGCUGAAGCCUGAGAAGGA |
| | | UAGCGAUGAGGCAGUGACAUAUUCCCUGGGCAAGUUCGGACAGCGGGCCCUGG |
| | | AUUUUUAUUCCAUUCAUGUGACCAAGGAAUCCACCCACCCCGUCAAGCCUCUU |
| | | GCCCAAAUUGCCGGCAACAGAUACGCCAGCGGCCCCGUGGGCAAGGCCCUGAG |
| | | CGACGCCUGUAUGGGCACCAUCGCCAGCUUCCUGUCUAAGUACCAGGACAUUA |
| | | UCAUCGAGCACCAGAAGGUGGUGAAGGGCAACCAGAAGAGACUGGAGAGCCUG |
| | | CGCGAGCUGGCCGGCAAGGAAAACCUGGAGUAUCCUAGCGUGACCCUGCCUCC |
| | | UCAGCCUCAUACAAAGGAGGGCGUGGAUGCCUACAACGAAGUGAUCGCCCGGG |
| | | UGCGGAUGUGGGUGAACCUGAAUCUGUGGCAGAAGCUGAAGCUGUCUAGAGAC |
| | | GACGCCAAGCCCCUGCUGAGACUGAAGGGCUUCCCCAGCUUCCCUCUGGUGGA |
| | | GAGACAGGCAAAUGAAGUGGACUGGUGGGACAUGGUGUGUAACGUGAAGAAGC |
| | | UGAUCAAUGAGAAGAAGGAGGACGGCAAAGUGUUCUGGCAGAAUCUGGCCGGC |
| | | UACAAGCGUCAGGAGGCCCUGCGGCCCUACCUGAGCAGCGAGGAAGACAGAAA |
| | | GAAGGGCAAGAAGUUCGCCCGGUAUCAGCUGGGGGACCUGCUGCUGCACCUCG |
| | | AGAAGAAGCACGGCGAAGACUGGGGGAAGGUGUACGAUGAGGCCUGGGAGCGG |
| | | AUCGAUAAGAAGGUGGAGGGCCUGAGCAAGCACAUCAAGCUGGAGGAGGAACG |
| | | GAGAUCUGAGGACGCCCAGAGCAAGGCCGCCCUGACCGACUGGCUGAGAGCCA |
| | | AGGCCAGCUUCGUCAUCGAGGGGCUGAAGGAGGCCGACAAGGACGAGUUCUGC |
| | | CGGUGCGAACUGAAGCUGCAGAAGUGGUACGGAGAUCUGAGAGGCAAACCUUU |
| | | CGCCAUCGAGGCCGAGAACAGCAUCCUGGACAUCAGCGGCUUCAGCAAGCAGU |
| | | ACAACUGCGCCUUUAUUUGGCAGAAGGACGGAGUGAAGAAGCUGAACCUGUAC |
| | | CUGAUCAUCAACUAUUUCAAGGGCGGCAAGCUGAGAUUCAAGAAGAUCAAGCC |
| | | UGAAGCCUUCGAGGCCAACAGAUUCUACACCGUGAUUAACAAGAAAAGCGGAG |
| | | AGAUCGUGCCAAUGGAAGUGAACUUCAACUUCGACGACCCUAACCUGAUCAUC |
| | | CUGCCCCUGGCAUUUGGCAAGCGGCAGGGCAGAGAGUUCAUCUGGAACGACCU |
| | | GCUGUCUCUGGAGACCGGCAGCCUGAAGCUGGCCAACGGCAGAGUGAUCGAGA |
| | | AGACACUGUACAACAGACGAACCAGACAAGACGAGCCCGCCCUGUUUGUGGCC |
| | | CUGACCUUCGAGAGAAGAGAGGUGCUGGACAGCAGCAAUAUCAAGCCUAUGAA |
| | | CCUGAUCGGCGUGGACCGGGGCGAGAACAUCCCUGCCGUGAUCGCCCUUACCG |
| | | ACCCCGAGGGAUGCCCUCUGAGCCGGUUUAAAGACAGCCUGGGCAACCCUACC |
| | | CACAUCCUGAGAAUUGGCGAGUCCUACAAGGAGAAGCAGAGAACCAUCCAGGC |
| | | CAAGAAGGAGGUGGAGCAGCGGCGGGCUGGCGGCUACUCCCGGAAGUACGCCA |
| | | GCAAGGCCAAGAACCUGGCCGACGACAUGGUUAGAAAUACCGCCAGAGACCUC |
| | | CUGUACUACGCUGUGACCCAGGACGCCAUGCUGAUCUUCGAGAACCUGAGCAG |
| | | AGGCUUCGGCAGACAGGGCAAGAGAACCUUCAUGGCCGAGAGACAGUACACCC |
| | | GGAUGGAGGACUGGCUGACCGCCAAGCUGGCCUACGAGGGCCUGUCUAAGACC |
| | | UACCUGUCCAAGACCUUGGCACAGUACACCAGCAAGACAUGCUCUAACUGCGG |
| | | CUUCACAAUCACGAGCGCCGACUACGACCGGGUGCUGGAGAAACUGAAGAAGA |
| | | CCGCCACAGGCUGGAUGACCACCAUUAACGGCAAGGAGCUGAAGGUGGAGGGC |
| | | CAGAUCACCUACUACAACAGGUACAAACGGCAGAACGUGGUGAAGGACCUGAG |
| | | CGUGGAACUGGAUAGACUGAGCGAGGAAAGCGUAAACAAUGACAUCAGCAGCU |
| | | GGACCAAGGGCCGGAGCGGCGAGGCCCUGAGCCUGCUGAAGAAGAGAUUCUCC |
| | | CACAGACCAGUGCAGGAGAAGUUCGUGUGUCUGAACUGCGGCUUCGAGACCCA |
| | | CGCCGACGAGCAAGCCGCCCUGAACAUCGCCCGGUCUUGGCUUUUCCUGCGGA |
| | | GCCAGGAGUACAAGAAGUACCAGACAAACAAGACCACAGGCAACACAGACAAG |
| | | AGAGCCUUCGUCGAGACCUGGCAGAGCUUCUACAGAAAGAAGCUGAAGGAGGU |
| | | GUGGAAGCCUGCCGUG |
| 19700 | 515 | CAGGAGAUCAAGCGGAUUAAUAAAAUUCGGAGAAGACUGGUGAAGGAUUCUAA |
| | | CACAAAGAAGGCUGGCAAGACAGGCCCUAUGAAGACACUGCUGGUGAGAGUGA |
| | | UGACACCCGACCUGAGAGAAAGACUGGAAAACCUGAGAAAGAAGCCUGAGAAU |
| | | AUCCCCCAGCCCAUCAGCAACACAAGCCGGGCCAACCUGAAUAAGCUGCUGAC |
| | | CGACUACACCGAAAUGAAGAAGGCCAUCCUGCACGUGUAUUGGGAAGAGUUCC |
| | | AGAAAGACCCAGUCGGCCUGAUGAGCAGAGUGGCUCAGCCUGCCAGCAAGAAG |
| | | AUCGAUCAGAACAAGCUGAAGCCCGAAAUGGACGAGAAGGGGAACCUGACAAC |
| | | CGCCGGCUUUGCCUGUAGCCAGUGCGGCCAGCCCCUGUUUGUGUACAAACUGG |
| | | AACAGGUGAGCGAAAAGGGCAAGGCUUACACGAAUUACUUCGGCAGAUGCAAC |
| | | GUGGCCGAGCACGAGAAGCUGAUCCUGCUGGCCCAGCUGAAGCCUGAGAAGGA |
| | | UAGCGAUGAGGCAGUGACAUAUUCCCUGGGCAAGUUCGGACAGCGGGCCCUGG |
| | | AUUUUUAUUCCAUUCAUGUGACCAAGGAAUCCACCCACCCCGUCAAGCCUCUU |
| | | GCCCAAAUUGCCGGCAACAGAUACGCCAGCGGCCCCGUGGGCAAGGCCCUGAG |
| | | CGACGCCUGUAUGGGCACCAUCGCCAGCUUCCUGUCUAAGUACCAGGACAUUA |
| | | UCAUCGAGCACCAGAAGGUGGUGAAGGGCAACCAGAAGAGACUGGAGAGCCUG |
| | | CGCGAGCUGGCCGGCAAGGAAAACCUGGAGUAUCCUAGCGUGACCCUGCCUCC |
| | | UCAGCCUCAUACAAAGGAGGGCGUGGAUGCCUACAACGAAGUGAUCGCCCGGG |
| | | UGCGGAUGUGGGUGAACCUGAAUCUGUGGCAGAAGCUGAAGCUGUCUAGAGAC |
| | | GACGCCAAGCCCCUGCUGAGACUGAAGGGCUUCCCCAGCUUCCCUCUGGUGGA |
| | | GAGACAGGCAAAUGAAGUGGACUGGUGGGACAUGGUGUGUAACGUGAAGAAGC |
| | | UGAUCAAUGAGAAGAAGGAGGACGGCAAAGUGUUCUGGCAGAAUCUGGCCGGC |
| | | UACAAGCGUCAGGAGGCCCUGCGGCCCUACCUGAGCAGCGAGGAAGACAGAAA |
| | | GAAGGGCAAGAAGUUCGCCCGGUAUCAGCUGGGGGACCUGCUGCUGCACCUCG |
| | | AGAAGAAGCACGGCGAAGACUGGGGGAAGGUGUACGAUGAGGCCUGGGAGCGG |
| | | AUCGAUAAGAAGGUGGAGGGCCUGAGCAAGCACAUCAAGCUGGAGGAGGAACG |
| | | GAGAUCUGAGGACGCCCAGAGCAAGGCCGCCCUGACCGACUGGCUGAGAGCCA |
| | | AGGCCAGCUUCGUCAUCGAGGGGCUGAAGGAGGCCGACAAGGACGAGUUCUGC |
| | | CGGUGCGAACUGAAGCUGCAGAAGUGGUACGGAGAUCUGAGAGGCAAACCUUU |
| | | CGCCAUCGAGGCCGAGAACAGCAUCCUGGACAUCAGCGGCUUCAGCAAGCAGU |
| | | ACAACUGCGCCUUUAUUUGGCAGAAGGACGGAGUGAAGAAGCUGAACCUGUAC |
| | | CUGAUCAUCAACUAUUUCAAGGGCGGCAAGCUGAGAUUCAAGAAGAUCAAGCC |
| | | UGAAGCCUUCGAGGCCAACAGAUUCUACACCGUGAUUAACAAGAAAAGCGGAG |
| | | AGAUCGUGCCAAUGGAAGUGAACUUCAACUUCGACGACCCUAACCUGAUCAUC |
| | | CUGCCCCUGGCAUUUGGCAAGCGGCAGGGCAGAGAGUUCAUCUGGAACGACCU |
| | | GCUGUCUCUGGAGACCGGCAGCCUGAAGCUGGCCAACGGCAGAGUGAUCGAGA |
| | | AGACACUGUACAACAGACGAACCAGACAAGACGAGCCCGCCCUGUUUGUGGCC |
| | | CUGACCUUCGAGAGAAGAGAGGUGCUGGACAGCAGCAAUAUCAAGCCUAUGAA |
| | | CCUGAUCGGCGUGGACCGGGGCGAGAACAUCCCUGCCGUGAUCGCCCUUACCG |
| | | ACCCCGAGGGAUGCCCUCUGAGCCGGUUUAAAGACAGCCUGGGCAACCCUACC |
| | | CACAUCCUGAGAAUUGGCGAGUCCUACAAGGAGAAGCAGAGAACCAUCCAGGC |
| | | CAAGAAGGAGGUGGAGCAGCGGCGGGCUGGCGGCUACUCCCGGAAGUACGCCA |
| | | GCAAGGCCAAGAACCUGGCCGACGACAUGGUUAGAAAUACCGCCAGAGACCUC |
| | | CUGUACUACGCUGUGACCCAGGACGCCAUGCUGAUCUUCGAGAACCUGAGCAG |
| | | AGGCUUCGGCAGACAGGGCAAGAGAACCUUCAUGGCCGAGAGACAGUACACCC |
| | | GGAUGGAGGACUGGCUGACCGCCAAGCUGGCCUACGAGGGCCUGCCCUCUAAG |
| | | ACCUACCUGUCCAAGACCUUGGCACAGUACACCAGCAAGACAUGCUCUAACUG |
| | | CGGCUUCACAAUCACGAGCGCCGACUACGACCGGGUGCUGGAGAAACUGAAGA |
| | | AGACCGCCACAGGCUGGAUGACCACCAUUAACGGCAAGGAGCUGAAGGUGGAG |
| | | GGCCAGAUCACCUACUACAACAGGUACAAACGGCAGAACGUGGUGAAGGACCU |
| | | GAGCGUGGAACUGGAUAGACUGAGCGAGGAAAGCGUAAACAAUGACAUCAGCA |
| | | GCUGGACCAAGGGCCGGAGCGGCGAGGCCCUGAGCCUGCUGAAGAAGAGAUUC |
| | | UCCCACAGACCAGUGCAGGAGAAGUUCGUGUGUCUGAACUGCGGCUUCGAGAC |
| | | CCACGCCGACGAGCAAGCCGCCCUGAACAUCGCCCGGUCUUGGCUUUUCCUGC |
| | | GGAGCCAGGAGUACAAGAAGUACCAGACAAACAAGACCACAGGCAACACAGAC |
| | | AAGAGAGCCUUCGUCGAGACCUGGCAGAGCUUCUACAGAAAGAAGCUGAAGGA |
| | | GGUGUGGAAGCCUGCCGUG |
| 19701 | 676 | CAGGAGAUCAAGCGGAUUAAUAAAAUUCGGAGAAGACUGGUGAAGGAUUCUAA |
| | | CACAAAGAAGGCUGGCAAGACACGGGGCCCUAUGAAGACACUGCUGGUGAGAG |
| | | UGAUGACACCCGACCUGAGAGAAAGACUGGAAAACCUGAGAAAGAAGCCUGAG |
| | | AAUAUCCCCCAGCCCAUCAGCAACACAAGCCGGGCCAACCUGAAUAAGCUGCU |
| | | GACCGACUACACCGAAAUGAAGAAGGCCAUCCUGCACGUGUAUUGGGAAGAGU |
| | | UCCAGAAAGACCCAGUCGGCCUGAUGAGCAGAGUGGCUCAGCCUGCCAGCAAG |
| | | AAGAUCGAUCAGAACAAGCUGAAGCCCGAAAUGGACGAGAAGGGGAACCUGAC |
| | | AACCGCCGGCUUUGCCUGUAGCCAGUGCGGCCAGCCCCUGUUUGUGUACAAAC |
| | | UGGAACAGGUGAGCGAAAAGGGCAAGGCUUACACGAAUUACUUCGGCAGAUGC |
| | | AACGUGGCCGAGCACGAGAAGCUGAUCAAGCUGGCCCAGCUGAAGCCUGAGAA |
| | | GGAUAGCGAUGAGGCAGUGACAUAUUCCCUGGGCAAGUUCGGACAGCGGGCCC |
| | | UGGAUUUUUAUUCCAUUCAUGUGACCAAGGAAUCCACCCACCCCGUCAAGCCU |
| | | CUUGCCCAAAUUGCCGGCAACAGAUACGCCUCCAGCCCCGUGGGCAAGGCCCU |
| | | GAGCGACGCCUGUAUGGGCACCAUCGCCAGCUUCCUGUCUAAGUACCAGGACA |
| | | UUAUCAUCGAGCACCAGAAGGUGGUGAAGGGCAACCAGAAGAGACUGGAGAGC |
| | | CUGCGCGAGCUGGCCGGCAAGGAAAACCUGGAGUAUCCUAGCGUGACCCUGCC |
| | | UCCUCAGCCUCAUACAAAGGAGGGCGUGGAUGCCUACAACGAAGUGAUCGCCC |
| | | GGGUGCGGAUGUGGGUGAACCUGAAUCUGUGGCAGAAGCUGAAGCUGUCUAGA |
| | | GACGACGCCAAGCCCCUGCUGAGACUGAAGGGCUUCCCCAGCUUCCCUCUGGU |
| | | GGAGAGACAGGCAAAUGAAGUGGACUGGUGGGACAUGGUGUGUAACGUGAAGA |
| | | AGCUGAUCAAUGAGAAGAAGGAGGACGGCAAAGUGUUCUGGCAGAAUCUGGCC |
| | | GGCUACAAGCGUCAGGAGGCCCUGCGGCCCUACCUGAGCAGCGAGGAAGACAG |
| | | AAAGAAGGGCAAGAAGUUCGCCCGGUAUCAGCUGGGGGACCUGCUGCUGCACC |
| | | UCGAGAAGAAGCACGGCGAAGACUGGGGGAAGGUGUACGAUGAGGCCUGGGAG |
| | | CGGAUCGAUAAGAAGGUGGAGGGCCUGAGCAAGCACAUCAAGCUGGAGGAGGA |
| | | ACGGAGAUCUGAGGACGCCCAGAGCAAGGCCGCCCUGACCGACUGGCUGAGAG |
| | | CCAAGGCCAGCUUCGUCAUCGAGGGGCUGAAGGAGGCCGACAAGGACGAGUUC |
| | | UGCCGGUGCGAACUGAAGCUGCAGAAGUGGUACGGAGAUCUGAGAGGCAAACC |
| | | UUUCGCCAUCGAGGCCGAGAACAGCAUCCUGGACAUCAGCGGCUUCAGCAAGC |
| | | AGUACAACUGCGCCUUUAUUUGGCAGAAGGACGGAGUGAAGAAGCUGAACCUG |
| | | UACCUGAUCAUCAACUAUUUCAAGGGCGGCAAGCUGAGAUUCAAGAAGAUCAA |
| | | GCCUGAAGCCUUCGAGGCCAACAGAUUCUACACCGUGAUUAACAAGAAAAGCG |
| | | GAGAGAUCGUGCCAAUGGAAGUGAACUUCAACUUCGACGACCCUAACCUGAUC |
| | | AUCCUGCCCCUGGCAUUUGGCAAGCGGCAGGGCAGAGAGUUCAUCUGGAACGA |
| | | CCUGCUGUCUCUGGAGACCGGCAGCCUGAAGCUGGCCAACGGCAGAGUGAUCG |
| | | AGAAGACACUGUACAACAGACGAACCAGACAAGACGAGCCCGCCCUGUUUGUG |
| | | GCCCUGACCUUCGAGAGAAGAGAGGUGCUGGACAGCAGCAAUAUCAAGCCUAU |
| | | GAACCUGAUCGGCGUGGACCGGGGCGAGAACAUCCCUGCCGUGAUCGCCCUUA |
| | | CCGACCCCGAGGGAUGCCCUCUGAGCCGGUUUAAAGACAGCCUGGGCAACCCU |
| | | ACCCACAUCCUGAGAAUUGGCGAGUCCUACAAGGAGAAGCAGAGAACCAUCCA |
| | | GGCCAAGAAGGAGGUGGAGCAGCGGCGGGCUGGCGGCUACUCCCGGAAGUACG |
| | | CCAGCAAGGCCAAGAACCUGGCCGACGACAUGGUUAGAAAUACCGCCAGAGAC |
| | | CUCCUGUACUACGCUGUGACCCAGGACGCCAUGCUGAUCUUCGAGAACCUGAG |
| | | CAGAGGCUUCGGCAGACAGGGCAAGAGAACCUUCAUGGCCGAGAGACAGUACA |
| | | CCCGGAUGGAGGACUGGCUGACCGCCAAGCUGGCCUACGAGGGCCUGCCCUCU |
| | | AAGACCUACCUGUCCAAGACCUUGGCACAGUACACCAGCAAGACAUGCUCUAA |
| | | CUGCGGCUUCACAAUCACGAGCGCCGACUACGACCGGGUGCUGGAGAAACUGA |
| | | AGAAGACCGCCACAGGCUGGAUGACCACCAUUAACGGCAAGGAGCUGAAGGUG |
| | | GAGGGCCAGAUCACCUACUACAACAGGUACAAACGGCAGAACGUGGUGAAGGA |
| | | CCUGAGCGUGGAACUGGAUAGACUGAGCGAGGAAAGCGUAAACAAUGACAUCA |
| | | GCAGCUGGACCAAGGGCCGGAGCGGCGAGGCCCUGAGCCUGCUGAAGAAGAGA |
| | | UUCUCCCACAGACCAGUGCAGGAGAAGUUCGUGUGUCUGAACUGCGGCUUCGA |
| | | GACCCACGCCGACGAGCAAGCCGCCCUGAACAUCGCCCGGUCUUGGCUUUUCC |
| | | UGCGGAGCCAGGAGUACAAGAAGUACCAGACAAACAAGACCACAGGCAACACA |
| | | GACAAGAGAGCCUUCGUCGAGACCUGGCAGAGCUUCUACAGAAAGAAGCUGAA |
| | | GGAGGUGUGGAAGCCUGCCGUG |
| 19702 | 812 | CAGGAGAUCAAGCGGAUUAAUAAAAUUCGGAGAAGACUGGUGAAGGAUUCUAA |
| | | CACAAAGAAGGCUGGCAAGACAGGCCCUAUGAAGACACUGCUGGUGAGAGUGA |
| | | UGACACCCGACCUGAGAGAAAGACUGGAAAACCUGAGAAAGAAGCCUGAGAAU |
| | | AUCCCCCAGCCCAUCAGCAACACAAGCCGGGCCAACCUGAAUAAGCUGCUGAC |
| | | CGACUACACCGAAAUGAAGAAGGCCAUCCUGCACGUGUAUUGGGAAGAGUUCC |
| | | AGAAAGACCCAGUCGGCCUGAUGAGCAGAGUGGCUCAGCCUGCCAGCAAGAAG |
| | | AUCGAUCAGAACAAGCUGAAGCCCGAAAUGGACGAGAAGGGGAACCUGACAAC |
| | | CGCCGGCUUUGCCUGUAGCCAGUGCGGCCAGCCCCUGUUUGUGUACAAACUGG |
| | | AACAGGUGAGCGAAAAGGGCAAGGCUUACACGAAUUACUUCGGCAGAUGCAAC |
| | | GUGGCCGAGCACGAGAAGCUGAUCCUGCUGGCCCAGCUGAAGCCUGAGAAGGA |
| | | UAGCGAUGAGGCAGUGACAUAUUCCCUGGGCAAGUUCGGACAGCGGGCCCUGG |
| | | AUUUUUAUUCCAUUCAUGUGACCAAGGAAUCCACCCACCCCGUCAAGCCUCUU |
| | | GCCCAAAUUGCCGGCAACAGAUACGCCAGCGGCCCCGUGGGCAAGGCCCUGAG |
| | | CGACGCCUGUAUGGGCACCAUCGCCAGCUUCCUGUCUAAGUACCAGGACAUUA |
| | | UCAUCGAGCACCAGAAGGUGGUGAAGGGCAACCAGAAGAGACUGGAGAGCCUG |
| | | CGCGAGCUGGCCGGCAAGGAAAACCUGGAGUAUCCUAGCGUGACCCUGCCUCC |
| | | UCAGCCUCAUACAAAGGAGGGCGUGGAUGCCUACAACGAAGUGAUCGCCCGGG |
| | | UGCGGAUGUGGGUGAACCUGAAUCUGUGGCAGAAGCUGAAGCUGUCUAGAGAC |
| | | GACGCCAAGCCCCUGCUGAGACUGAAGAAGUUCCCCAGCUUCCCUCUGGUGGA |
| | | GAGACAGGCAAAUGAAGUGGACUGGUGGGACAUGGUGUGUAACGUGAAGAAGC |
| | | UGAUCAAUGAGAAGAAGGAGGACGGCAAAGUGUUCUGGCAGAAUCUGGCCGGC |
| | | UACAAGCGUCAGGAGGCCCUGCGGCCCUACCUGAGCAGCGAGGAAGACAGAAA |
| | | GAAGGGCAAGAAGUUCGCCCGGUAUCAGCUGGGGGACCUGCUGCUGCACCUCG |
| | | AGAAGAAGCACGGCGAAGACUGGGGGAAGGUGUACGAUGAGGCCUGGGAGCGG |
| | | AUCGAUAAGAAGGUGGAGGGCCUGAGCAAGCACAUCAAGCUGGAGGAGGAACG |
| | | GAGAUCUGAGGACGCCCAGAGCAAGGCCGCCCUGACCGACUGGCUGAGAGCCA |
| | | AGGCCAGCUUCGUCAUCGAGGGGCUGAAGGAGGCCGACAAGGACGAGUUCUGC |
| | | CGGUGCGAACUGAAGCUGCAGAAGUGGUACGGAGAUCUGAGAGGCAAACCUUU |
| | | CGCCAUCGAGGCCGAGAACAGCAUCCUGGACAUCAGCGGCUUCAGCAAGCAGU |
| | | ACAACUGCGCCUUUAUUUGGCAGAAGGACGGAGUGAAGAAGCUGAACCUGUAC |
| | | CUGAUCAUCAACUAUUUCAAGGGCGGCAAGCUGAGAUUCAAGAAGAUCAAGCC |
| | | UGAAGCCUUCGAGGCCAACAGAUUCUACACCGUGAUUAACAAGAAAAGCGGAG |
| | | AGAUCGUGCCAAUGGAAGUGAACUUCAACUUCGACGACCCUAACCUGAUCAUC |
| | | CUGCCCCUGGCAUUUGGCAAGCGGCAGGGCAGAGAGUUCAUCUGGAACGACCU |
| | | GCUGUCUCUGGAGACCGGCAGCCUGAAGCUGGCCAACGGCAGAGUGAUCGAGA |
| | | AGACACUGUACAACAGACGAACCAGACAAGACGAGCCCGCCCUGUUUGUGGCC |
| | | CUGACCUUCGAGAGAAGAGAGGUGCUGGACAGCAGCAAUAUCAAGCCUAUGAA |
| | | CCUGAUCGGCGUGGACCGGGGCGAGAACAUCCCUGCCGUGAUCGCCCUUACCG |
| | | ACCCCGAGGGAUGCCCUCUGAGCCGGUUUAAAGACAGCCUGGGCAACCCUACC |
| | | CACAUCCUGAGAAUUGGCGAGUCCUACAAGGAGAAGCAGAGAACCAUCCAGGC |
| | | CAAGAAGGAGGUGGAGCAGCGGCGGGCUGGCGGCUACUCCCGGAAGUACGCCA |
| | | GCAAGGCCAAGAACCUGGCCGACGACAUGGUUAGAAAUACCGCCAGAGACCUC |
| | | CUGUACUACGCUGUGACCCAGGACGCCAUGCUGAUCUUCGAGAACCUGAGCAG |
| | | AGGCUUCGGCAGACAGGGCAAGAGAACCUUCAUGGCCGAGAGACAGUACACCC |
| | | GGAUGGAGGACUGGCUGACCGCCAAGCUGGCCUACGAGGGCCUGCCCUCUAAG |
| | | ACCUACCUGUCCAAGACCUUGGCACAGUACACCAGCAAGACAUGCUCUAACUG |
| | | CGGCUUCACAAUCACGAGCGCCGACUACGACCGGGUGCUGGAGAAACUGAAGA |
| | | AGACCGCCACAGGCUGGAUGACCACCAUUAACGGCAAGGAGCUGAAGGUGGAG |
| | | GGCCAGAUCACCUACUACAACAGGUACAAACGGCAGAACGUGGUGAAGGACCU |
| | | GAGCGUGGAACUGGAUAGACUGAGCGAGGAAAGCGUAAACAAUGACAUCAGCA |
| | | GCUGGACCAAGGGCCGGAGCGGCGAGGCCCUGAGCCUGCUGAAGAAGAGAUUC |
| | | UCCCACAGACCAGUGCAGGAGAAGUUCGUGUGUCUGAACUGCGGCUUCGAGAC |
| | | CCACGCCGACGAGCAAGCCGCCCUGAACAUCGCCCGGUCUUGGCUUUUCCUGC |
| | | GGAGCCAGGAGUACAAGAAGUACCAGACAAACAAGACCACAGGCAACACAGAC |
| | | AAGAGAGCCUUCGUCGAGACCUGGCAGAGCUUCUACAGAAAGAAGCUGAAGGA |
| | | GGUGUGGAAGCCUGCCGUG |
| 19817 | N1- | CAGGAGAmΨCAAGCGGAmΨmΨAAmΨAAAAmΨmΨCGGAGAAGACmΨGGmΨGAAG |
| | methylpseudo | GAmΨmΨCmΨAACACAAAGAAGGCmΨGGCAAGACAGGCCCmΨAmΨGAAGACACm |
| | uridine | ΨGCmΨGGmΨGAGAGmΨGAmΨGACACCCGACCmΨGAGAGAAAGACmΨGGAAAAC |
| | substituted | CmΨGAGAAAGAAGCCmΨGAGAAmΨAmΨCCCCCAGCCCAmΨCAGCAACACAAGC |
| | RNA sequence | CGGGCCAACCmΨGAAmΨAAGCmΨGCmΨGACCGACmΨACACCGAAAmΨGAAGAA |
| | encoding | GGCCAmΨCCmΨGCACGmΨGmΨAmΨmΨGGGAAGAGmΨmΨCCAGAAAGACCCAGm |
| | CasX 491 | ΨCGGCCmΨGAmΨGAGCAGAGmΨGGCmΨCAGCCmΨGCCAGCAAGAAGAmΨCGAm |
| | | ΨCAGAACAAGCmΨGAAGCCCGAAAmΨGGACGAGAAGGGGAACCmΨGACAACCG |
| | | CCGGCmΨmΨmΨGCCmΨGmΨAGCCAGmΨGCGGCCAGCCCCmΨGmΨmΨmΨGmΨGm |
| | | ΨACAAACmΨGGAACAGGmΨGAGCGAAAAGGGCAAGGCmΨmΨACACGAAmΨmΨA |
| | | CmΨmΨCGGCAGAmΨGCAACGmΨGGCCGAGCACGAGAAGCmΨGAmΨCCmΨGCmΨ |
| | | GGCCCAGCmΨGAAGCCmΨGAGAAGGAmTAGCGAmΨGAGGCAGmΨGACAmΨAmΨ |
| | | mΨCCCmΨGGGCAAGmΨmΨCGGACAGCGGGCCCmΨGGAmΨmΨmΨmΨmΨAmΨmΨC |
| | | CAmΨmΨCAmΨGmΨGACCAAGGAAmΨCCACCCACCCCGmΨCAAGCCmΨCmΨmΨG |
| | | CCCAAAmΨmΨGCCGGCAACAGAmΨACGCCAGCGGCCCCGmΨGGGCAAGGCCCm |
| | | ΨGAGCGACGCCmΨGmΨAmΨGGGCACCAmΨCGCCAGCmΨmΨCCmΨGmΨCmΨAAG |
| | | mΨACCAGGACAmΨmΨAmΨCAmΨCGAGCACCAGAAGGmΨGGmΨGAAGGGCAACC |
| | | AGAAGAGACmΨGGAGAGCCmΨGCGCGAGCmΨGGCCGGCAAGGAAAACCmΨGGA |
| | | GmΨAmΨCCmΨAGCGmΨGACCCmΨGCCmΨCCmΨCAGCCmΨCAmΨACAAAGGAGG |
| | | GCGmΨGGAmΨGCCmΨACAACGAAGmΨGAmΨCGCCCGGGmΨGCGGAmΨGmΨGGG |
| | | mΨGAACCmΨGAAmΨCmΨGmΨGGCAGAAGCmΨGAAGCmΨGmΨCmΨAGAGACGAC |
| | | GCCAAGCCCCmΨGCmΨGAGACmΨGAAGGGCmΨmΨCCCCAGCmΨmΨCCCmΨCmΨ |
| | | GGmΨGGAGAGACAGGCAAAmΨGAAGmΨGGACmΨGGmΨGGGACAmΨGGmΨGmΨG |
| | | mΨAACGmΨGAAGAAGCmΨGAmΨCAAmΨGAGAAGAAGGAGGACGGCAAAGmΨGm |
| | | ΨmΨCmΨGGCAGAAmΨCmΨGGCCGGCmΨACAAGCGmΨCAGGAGGCCCmΨGCGGC |
| | | CCmΨACCmΨGAGCAGCGAGGAAGACAGAAAGAAGGGCAAGAAGmΨmΨCGCCCG |
| | | GmΨAmΨCAGCmΨGGGGGACCmΨGCmΨGCmΨGCACCmΨCGAGAAGAAGCACGGC |
| | | GAAGACmΨGGGGGAAGGmΨGmΨACGAmΨGAGGCCmΨGGGAGCGGAmΨCGAmΨA |
| | | AGAAGGmΨGGAGGGCCmΨGAGCAAGCACAmΨCAAGCmΨGGAGGAGGAACGGAG |
| | | AmΨCmΨGAGGACGCCCAGAGCAAGGCCGCCCmΨGACCGACmΨGGCmΨGAGAGC |
| | | CAAGGCCAGCmΨmΨCGmΨCAmΨCGAGGGGCmΨGAAGGAGGCCGACAAGGACGA |
| | | GmΨmΨCmΨGCCGGmΨGCGAACmΨGAAGCmΨGCAGAAGmΨGGmΨACGGAGAmΨC |
| | | mΨGAGAGGCAAACCmΨmΨmΨCGCCAmΨCGAGGCCGAGAACAGCAmΨCCmΨGGA |
| | | CAmΨCAGCGGCmΨmΨCAGCAAGCAGmΨACAACmΨGCGCCmΨmΨmΨAmΨmΨmΨG |
| | | GCAGAAGGACGGAGmΨGAAGAAGCmΨGAACCmΨGmΨACCmΨGAmΨCAmΨCAAC |
| | | mΨAmΨmΨmΨCAAGGGCGGCAAGCmΨGAGAmΨmΨCAAGAAGAmΨCAAGCCmΨGA |
| | | AGCCmΨmΨCGAGGCCAACAGAmΨmΨCmΨACACCGmΨGAmΨmΨAACAAGAAAAG |
| | | CGGAGAGAmΨCGmΨGCCAAmΨGGAAGmΨGAACmΨmΨCAACmΨmΨCGACGACCC |
| | | mΨAACCmΨGAmΨCAmΨCCmΨGCCCCmΨGGCAmΨmΨmΨGGCAAGCGGCAGGGCA |
| | | GAGAGmΨmΨCAmΨCmΨGGAACGACCmΨGCmΨGmΨCmΨCmΨGGAGACCGGCAGC |
| | | CmΨGAAGCmΨGGCCAACGGCAGAGmΨGAmΨCGAGAAGACACmΨGmΨACAACAG |
| | | ACGAACCAGACAAGACGAGCCCGCCCmΨGmΨmΨmΨGmΨGGCCCmΨGACCmΨmΨ |
| | | CGAGAGAAGAGAGGmΨGCmΨGGACAGCAGCAAmΨAmΨCAAGCCmΨAmΨGAACC |
| | | mΨGAmΨCGGCGmΨGGACCGGGGCGAGAACAmΨCCCmΨGCCGmΨGAmΨCGCCCm |
| | | ΨmΨACCGACCCCGAGGGAmΨGCCCmΨCmΨGAGCCGGmΨmΨmΨAAAGACAGCCm |
| | | ΨGGGCAACCCmΨACCCACAmΨCCmΨGAGAAmΨmΨGGCGAGmΨCCmΨACAAGGA |
| | | GAAGCAGAGAACCAmΨCCAGGCCAAGAAGGAGGmΨGGAGCAGCGGCGGGCmΨG |
| | | GCGGCmΨACmΨCCCGGAAGmΨACGCCAGCAAGGCCAAGAACCmΨGGCCGACGA |
| | | CAmΨGGmΨmΨAGAAAmΨACCGCCAGAGACCmΨCCmΨGmΨACmΨACGCmΨGmΨG |
| | | ACCCAGGACGCCAmΨGCmΨGAmΨCmΨmΨCGAGAACCmΨGAGCAGAGGCmΨmΨC |
| | | GGCAGACAGGGCAAGAGAACCmΨmΨCAmΨGGCCGAGAGACAGmΨACACCCGGA |
| | | mΨGGAGGACmΨGGCmΨGACCGCCAAGCmΨGGCCmΨACGAGGGCCmΨGmΨCmΨA |
| | | AGACCmΨACCmΨGmΨCCAAGACCmΨmΨGGCACAGmΨACACCAGCAAGACAmΨG |
| | | CmΨCmΨAACmΨGCGGCmΨmΨCACAAmΨCACGAGCGCCGACmΨACGACCGGGmΨ |
| | | GCmΨGGAGAAACmΨGAAGAAGACCGCCACAGGCmΨGGAmΨGACCACCAmΨmΨA |
| | | ACGGCAAGGAGCmΨGAAGGmΨGGAGGGCCAGAmΨCACCmΨACmΨACAACAGGm |
| | | ΨACAAACGGCAGAACGmΨGGmΨGAAGGACCmΨGAGCGmΨGGAACmΨGGAmTAG |
| | | ACmΨGAGCGAGGAAAGCGmΨAAACAAmΨGACAmΨCAGCAGCmΨGGACCAAGGG |
| | | CCGGAGCGGCGAGGCCCmΨGAGCCmΨGCmΨGAAGAAGAGAmΨmΨCmΨCCCACA |
| | | GACCAGmΨGCAGGAGAAGmΨmΨCGmΨGmΨGmΨCmΨGAACmΨGCGGCmΨmΨCGA |
| | | GACCCACGCCGACGAGCAAGCCGCCCmΨGAACAmΨCGCCCGGmΨCmΨmΨGGCm |
| | | ΨmΨmΨmΨCCmΨGCGGAGCCAGGAGmΨACAAGAAGmΨACCAGACAAACAAGACC |
| | | ACAGGCAACACAGACAAGAGAGCCmΨmΨCGmΨCGAGACCmΨGGCAGAGCmΨmΨ |
| | | CmΨACAGAAAGAAGCmΨGAAGGAGGmΨGmΨGGAAGCCmΨGCCGmΨG |
| 19818 | N1- | CAGGAGAmΨCAAGCGGAmΨmΨAAmΨAAAAmΨmΨCGGAGAAGACmΨGGmΨGAAG |
| | methylpseudo | GAmΨmΨCmΨAACACAAAGAAGGCmΨGGCAAGACAGGCCCmΨAmΨGAAGACACm |
| | uridine | ΨGCmΨGGmΨGAGAGmΨGAmΨGACACCCGACCmΨGAGAGAAAGACmΨGGAAAAC |
| | substituted | CmΨGAGAAAGAAGCCmΨGAGAAmΨAmΨCCCCCAGCCCAmΨCAGCAACACAAGC |
| | RNA sequence | CGGGCCAACCmΨGAAmΨAAGCmΨGCmΨGACCGACmΨACACCGAAAmΨGAAGAA |
| | encoding | GGCCAmΨCCmΨGCACGmΨGmΨAmΨmΨGGGAAGAGmΨmΨCCAGAAAGACCCAGm |
| | CasX 515 | ΨCGGCCmΨGAmΨGAGCAGAGmΨGGCmΨCAGCCmΨGCCAGCAAGAAGAmΨCGAm |
| | | ΨCAGAACAAGCmΨGAAGCCCGAAAmΨGGACGAGAAGGGGAACCmΨGACAACCG |
| | | CCGGCmΨmΨmΨGCCmΨGmΨAGCCAGmΨGCGGCCAGCCCCmΨGmΨmΨmΨGmΨGm |
| | | ΨACAAACmΨGGAACAGGmΨGAGCGAAAAGGGCAAGGCmΨmΨACACGAAmΨmΨA |
| | | CmΨmΨCGGCAGAmΨGCAACGmΨGGCCGAGCACGAGAAGCmΨGAmΨCCmΨGCmΨ |
| | | GGCCCAGCmΨGAAGCCmΨGAGAAGGAmΨAGCGAmΨGAGGCAGmΨGACAmΨAmΨ |
| | | mΨCCCmΨGGGCAAGmΨmΨCGGACAGCGGGCCCmΨGGAmΨmΨmΨmΨmΨAmΨmΨC |
| | | CAmΨmΨCAmΨGmΨGACCAAGGAAmΨCCACCCACCCCGmΨCAAGCCmΨCmΨmΨG |
| | | CCCAAAmΨmΨGCCGGCAACAGAmΨACGCCAGCGGCCCCGmΨGGGCAAGGCCCm |
| | | ΨGAGCGACGCCmΨGmΨAmΨGGGCACCAmΨCGCCAGCmΨmΨCCmΨGmΨCmΨAAG |
| | | mΨACCAGGACAmΨmΨAmΨCAmΨCGAGCACCAGAAGGmΨGGmΨGAAGGGCAACC |
| | | AGAAGAGACmΨGGAGAGCCmΨGCGCGAGCmΨGGCCGGCAAGGAAAACCmΨGGA |
| | | GmΨAmΨCCmΨAGCGmΨGACCCmΨGCCmΨCCmΨCAGCCmΨCAmΨACAAAGGAGG |
| | | GCGmΨGGAmΨGCCmΨACAACGAAGmΨGAmΨCGCCCGGGmΨGCGGAmΨGmΨGGG |
| | | mΨGAACCmΨGAAmΨCmΨGmΨGGCAGAAGCmΨGAAGCmΨGmΨCmΨAGAGACGAC |
| | | GCCAAGCCCCmΨGCmΨGAGACmΨGAAGGGCmΨmΨCCCCAGCmΨmΨCCCmΨCmΨ |
| | | GGmΨGGAGAGACAGGCAAAmΨGAAGmΨGGACmΨGGmΨGGGACAmΨGGmΨGmΨG |
| | | mΨAACGmΨGAAGAAGCmΨGAmΨCAAmΨGAGAAGAAGGAGGACGGCAAAGmΨGm |
| | | ΨmΨCmΨGGCAGAAmΨCmΨGGCCGGCmΨACAAGCGmΨCAGGAGGCCCmΨGCGGC |
| | | CCmΨACCmΨGAGCAGCGAGGAAGACAGAAAGAAGGGCAAGAAGmΨmΨCGCCCG |
| | | GmΨAmΨCAGCmΨGGGGGACCmΨGCmΨGCmΨGCACCmΨCGAGAAGAAGCACGGC |
| | | GAAGACmΨGGGGGAAGGmΨGmΨACGAmΨGAGGCCmΨGGGAGCGGAmΨCGAmΨA |
| | | AGAAGGmΨGGAGGGCCmΨGAGCAAGCACAmΨCAAGCmΨGGAGGAGGAACGGAG |
| | | AmΨCmΨGAGGACGCCCAGAGCAAGGCCGCCCmΨGACCGACmΨGGCmΨGAGAGC |
| | | CAAGGCCAGCmΨmΨCGmΨCAmΨCGAGGGGCmΨGAAGGAGGCCGACAAGGACGA |
| | | GmΨmΨCmΨGCCGGmΨGCGAACmΨGAAGCmΨGCAGAAGmΨGGmΨACGGAGAmΨC |
| | | mΨGAGAGGCAAACCmΨmΨmΨCGCCAmΨCGAGGCCGAGAACAGCAmΨCCmΨGGA |
| | | CAmΨCAGCGGCmΨmΨCAGCAAGCAGmΨACAACmΨGCGCCmΨmΨmΨAmΨmΨmΨG |
| | | GCAGAAGGACGGAGmΨGAAGAAGCmΨGAACCmΨGmΨACCmΨGAmΨCAmΨCAAC |
| | | mΨAmΨmΨmΨCAAGGGCGGCAAGCmΨGAGAmΨmΨCAAGAAGAmΨCAAGCCmΨGA |
| | | AGCCmΨmΨCGAGGCCAACAGAmΨmΨCmΨACACCGmΨGAmΨmΨAACAAGAAAAG |
| | | CGGAGAGAmΨCGmΨGCCAAmΨGGAAGmΨGAACmΨmΨCAACmΨmΨCGACGACCC |
| | | mΨAACCmΨGAmΨCAmΨCCmΨGCCCCmΨGGCAmΨmΨmΨGGCAAGCGGCAGGGCA |
| | | GAGAGmΨmΨCAmΨCmΨGGAACGACCmΨGCmΨGmΨCmΨCmΨGGAGACCGGCAGC |
| | | CmΨGAAGCmΨGGCCAACGGCAGAGmΨGAmΨCGAGAAGACACmΨGmΨACAACAG |
| | | ACGAACCAGACAAGACGAGCCCGCCCmΨGmΨmΨmΨGmΨGGCCCmΨGACCmΨmΨ |
| | | CGAGAGAAGAGAGGmΨGCmΨGGACAGCAGCAAmΨAmΨCAAGCCmΨAmΨGAACC |
| | | mΨGAmΨCGGCGmΨGGACCGGGGCGAGAACAmΨCCCmΨGCCGmΨGAmΨCGCCCm |
| | | ΨmΨACCGACCCCGAGGGAmΨGCCCmΨCmΨGAGCCGGmΨmΨmΨAAAGACAGCCm |
| | | ΨGGGCAACCCmΨACCCACAmΨCCmΨGAGAAmΨmΨGGCGAGmΨCCmΨACAAGGA |
| | | GAAGCAGAGAACCAmΨCCAGGCCAAGAAGGAGGmΨGGAGCAGCGGCGGGCmΨG |
| | | GCGGCmΨACmΨCCCGGAAGmΨACGCCAGCAAGGCCAAGAACCmΨGGCCGACGA |
| | | CAmΨGGmΨmΨAGAAAmΨACCGCCAGAGACCmΨCCmΨGmΨACmΨACGCmΨGmΨG |
| | | ACCCAGGACGCCAmΨGCmΨGAmΨCmΨmΨCGAGAACCmΨGAGCAGAGGCmΨmΨC |
| | | GGCAGACAGGGCAAGAGAACCmΨmΨCAmΨGGCCGAGAGACAGmΨACACCCGGA |
| | | mΨGGAGGACmΨGGCmΨGACCGCCAAGCmΨGGCCmΨACGAGGGCCmΨGCCCmΨC |
| | | mΨAAGACCmΨACCmΨGmΨCCAAGACCmΨmΨGGCACAGmΨACACCAGCAAGACA |
| | | mΨGCmΨCmΨAACmΨGCGGCmΨmΨCACAAmΨCACGAGCGCCGACmΨACGACCGG |
| | | GmΨGCmΨGGAGAAACmΨGAAGAAGACCGCCACAGGCmΨGGAmΨGACCACCAmΨ |
| | | mΨAACGGCAAGGAGCmΨGAAGGmΨGGAGGGCCAGAmΨCACCmΨACmΨACAACA |
| | | GGmΨACAAACGGCAGAACGmΨGGmΨGAAGGACCmΨGAGCGmΨGGAACmΨGGAm |
| | | ΨAGACmΨGAGCGAGGAAAGCGmΨAAACAAmΨGACAmΨCAGCAGCmΨGGACCAA |
| | | GGGCCGGAGCGGCGAGGCCCmΨGAGCCmΨGCmΨGAAGAAGAGAmΨmΨCmΨCCC |
| | | ACAGACCAGmΨGCAGGAGAAGmΨmΨCGmΨGmΨGmΨCmΨGAACmΨGCGGCmΨmΨ |
| | | CGAGACCCACGCCGACGAGCAAGCCGCCCmΨGAACAmΨCGCCCGGmΨCmΨmΨG |
| | | GCmΨmΨmΨmΨCCmΨGCGGAGCCAGGAGmΨACAAGAAGmΨACCAGACAAACAAG |
| | | ACCACAGGCAACACAGACAAGAGAGCCmΨmΨCGmΨCGAGACCmΨGGCAGAGCm |
| | | ΨmΨCmΨACAGAAAGAAGCmΨGAAGGAGGmΨGmΨGGAAGCCmΨGCCGmΨG |
| 19819 | N1- | CAGGAGAmΨCAAGCGGAmΨmΨAAmΨAAAAmΨmΨCGGAGAAGACmΨGGmΨGAAG |
| | methylpseudo | GAmΨmΨCmΨAACACAAAGAAGGCmΨGGCAAGACACGGGGCCCmΨAmΨGAAGAC |
| | uridine | ACmΨGCmΨGGmΨGAGAGmΨGAmΨGACACCCGACCmΨGAGAGAAAGACmΨGGAA |
| | substituted | AACCmΨGAGAAAGAAGCCmΨGAGAAmΨAmΨCCCCCAGCCCAmΨCAGCAACACA |
| | RNA | AGCCGGGCCAACCmΨGAAmΨAAGCmΨGCmΨGACCGACmΨACACCGAAAmΨGAA |
| | sequence | GAAGGCCAmΨCCmΨGCACGmΨGmΨAmΨmΨGGGAAGAGmΨmΨCCAGAAAGACCC |
| | encoding | AGmΨCGGCCmΨGAmΨGAGCAGAGmΨGGCmΨCAGCCmΨGCCAGCAAGAAGAmΨC |
| | CasX 676 | GAmΨCAGAACAAGCmΨGAAGCCCGAAAmΨGGACGAGAAGGGGAACCmΨGACAA |
| | | CCGCCGGCmΨmΨmΨGCCmΨGmΨAGCCAGmΨGCGGCCAGCCCCmΨGmΨmΨmΨGm |
| | | ΨGmΨACAAACmΨGGAACAGGmΨGAGCGAAAAGGGCAAGGCmΨmΨACACGAAmΨ |
| | | mΨACmΨmΨCGGCAGAmΨGCAACGmΨGGCCGAGCACGAGAAGCmΨGAmΨCAAGC |
| | | mΨGGCCCAGCmΨGAAGCCmΨGAGAAGGAmTAGCGAmΨGAGGCAGmΨGACAmΨA |
| | | mΨmΨCCCmΨGGGCAAGmΨmΨCGGACAGCGGGCCCmΨGGAmΨmΨmΨmΨmΨAmΨm |
| | | ΨCCAmΨmΨCAmΨGmΨGACCAAGGAAmΨCCACCCACCCCGmΨCAAGCCmΨCmΨm |
| | | ΨGCCCAAAmΨmΨGCCGGCAACAGAmΨACGCCmΨCCAGCCCCGmΨGGGCAAGGC |
| | | CCmΨGAGCGACGCCmΨGmΨAmΨGGGCACCAmΨCGCCAGCmΨmΨCCmΨGmΨCmΨ |
| | | AAGmΨACCAGGACAmΨmΨAmΨCAmΨCGAGCACCAGAAGGmΨGGmΨGAAGGGCA |
| | | ACCAGAAGAGACmΨGGAGAGCCmΨGCGCGAGCmΨGGCCGGCAAGGAAAACCmΨ |
| | | GGAGmΨAmΨCCmΨAGCGmΨGACCCmΨGCCmΨCCmΨCAGCCmΨCAmΨACAAAGG |
| | | AGGGCGmΨGGAmΨGCCmΨACAACGAAGmΨGAmΨCGCCCGGGmΨGCGGAmΨGmΨ |
| | | GGGmΨGAACCmΨGAAmΨCmΨGmΨGGCAGAAGCmΨGAAGCmΨGmΨCmΨAGAGAC |
| | | GACGCCAAGCCCCmΨGCmΨGAGACmΨGAAGGGCmΨmΨCCCCAGCmΨmΨCCCmΨ |
| | | CmΨGGmΨGGAGAGACAGGCAAAmΨGAAGmΨGGACmΨGGmΨGGGACAmΨGGmΨG |
| | | mΨGmΨAACGmΨGAAGAAGCmΨGAmΨCAAmΨGAGAAGAAGGAGGACGGCAAAGm |
| | | ΨGmΨmΨCmΨGGCAGAAmΨCmΨGGCCGGCmΨACAAGCGmΨCAGGAGGCCCmΨGC |
| | | GGCCCmΨACCmΨGAGCAGCGAGGAAGACAGAAAGAAGGGCAAGAAGmΨmΨCGC |
| | | CCGGmΨAmΨCAGCmΨGGGGGACCmΨGCmΨGCmΨGCACCmΨCGAGAAGAAGCAC |
| | | GGCGAAGACmΨGGGGGAAGGmΨGmΨACGAmΨGAGGCCmΨGGGAGCGGAmΨCGA |
| | | mΨAAGAAGGmΨGGAGGGCCmΨGAGCAAGCACAmΨCAAGCmΨGGAGGAGGAACG |
| | | GAGAmΨCmΨGAGGACGCCCAGAGCAAGGCCGCCCmΨGACCGACmΨGGCmΨGAG |
| | | AGCCAAGGCCAGCmΨmΨCGmΨCAmΨCGAGGGGCmΨGAAGGAGGCCGACAAGGA |
| | | CGAGmΨmΨCmΨGCCGGmΨGCGAACmΨGAAGCmΨGCAGAAGmΨGGmΨACGGAGA |
| | | mΨCmΨGAGAGGCAAACCmΨmΨmΨCGCCAmΨCGAGGCCGAGAACAGCAmΨCCmΨ |
| | | GGACAmΨCAGCGGCmΨmΨCAGCAAGCAGmΨACAACmΨGCGCCmΨmΨmΨAmΨmΨ |
| | | mΨGGCAGAAGGACGGAGmΨGAAGAAGCmΨGAACCmΨGmΨACCmΨGAmΨCAmΨC |
| | | AACmΨAmΨmΨmΨCAAGGGCGGCAAGCmΨGAGAmΨmΨCAAGAAGAmΨCAAGCCm |
| | | ΨGAAGCCmΨmΨCGAGGCCAACAGAmΨmΨCmΨACACCGmΨGAmΨmΨAACAAGAA |
| | | AAGCGGAGAGAmΨCGmΨGCCAAmΨGGAAGmΨGAACmΨmΨCAACmΨmΨCGACGA |
| | | CCCmΨAACCmΨGAmΨCAmΨCCmΨGCCCCmΨGGCAmΨmΨmΨGGCAAGCGGCAGG |
| | | GCAGAGAGmΨmΨCAmΨCmΨGGAACGACCmΨGCmΨGmΨCmΨCmΨGGAGACCGGC |
| | | AGCCmΨGAAGCmΨGGCCAACGGCAGAGmΨGAmΨCGAGAAGACACmΨGmΨACAA |
| | | CAGACGAACCAGACAAGACGAGCCCGCCCmΨGmΨmΨmΨGmΨGGCCCmΨGACCm |
| | | ΨmΨCGAGAGAAGAGAGGmΨGCmΨGGACAGCAGCAAmΨAmΨCAAGCCmΨAmΨGA |
| | | ACCmΨGAmΨCGGCGmΨGGACCGGGGCGAGAACAmΨCCCmΨGCCGmΨGAmΨCGC |
| | | CCmΨmΨACCGACCCCGAGGGAmΨGCCCmΨCmΨGAGCCGGmΨmΨmΨAAAGACAG |
| | | CCmΨGGGCAACCCmΨACCCACAmΨCCmΨGAGAAmΨmΨGGCGAGmΨCCmΨACAA |
| | | GGAGAAGCAGAGAACCAmΨCCAGGCCAAGAAGGAGGmΨGGAGCAGCGGCGGGC |
| | | mΨGGCGGCmΨACmΨCCCGGAAGmΨACGCCAGCAAGGCCAAGAACCmΨGGCCGA |
| | | CGACAmΨGGmΨmΨAGAAAmΨACCGCCAGAGACCmΨCCmΨGmΨACmΨACGCmΨG |
| | | mΨGACCCAGGACGCCAmΨGCmΨGAmΨCmΨmΨCGAGAACCmΨGAGCAGAGGCmΨ |
| | | mΨCGGCAGACAGGGCAAGAGAACCmΨmΨCAmΨGGCCGAGAGACAGmΨACACCC |
| | | GGAmΨGGAGGACmΨGGCmΨGACCGCCAAGCmΨGGCCmΨACGAGGGCCmΨGCCC |
| | | mΨCmΨAAGACCmΨACCmΨGmΨCCAAGACCmΨmΨGGCACAGmΨACACCAGCAAG |
| | | ACAmΨGCmΨCmΨAACmΨGCGGCmΨmΨCACAAmΨCACGAGCGCCGACmΨACGAC |
| | | CGGGmΨGCmΨGGAGAAACmΨGAAGAAGACCGCCACAGGCmΨGGAmΨGACCACC |
| | | AmΨmΨAACGGCAAGGAGCmΨGAAGGmΨGGAGGGCCAGAmΨCACCmΨACmΨACA |
| | | ACAGGmΨACAAACGGCAGAACGmΨGGmΨGAAGGACCmΨGAGCGmΨGGAACmΨG |
| | | GAmΨAGACmΨGAGCGAGGAAAGCGmΨAAACAAmΨGACAmΨCAGCAGCmΨGGAC |
| | | CAAGGGCCGGAGCGGCGAGGCCCmΨGAGCCmΨGCmΨGAAGAAGAGAmΨmΨCmΨ |
| | | CCCACAGACCAGmΨGCAGGAGAAGmΨmΨCGmΨGmΨGmΨCmΨGAACmΨGCGGCm |
| | | ΨmΨCGAGACCCACGCCGACGAGCAAGCCGCCCmΨGAACAmΨCGCCCGGmΨCmΨ |
| | | mΨGGCmΨmΨmΨmΨCCmΨGCGGAGCCAGGAGmΨACAAGAAGmΨACCAGACAAAC |
| | | AAGACCACAGGCAACACAGACAAGAGAGCCmΨmΨCGmΨCGAGACCmΨGGCAGA |
| | | GCmΨmΨCmΨACAGAAAGAAGCmΨGAAGGAGGmΨGmΨGGAAGCCmΨGCCGmΨG |
| 19820 | N1- | CAGGAGAmΨCAAGCGGAmΨmΨAAmΨAAAAmΨmΨCGGAGAAGACmΨGGmΨGAAG |
| | methylpseudo | GAmΨmΨCmΨAACACAAAGAAGGCmΨGGCAAGACAGGCCCmΨAmΨGAAGACACm |
| | uridine | ΨGCmΨGGmΨGAGAGmΨGAmΨGACACCCGACCmΨGAGAGAAAGACmΨGGAAAAC |
| | substituted | CmΨGAGAAAGAAGCCmΨGAGAAmΨAmΨCCCCCAGCCCAmΨCAGCAACACAAGC |
| | RNA | CGGGCCAACCmΨGAAmΨAAGCmΨGCmΨGACCGACmΨACACCGAAAmΨGAAGAA |
| | sequence | GGCCAmΨCCmΨGCACGmΨGmΨAmΨmΨGGGAAGAGmΨmΨCCAGAAAGACCCAGm |
| | encoding | ΨCGGCCmΨGAmΨGAGCAGAGmΨGGCmΨCAGCCmΨGCCAGCAAGAAGAmΨCGAm |
| | CasX 812 | ΨCAGAACAAGCmΨGAAGCCCGAAAmΨGGACGAGAAGGGGAACCmΨGACAACCG |
| | | CCGGCmΨmΨmΨGCCmΨGmΨAGCCAGmΨGCGGCCAGCCCCmΨGmΨmΨmΨGmΨGm |
| | | ΨACAAACmΨGGAACAGGmΨGAGCGAAAAGGGCAAGGCmΨmΨACACGAAmΨmΨA |
| | | CmΨmΨCGGCAGAmΨGCAACGmΨGGCCGAGCACGAGAAGCmΨGAmΨCCmΨGCmΨ |
| | | GGCCCAGCmΨGAAGCCmΨGAGAAGGAmΨAGCGAmΨGAGGCAGmΨGACAmΨAmΨ |
| | | mΨCCCmΨGGGCAAGmΨmΨCGGACAGCGGGCCCmΨGGAmΨmΨmΨmΨmΨAmΨmΨC |
| | | CAmΨmΨCAmΨGmΨGACCAAGGAAmΨCCACCCACCCCGmΨCAAGCCmΨCmΨmΨG |
| | | CCCAAAmΨmΨGCCGGCAACAGAmΨACGCCAGCGGCCCCGmΨGGGCAAGGCCCm |
| | | ΨGAGCGACGCCmΨGmΨAmΨGGGCACCAmΨCGCCAGCmΨmΨCCmΨGmΨCmΨAAG |
| | | mΨACCAGGACAmΨmΨAmΨCAmΨCGAGCACCAGAAGGmΨGGmΨGAAGGGCAACC |
| | | AGAAGAGACmΨGGAGAGCCmΨGCGCGAGCmΨGGCCGGCAAGGAAAACCmΨGGA |
| | | GmΨAmΨCCmΨAGCGmΨGACCCmΨGCCmΨCCmΨCAGCCmΨCAmΨACAAAGGAGG |
| | | GCGmΨGGAmΨGCCmΨACAACGAAGmΨGAmΨCGCCCGGGmΨGCGGAmΨGmΨGGG |
| | | mΨGAACCmΨGAAmΨCmΨGmΨGGCAGAAGCmΨGAAGCmΨGmΨCmΨAGAGACGAC |
| | | GCCAAGCCCCmΨGCmΨGAGACmΨGAAGAAGmΨmΨCCCCAGCmΨmΨCCCmΨCmΨ |
| | | GGmΨGGAGAGACAGGCAAAmΨGAAGmΨGGACmΨGGmΨGGGACAmΨGGmΨGmΨG |
| | | mΨAACGmΨGAAGAAGCmΨGAmΨCAAmΨGAGAAGAAGGAGGACGGCAAAGmΨGm |
| | | ΨmΨCmΨGGCAGAAmΨCmΨGGCCGGCmΨACAAGCGmΨCAGGAGGCCCmΨGCGGC |
| | | CCmΨACCmΨGAGCAGCGAGGAAGACAGAAAGAAGGGCAAGAAGmΨmΨCGCCCG |
| | | GmΨAmΨCAGCmΨGGGGGACCmΨGCmΨGCmΨGCACCmΨCGAGAAGAAGCACGGC |
| | | GAAGACmΨGGGGGAAGGmΨGmΨACGAmΨGAGGCCmΨGGGAGCGGAmΨCGAmΨA |
| | | AGAAGGmΨGGAGGGCCmΨGAGCAAGCACAmΨCAAGCmΨGGAGGAGGAACGGAG |
| | | AmΨCmΨGAGGACGCCCAGAGCAAGGCCGCCCmΨGACCGACmΨGGCmΨGAGAGC |
| | | CAAGGCCAGCmΨmΨCGmΨCAmΨCGAGGGGCmΨGAAGGAGGCCGACAAGGACGA |
| | | GmΨmΨCmΨGCCGGmΨGCGAACmΨGAAGCmΨGCAGAAGmΨGGmΨACGGAGAmΨC |
| | | mΨGAGAGGCAAACCmΨmΨmΨCGCCAmΨCGAGGCCGAGAACAGCAmΨCCmΨGGA |
| | | CAmΨCAGCGGCmΨmΨCAGCAAGCAGmΨACAACmΨGCGCCmΨmΨmΨAmΨmΨmΨG |
| | | GCAGAAGGACGGAGmΨGAAGAAGCmΨGAACCmΨGmΨACCmΨGAmΨCAmΨCAAC |
| | | mΨAmΨmΨmΨCAAGGGCGGCAAGCmΨGAGAmΨmΨCAAGAAGAmΨCAAGCCmΨGA |
| | | AGCCmΨmΨCGAGGCCAACAGAmΨmΨCmΨACACCGmΨGAmΨmΨAACAAGAAAAG |
| | | CGGAGAGAmΨCGmΨGCCAAmΨGGAAGmΨGAACmΨmΨCAACmΨmΨCGACGACCC |
| | | mΨAACCmΨGAmΨCAmΨCCmΨGCCCCmΨGGCAmΨmΨmΨGGCAAGCGGCAGGGCA |
| | | GAGAGmΨmΨCAmΨCmΨGGAACGACCmΨGCmΨGmΨCmΨCmΨGGAGACCGGCAGC |
| | | CmΨGAAGCmΨGGCCAACGGCAGAGmΨGAmΨCGAGAAGACACmΨGmΨACAACAG |
| | | ACGAACCAGACAAGACGAGCCCGCCCmΨGmΨmΨmΨGmΨGGCCCmΨGACCmΨmΨ |
| | | CGAGAGAAGAGAGGmΨGCmΨGGACAGCAGCAAmΨAmΨCAAGCCmΨAmΨGAACC |
| | | mΨGAmΨCGGCGmΨGGACCGGGGCGAGAACAmΨCCCmΨGCCGmΨGAmΨCGCCCm |
| | | ΨmΨACCGACCCCGAGGGAmΨGCCCmΨCmΨGAGCCGGmΨmΨmΨAAAGACAGCCm |
| | | ΨGGGCAACCCmΨACCCACAmΨCCmΨGAGAAmΨmΨGGCGAGmΨCCmΨACAAGGA |
| | | GAAGCAGAGAACCAmΨCCAGGCCAAGAAGGAGGmΨGGAGCAGCGGCGGGCmΨG |
| | | GCGGCmΨACmΨCCCGGAAGmΨACGCCAGCAAGGCCAAGAACCmΨGGCCGACGA |
| | | CAmΨGGmΨmΨAGAAAmΨACCGCCAGAGACCmΨCCmΨGmΨACmΨACGCmΨGmΨG |
| | | ACCCAGGACGCCAmΨGCmΨGAmΨCmΨmΨCGAGAACCmΨGAGCAGAGGCmΨmΨC |
| | | GGCAGACAGGGCAAGAGAACCmΨmΨCAmΨGGCCGAGAGACAGmΨACACCCGGA |
| | | mΨGGAGGACmΨGGCmΨGACCGCCAAGCmΨGGCCmΨACGAGGGCCmΨGCCCmΨC |
| | | mΨAAGACCmΨACCmΨGmΨCCAAGACCmΨmΨGGCACAGmΨACACCAGCAAGACA |
| | | mΨGCmΨCmΨAACmΨGCGGCmΨmΨCACAAmΨCACGAGCGCCGACmΨACGACCGG |
| | | GmΨGCmΨGGAGAAACmΨGAAGAAGACCGCCACAGGCmΨGGAmΨGACCACCAmΨ |
| | | mΨAACGGCAAGGAGCmΨGAAGGmΨGGAGGGCCAGAmΨCACCmΨACmΨACAACA |
| | | GGmΨACAAACGGCAGAACGmΨGGmΨGAAGGACCmΨGAGCGmΨGGAACmΨGGAm |
| | | ΨAGACmΨGAGCGAGGAAAGCGmΨAAACAAmΨGACAmΨCAGCAGCmΨGGACCAA |
| | | GGGCCGGAGCGGCGAGGCCCmΨGAGCCmΨGCmΨGAAGAAGAGAmΨmΨCmΨCCC |
| | | ACAGACCAGmΨGCAGGAGAAGmΨmΨCGmΨGmΨGmΨCmΨGAACmΨGCGGCmΨmΨ |
| | | CGAGACCCACGCCGACGAGCAAGCCGCCCmΨGAACAmΨCGCCCGGmΨCmΨmΨG |
| | | GCmΨmΨmΨmΨCCmΨGCGGAGCCAGGAGmΨACAAGAAGmΨACCAGACAAACAAG |
| | | ACCACAGGCAACACAGACAAGAGAGCCmΨmΨCGmΨCGAGACCmΨGGCAGAGCm |
| | | ΨmΨCmΨACAGAAAGAAGCmΨGAAGGAGGmΨGmΨGGAAGCCmΨGCCGmΨG |
| 19816 | DNA | CAGGAGATCAAGCGGATTAATAAAATTCGGAGAAGACTGGTGAAGGATTCTAA |
| | sequence | CACAAAGAAGGCTGGCAAGACAGGCCCTATGAAGACACTGCTGGTGAGAGTGA |
| | encoding | TGACACCCGACCTGAGAGAAAGACTGGAAAACCTGAGAAAGAAGCCTGAGAAT |
| | CasX 491 | ATCCCCCAGCCCATCAGCAACACAAGCCGGGCCAACCTGAATAAGCTGCTGAC |
| | | CGACTACACCGAAATGAAGAAGGCCATCCTGCACGTGTATTGGGAAGAGTTCC |
| | | AGAAAGACCCAGTCGGCCTGATGAGCAGAGTGGCTCAGCCTGCCAGCAAGAAG |
| | | ATCGATCAGAACAAGCTGAAGCCCGAAATGGACGAGAAGGGGAACCTGACAAC |
| | | CGCCGGCTTTGCCTGTAGCCAGTGCGGCCAGCCCCTGTTTGTGTACAAACTGG |
| | | AACAGGTGAGCGAAAAGGGCAAGGCTTACACGAATTACTTCGGCAGATGCAAC |
| | | GTGGCCGAGCACGAGAAGCTGATCCTGCTGGCCCAGCTGAAGCCTGAGAAGGA |
| | | TAGCGATGAGGCAGTGACATATTCCCTGGGCAAGTTCGGACAGCGGGCCCTGG |
| | | ATTTTTATTCCATTCATGTGACCAAGGAATCCACCCACCCCGTCAAGCCTCTT |
| | | GCCCAAATTGCCGGCAACAGATACGCCAGCGGCCCCGTGGGCAAGGCCCTGAG |
| | | CGACGCCTGTATGGGCACCATCGCCAGCTTCCTGTCTAAGTACCAGGACATTA |
| | | TCATCGAGCACCAGAAGGTGGTGAAGGGCAACCAGAAGAGACTGGAGAGCCTG |
| | | CGCGAGCTGGCCGGCAAGGAAAACCTGGAGTATCCTAGCGTGACCCTGCCTCC |
| | | TCAGCCTCATACAAAGGAGGGCGTGGATGCCTACAACGAAGTGATCGCCCGGG |
| | | TGCGGATGTGGGTGAACCTGAATCTGTGGCAGAAGCTGAAGCTGTCTAGAGAC |
| | | GACGCCAAGCCCCTGCTGAGACTGAAGGGCTTCCCCAGCTTCCCTCTGGTGGA |
| | | GAGACAGGCAAATGAAGTGGACTGGTGGGACATGGTGTGTAACGTGAAGAAGC |
| | | TGATCAATGAGAAGAAGGAGGACGGCAAAGTGTTCTGGCAGAATCTGGCCGGC |
| | | TACAAGCGTCAGGAGGCCCTGCGGCCCTACCTGAGCAGCGAGGAAGACAGAAA |
| | | GAAGGGCAAGAAGTTCGCCCGGTATCAGCTGGGGGACCTGCTGCTGCACCTCG |
| | | AGAAGAAGCACGGCGAAGACTGGGGGAAGGTGTACGATGAGGCCTGGGAGCGG |
| | | ATCGATAAGAAGGTGGAGGGCCTGAGCAAGCACATCAAGCTGGAGGAGGAACG |
| | | GAGATCTGAGGACGCCCAGAGCAAGGCCGCCCTGACCGACTGGCTGAGAGCCA |
| | | AGGCCAGCTTCGTCATCGAGGGGCTGAAGGAGGCCGACAAGGACGAGTTCTGC |
| | | CGGTGCGAACTGAAGCTGCAGAAGTGGTACGGAGATCTGAGAGGCAAACCTTT |
| | | CGCCATCGAGGCCGAGAACAGCATCCTGGACATCAGCGGCTTCAGCAAGCAGT |
| | | ACAACTGCGCCTTTATTTGGCAGAAGGACGGAGTGAAGAAGCTGAACCTGTAC |
| | | CTGATCATCAACTATTTCAAGGGCGGCAAGCTGAGATTCAAGAAGATCAAGCC |
| | | TGAAGCCTTCGAGGCCAACAGATTCTACACCGTGATTAACAAGAAAAGCGGAG |
| | | AGATCGTGCCAATGGAAGTGAACTTCAACTTCGACGACCCTAACCTGATCATC |
| | | CTGCCCCTGGCATTTGGCAAGCGGCAGGGCAGAGAGTTCATCTGGAACGACCT |
| | | GCTGTCTCTGGAGACCGGCAGCCTGAAGCTGGCCAACGGCAGAGTGATCGAGA |
| | | AGACACTGTACAACAGACGAACCAGACAAGACGAGCCCGCCCTGTTTGTGGCC |
| | | CTGACCTTCGAGAGAAGAGAGGTGCTGGACAGCAGCAATATCAAGCCTATGAA |
| | | CCTGATCGGCGTGGACCGGGGCGAGAACATCCCTGCCGTGATCGCCCTTACCG |
| | | ACCCCGAGGGATGCCCTCTGAGCCGGTTTAAAGACAGCCTGGGCAACCCTACC |
| | | CACATCCTGAGAATTGGCGAGTCCTACAAGGAGAAGCAGAGAACCATCCAGGC |
| | | CAAGAAGGAGGTGGAGCAGCGGCGGGCTGGCGGCTACTCCCGGAAGTACGCCA |
| | | GCAAGGCCAAGAACCTGGCCGACGACATGGTTAGAAATACCGCCAGAGACCTC |
| | | CTGTACTACGCTGTGACCCAGGACGCCATGCTGATCTTCGAGAACCTGAGCAG |
| | | AGGCTTCGGCAGACAGGGCAAGAGAACCTTCATGGCCGAGAGACAGTACACCC |
| | | GGATGGAGGACTGGCTGACCGCCAAGCTGGCCTACGAGGGCCTGTCTAAGACC |
| | | TACCTGTCCAAGACCTTGGCACAGTACACCAGCAAGACATGCTCTAACTGCGG |
| | | CTTCACAATCACGAGCGCCGACTACGACCGGGTGCTGGAGAAACTGAAGAAGA |
| | | CCGCCACAGGCTGGATGACCACCATTAACGGCAAGGAGCTGAAGGTGGAGGGC |
| | | CAGATCACCTACTACAACAGGTACAAACGGCAGAACGTGGTGAAGGACCTGAG |
| | | CGTGGAACTGGATAGACTGAGCGAGGAAAGCGTAAACAATGACATCAGCAGCT |
| | | GGACCAAGGGCCGGAGCGGCGAGGCCCTGAGCCTGCTGAAGAAGAGATTCTCC |
| | | CACAGACCAGTGCAGGAGAAGTTCGTGTGTCTGAACTGCGGCTTCGAGACCCA |
| | | CGCCGACGAGCAAGCCGCCCTGAACATCGCCCGGTCTTGGCTTTTCCTGCGGA |
| | | GCCAGGAGTACAAGAAGTACCAGACAAACAAGACCACAGGCAACACAGACAAG |
| | | AGAGCCTTCGTCGAGACCTGGCAGAGCTTCTACAGAAAGAAGCTGAAGGAGGT |
| | | GTGGAAGCCTGCCGTG |
| 19751 | DNA | CAGGAGATCAAGCGGATTAATAAAATTCGGAGAAGACTGGTGAAGGATTCTAA |
| | sequence | CACAAAGAAGGCTGGCAAGACAGGCCCTATGAAGACACTGCTGGTGAGAGTGA |
| | encoding | TGACACCCGACCTGAGAGAAAGACTGGAAAACCTGAGAAAGAAGCCTGAGAAT |
| | CasX 515 | ATCCCCCAGCCCATCAGCAACACAAGCCGGGCCAACCTGAATAAGCTGCTGAC |
| | | CGACTACACCGAAATGAAGAAGGCCATCCTGCACGTGTATTGGGAAGAGTTCC |
| | | AGAAAGACCCAGTCGGCCTGATGAGCAGAGTGGCTCAGCCTGCCAGCAAGAAG |
| | | ATCGATCAGAACAAGCTGAAGCCCGAAATGGACGAGAAGGGGAACCTGACAAC |
| | | CGCCGGCTTTGCCTGTAGCCAGTGCGGCCAGCCCCTGTTTGTGTACAAACTGG |
| | | AACAGGTGAGCGAAAAGGGCAAGGCTTACACGAATTACTTCGGCAGATGCAAC |
| | | GTGGCCGAGCACGAGAAGCTGATCCTGCTGGCCCAGCTGAAGCCTGAGAAGGA |
| | | TAGCGATGAGGCAGTGACATATTCCCTGGGCAAGTTCGGACAGCGGGCCCTGG |
| | | ATTTTTATTCCATTCATGTGACCAAGGAATCCACCCACCCCGTCAAGCCTCTT |
| | | GCCCAAATTGCCGGCAACAGATACGCCAGCGGCCCCGTGGGCAAGGCCCTGAG |
| | | CGACGCCTGTATGGGCACCATCGCCAGCTTCCTGTCTAAGTACCAGGACATTA |
| | | TCATCGAGCACCAGAAGGTGGTGAAGGGCAACCAGAAGAGACTGGAGAGCCTG |
| | | CGCGAGCTGGCCGGCAAGGAAAACCTGGAGTATCCTAGCGTGACCCTGCCTCC |
| | | TCAGCCTCATACAAAGGAGGGCGTGGATGCCTACAACGAAGTGATCGCCCGGG |
| | | TGCGGATGTGGGTGAACCTGAATCTGTGGCAGAAGCTGAAGCTGTCTAGAGAC |
| | | GACGCCAAGCCCCTGCTGAGACTGAAGGGCTTCCCCAGCTTCCCTCTGGTGGA |
| | | GAGACAGGCAAATGAAGTGGACTGGTGGGACATGGTGTGTAACGTGAAGAAGC |
| | | TGATCAATGAGAAGAAGGAGGACGGCAAAGTGTTCTGGCAGAATCTGGCCGGC |
| | | TACAAGCGTCAGGAGGCCCTGCGGCCCTACCTGAGCAGCGAGGAAGACAGAAA |
| | | GAAGGGCAAGAAGTTCGCCCGGTATCAGCTGGGGGACCTGCTGCTGCACCTCG |
| | | AGAAGAAGCACGGCGAAGACTGGGGGAAGGTGTACGATGAGGCCTGGGAGCGG |
| | | ATCGATAAGAAGGTGGAGGGCCTGAGCAAGCACATCAAGCTGGAGGAGGAACG |
| | | GAGATCTGAGGACGCCCAGAGCAAGGCCGCCCTGACCGACTGGCTGAGAGCCA |
| | | AGGCCAGCTTCGTCATCGAGGGGCTGAAGGAGGCCGACAAGGACGAGTTCTGC |
| | | CGGTGCGAACTGAAGCTGCAGAAGTGGTACGGAGATCTGAGAGGCAAACCTTT |
| | | CGCCATCGAGGCCGAGAACAGCATCCTGGACATCAGCGGCTTCAGCAAGCAGT |
| | | ACAACTGCGCCTTTATTTGGCAGAAGGACGGAGTGAAGAAGCTGAACCTGTAC |
| | | CTGATCATCAACTATTTCAAGGGCGGCAAGCTGAGATTCAAGAAGATCAAGCC |
| | | TGAAGCCTTCGAGGCCAACAGATTCTACACCGTGATTAACAAGAAAAGCGGAG |
| | | AGATCGTGCCAATGGAAGTGAACTTCAACTTCGACGACCCTAACCTGATCATC |
| | | CTGCCCCTGGCATTTGGCAAGCGGCAGGGCAGAGAGTTCATCTGGAACGACCT |
| | | GCTGTCTCTGGAGACCGGCAGCCTGAAGCTGGCCAACGGCAGAGTGATCGAGA |
| | | AGACACTGTACAACAGACGAACCAGACAAGACGAGCCCGCCCTGTTTGTGGCC |
| | | CTGACCTTCGAGAGAAGAGAGGTGCTGGACAGCAGCAATATCAAGCCTATGAA |
| | | CCTGATCGGCGTGGACCGGGGCGAGAACATCCCTGCCGTGATCGCCCTTACCG |
| | | ACCCCGAGGGATGCCCTCTGAGCCGGTTTAAAGACAGCCTGGGCAACCCTACC |
| | | CACATCCTGAGAATTGGCGAGTCCTACAAGGAGAAGCAGAGAACCATCCAGGC |
| | | CAAGAAGGAGGTGGAGCAGCGGCGGGCTGGCGGCTACTCCCGGAAGTACGCCA |
| | | GCAAGGCCAAGAACCTGGCCGACGACATGGTTAGAAATACCGCCAGAGACCTC |
| | | CTGTACTACGCTGTGACCCAGGACGCCATGCTGATCTTCGAGAACCTGAGCAG |
| | | AGGCTTCGGCAGACAGGGCAAGAGAACCTTCATGGCCGAGAGACAGTACACCC |
| | | GGATGGAGGACTGGCTGACCGCCAAGCTGGCCTACGAGGGCCTGCCCTCTAAG |
| | | ACCTACCTGTCCAAGACCTTGGCACAGTACACCAGCAAGACATGCTCTAACTG |
| | | CGGCTTCACAATCACGAGCGCCGACTACGACCGGGTGCTGGAGAAACTGAAGA |
| | | AGACCGCCACAGGCTGGATGACCACCATTAACGGCAAGGAGCTGAAGGTGGAG |
| | | GGCCAGATCACCTACTACAACAGGTACAAACGGCAGAACGTGGTGAAGGACCT |
| | | GAGCGTGGAACTGGATAGACTGAGCGAGGAAAGCGTAAACAATGACATCAGCA |
| | | GCTGGACCAAGGGCCGGAGCGGCGAGGCCCTGAGCCTGCTGAAGAAGAGATTC |
| | | TCCCACAGACCAGTGCAGGAGAAGTTCGTGTGTCTGAACTGCGGCTTCGAGAC |
| | | CCACGCCGACGAGCAAGCCGCCCTGAACATCGCCCGGTCTTGGCTTTTCCTGC |
| | | GGAGCCAGGAGTACAAGAAGTACCAGACAAACAAGACCACAGGCAACACAGAC |
| | | AAGAGAGCCTTCGTCGAGACCTGGCAGAGCTTCTACAGAAAGAAGCTGAAGGA |
| | | GGTGTGGAAGCCTGCCGTG |
| 19735 | DNA | CAGGAGATCAAGCGGATTAATAAAATTCGGAGAAGACTGGTGAAGGATTCTAA |
| | sequence | CACAAAGAAGGCTGGCAAGACACGGGGCCCTATGAAGACACTGCTGGTGAGAG |
| | encoding | TGATGACACCCGACCTGAGAGAAAGACTGGAAAACCTGAGAAAGAAGCCTGAG |
| | CasX 676 | AATATCCCCCAGCCCATCAGCAACACAAGCCGGGCCAACCTGAATAAGCTGCT |
| | | GACCGACTACACCGAAATGAAGAAGGCCATCCTGCACGTGTATTGGGAAGAGT |
| | | TCCAGAAAGACCCAGTCGGCCTGATGAGCAGAGTGGCTCAGCCTGCCAGCAAG |
| | | AAGATCGATCAGAACAAGCTGAAGCCCGAAATGGACGAGAAGGGGAACCTGAC |
| | | AACCGCCGGCTTTGCCTGTAGCCAGTGCGGCCAGCCCCTGTTTGTGTACAAAC |
| | | TGGAACAGGTGAGCGAAAAGGGCAAGGCTTACACGAATTACTTCGGCAGATGC |
| | | AACGTGGCCGAGCACGAGAAGCTGATCAAGCTGGCCCAGCTGAAGCCTGAGAA |
| | | GGATAGCGATGAGGCAGTGACATATTCCCTGGGCAAGTTCGGACAGCGGGCCC |
| | | TGGATTTTTATTCCATTCATGTGACCAAGGAATCCACCCACCCCGTCAAGCCT |
| | | CTTGCCCAAATTGCCGGCAACAGATACGCCTCCAGCCCCGTGGGCAAGGCCCT |
| | | GAGCGACGCCTGTATGGGCACCATCGCCAGCTTCCTGTCTAAGTACCAGGACA |
| | | TTATCATCGAGCACCAGAAGGTGGTGAAGGGCAACCAGAAGAGACTGGAGAGC |
| | | CTGCGCGAGCTGGCCGGCAAGGAAAACCTGGAGTATCCTAGCGTGACCCTGCC |
| | | TCCTCAGCCTCATACAAAGGAGGGCGTGGATGCCTACAACGAAGTGATCGCCC |
| | | GGGTGCGGATGTGGGTGAACCTGAATCTGTGGCAGAAGCTGAAGCTGTCTAGA |
| | | GACGACGCCAAGCCCCTGCTGAGACTGAAGGGCTTCCCCAGCTTCCCTCTGGT |
| | | GGAGAGACAGGCAAATGAAGTGGACTGGTGGGACATGGTGTGTAACGTGAAGA |
| | | AGCTGATCAATGAGAAGAAGGAGGACGGCAAAGTGTTCTGGCAGAATCTGGCC |
| | | GGCTACAAGCGTCAGGAGGCCCTGCGGCCCTACCTGAGCAGCGAGGAAGACAG |
| | | AAAGAAGGGCAAGAAGTTCGCCCGGTATCAGCTGGGGGACCTGCTGCTGCACC |
| | | TCGAGAAGAAGCACGGCGAAGACTGGGGGAAGGTGTACGATGAGGCCTGGGAG |
| | | CGGATCGATAAGAAGGTGGAGGGCCTGAGCAAGCACATCAAGCTGGAGGAGGA |
| | | ACGGAGATCTGAGGACGCCCAGAGCAAGGCCGCCCTGACCGACTGGCTGAGAG |
| | | CCAAGGCCAGCTTCGTCATCGAGGGGCTGAAGGAGGCCGACAAGGACGAGTTC |
| | | TGCCGGTGCGAACTGAAGCTGCAGAAGTGGTACGGAGATCTGAGAGGCAAACC |
| | | TTTCGCCATCGAGGCCGAGAACAGCATCCTGGACATCAGCGGCTTCAGCAAGC |
| | | AGTACAACTGCGCCTTTATTTGGCAGAAGGACGGAGTGAAGAAGCTGAACCTG |
| | | TACCTGATCATCAACTATTTCAAGGGCGGCAAGCTGAGATTCAAGAAGATCAA |
| | | GCCTGAAGCCTTCGAGGCCAACAGATTCTACACCGTGATTAACAAGAAAAGCG |
| | | GAGAGATCGTGCCAATGGAAGTGAACTTCAACTTCGACGACCCTAACCTGATC |
| | | ATCCTGCCCCTGGCATTTGGCAAGCGGCAGGGCAGAGAGTTCATCTGGAACGA |
| | | CCTGCTGTCTCTGGAGACCGGCAGCCTGAAGCTGGCCAACGGCAGAGTGATCG |
| | | AGAAGACACTGTACAACAGACGAACCAGACAAGACGAGCCCGCCCTGTTTGTG |
| | | GCCCTGACCTTCGAGAGAAGAGAGGTGCTGGACAGCAGCAATATCAAGCCTAT |
| | | GAACCTGATCGGCGTGGACCGGGGCGAGAACATCCCTGCCGTGATCGCCCTTA |
| | | CCGACCCCGAGGGATGCCCTCTGAGCCGGTTTAAAGACAGCCTGGGCAACCCT |
| | | ACCCACATCCTGAGAATTGGCGAGTCCTACAAGGAGAAGCAGAGAACCATCCA |
| | | GGCCAAGAAGGAGGTGGAGCAGCGGCGGGCTGGCGGCTACTCCCGGAAGTACG |
| | | CCAGCAAGGCCAAGAACCTGGCCGACGACATGGTTAGAAATACCGCCAGAGAC |
| | | CTCCTGTACTACGCTGTGACCCAGGACGCCATGCTGATCTTCGAGAACCTGAG |
| | | CAGAGGCTTCGGCAGACAGGGCAAGAGAACCTTCATGGCCGAGAGACAGTACA |
| | | CCCGGATGGAGGACTGGCTGACCGCCAAGCTGGCCTACGAGGGCCTGCCCTCT |
| | | AAGACCTACCTGTCCAAGACCTTGGCACAGTACACCAGCAAGACATGCTCTAA |
| | | CTGCGGCTTCACAATCACGAGCGCCGACTACGACCGGGTGCTGGAGAAACTGA |
| | | AGAAGACCGCCACAGGCTGGATGACCACCATTAACGGCAAGGAGCTGAAGGTG |
| | | GAGGGCCAGATCACCTACTACAACAGGTACAAACGGCAGAACGTGGTGAAGGA |
| | | CCTGAGCGTGGAACTGGATAGACTGAGCGAGGAAAGCGTAAACAATGACATCA |
| | | GCAGCTGGACCAAGGGCCGGAGCGGCGAGGCCCTGAGCCTGCTGAAGAAGAGA |
| | | TTCTCCCACAGACCAGTGCAGGAGAAGTTCGTGTGTCTGAACTGCGGCTTCGA |
| | | GACCCACGCCGACGAGCAAGCCGCCCTGAACATCGCCCGGTCTTGGCTTTTCC |
| | | TGCGGAGCCAGGAGTACAAGAAGTACCAGACAAACAAGACCACAGGCAACACA |
| | | GACAAGAGAGCCTTCGTCGAGACCTGGCAGAGCTTCTACAGAAAGAAGCTGAA |
| | | GGAGGTGTGGAAGCCTGCCGTG |
| 19752 | DNA | CAGGAGATCAAGCGGATTAATAAAATTCGGAGAAGACTGGTGAAGGATTCTAA |
| | sequence | CACAAAGAAGGCTGGCAAGACAGGCCCTATGAAGACACTGCTGGTGAGAGTGA |
| | encoding | TGACACCCGACCTGAGAGAAAGACTGGAAAACCTGAGAAAGAAGCCTGAGAAT |
| | CasX 812 | ATCCCCCAGCCCATCAGCAACACAAGCCGGGCCAACCTGAATAAGCTGCTGAC |
| | | CGACTACACCGAAATGAAGAAGGCCATCCTGCACGTGTATTGGGAAGAGTTCC |
| | | AGAAAGACCCAGTCGGCCTGATGAGCAGAGTGGCTCAGCCTGCCAGCAAGAAG |
| | | ATCGATCAGAACAAGCTGAAGCCCGAAATGGACGAGAAGGGGAACCTGACAAC |
| | | CGCCGGCTTTGCCTGTAGCCAGTGCGGCCAGCCCCTGTTTGTGTACAAACTGG |
| | | AACAGGTGAGCGAAAAGGGCAAGGCTTACACGAATTACTTCGGCAGATGCAAC |
| | | GTGGCCGAGCACGAGAAGCTGATCCTGCTGGCCCAGCTGAAGCCTGAGAAGGA |
| | | TAGCGATGAGGCAGTGACATATTCCCTGGGCAAGTTCGGACAGCGGGCCCTGG |
| | | ATTTTTATTCCATTCATGTGACCAAGGAATCCACCCACCCCGTCAAGCCTCTT |
| | | GCCCAAATTGCCGGCAACAGATACGCCAGCGGCCCCGTGGGCAAGGCCCTGAG |
| | | CGACGCCTGTATGGGCACCATCGCCAGCTTCCTGTCTAAGTACCAGGACATTA |
| | | TCATCGAGCACCAGAAGGTGGTGAAGGGCAACCAGAAGAGACTGGAGAGCCTG |
| | | CGCGAGCTGGCCGGCAAGGAAAACCTGGAGTATCCTAGCGTGACCCTGCCTCC |
| | | TCAGCCTCATACAAAGGAGGGCGTGGATGCCTACAACGAAGTGATCGCCCGGG |
| | | TGCGGATGTGGGTGAACCTGAATCTGTGGCAGAAGCTGAAGCTGTCTAGAGAC |
| | | GACGCCAAGCCCCTGCTGAGACTGAAGAAGTTCCCCAGCTTCCCTCTGGTGGA |
| | | GAGACAGGCAAATGAAGTGGACTGGTGGGACATGGTGTGTAACGTGAAGAAGC |
| | | TGATCAATGAGAAGAAGGAGGACGGCAAAGTGTTCTGGCAGAATCTGGCCGGC |
| | | TACAAGCGTCAGGAGGCCCTGCGGCCCTACCTGAGCAGCGAGGAAGACAGAAA |
| | | GAAGGGCAAGAAGTTCGCCCGGTATCAGCTGGGGGACCTGCTGCTGCACCTCG |
| | | AGAAGAAGCACGGCGAAGACTGGGGGAAGGTGTACGATGAGGCCTGGGAGCGG |
| | | ATCGATAAGAAGGTGGAGGGCCTGAGCAAGCACATCAAGCTGGAGGAGGAACG |
| | | GAGATCTGAGGACGCCCAGAGCAAGGCCGCCCTGACCGACTGGCTGAGAGCCA |
| | | AGGCCAGCTTCGTCATCGAGGGGCTGAAGGAGGCCGACAAGGACGAGTTCTGC |
| | | CGGTGCGAACTGAAGCTGCAGAAGTGGTACGGAGATCTGAGAGGCAAACCTTT |
| | | CGCCATCGAGGCCGAGAACAGCATCCTGGACATCAGCGGCTTCAGCAAGCAGT |
| | | ACAACTGCGCCTTTATTTGGCAGAAGGACGGAGTGAAGAAGCTGAACCTGTAC |
| | | CTGATCATCAACTATTTCAAGGGCGGCAAGCTGAGATTCAAGAAGATCAAGCC |
| | | TGAAGCCTTCGAGGCCAACAGATTCTACACCGTGATTAACAAGAAAAGCGGAG |
| | | AGATCGTGCCAATGGAAGTGAACTTCAACTTCGACGACCCTAACCTGATCATC |
| | | CTGCCCCTGGCATTTGGCAAGCGGCAGGGCAGAGAGTTCATCTGGAACGACCT |
| | | GCTGTCTCTGGAGACCGGCAGCCTGAAGCTGGCCAACGGCAGAGTGATCGAGA |
| | | AGACACTGTACAACAGACGAACCAGACAAGACGAGCCCGCCCTGTTTGTGGCC |
| | | CTGACCTTCGAGAGAAGAGAGGTGCTGGACAGCAGCAATATCAAGCCTATGAA |
| | | CCTGATCGGCGTGGACCGGGGCGAGAACATCCCTGCCGTGATCGCCCTTACCG |
| | | ACCCCGAGGGATGCCCTCTGAGCCGGTTTAAAGACAGCCTGGGCAACCCTACC |
| | | CACATCCTGAGAATTGGCGAGTCCTACAAGGAGAAGCAGAGAACCATCCAGGC |
| | | CAAGAAGGAGGTGGAGCAGCGGCGGGCTGGCGGCTACTCCCGGAAGTACGCCA |
| | | GCAAGGCCAAGAACCTGGCCGACGACATGGTTAGAAATACCGCCAGAGACCTC |
| | | CTGTACTACGCTGTGACCCAGGACGCCATGCTGATCTTCGAGAACCTGAGCAG |
| | | AGGCTTCGGCAGACAGGGCAAGAGAACCTTCATGGCCGAGAGACAGTACACCC |
| | | GGATGGAGGACTGGCTGACCGCCAAGCTGGCCTACGAGGGCCTGCCCTCTAAG |
| | | ACCTACCTGTCCAAGACCTTGGCACAGTACACCAGCAAGACATGCTCTAACTG |
| | | CGGCTTCACAATCACGAGCGCCGACTACGACCGGGTGCTGGAGAAACTGAAGA |
| | | AGACCGCCACAGGCTGGATGACCACCATTAACGGCAAGGAGCTGAAGGTGGAG |
| | | GGCCAGATCACCTACTACAACAGGTACAAACGGCAGAACGTGGTGAAGGACCT |
| | | GAGCGTGGAACTGGATAGACTGAGCGAGGAAAGCGTAAACAATGACATCAGCA |
| | | GCTGGACCAAGGGCCGGAGCGGCGAGGCCCTGAGCCTGCTGAAGAAGAGATTC |
| | | TCCCACAGACCAGTGCAGGAGAAGTTCGTGTGTCTGAACTGCGGCTTCGAGAC |
| | | CCACGCCGACGAGCAAGCCGCCCTGAACATCGCCCGGTCTTGGCTTTTCCTGC |
| | | GGAGCCAGGAGTACAAGAAGTACCAGACAAACAAGACCACAGGCAACACAGAC |
| | | AAGAGAGCCTTCGTCGAGACCTGGCAGAGCTTCTACAGAAAGAAGCTGAAGGA |
| | | GGTGTGGAAGCCTGCCGTG |

*‘mΨ’ = N1-methyl-pseudouridine

[0145] Various naturally-occurring or modified nucleosides may be used to produce mRNAs according to the present disclosure. In some embodiments, an mRNA is or comprises natural nucleosides (e.g., adenosine, guanosine, cytidine, uridine); nucleoside analogs (e.g., 2-aminoadenosine, 2-thiothymidine, inosine, pyrrolo-pyrimidine, 3-methyl adenosine, 5-methylcytidine, C-5 propynyl-cytidine, C-5 propynyl-uridine, 2-aminoadenosine, C5-bromouridine, C5-fluorouridine, C5-iodouridine, C5-propynyl-uridine, C5-propynyl-cytidine, C5-methylcytidine, 2-aminoadenosine, 7-deazaadenosine, 7-deazaguanosine, 8-oxoadenosine, 8-oxoguanosine, O (6)-methylguanine, pseudouridine, (e.g., N-1-methyl-pseudouridine), 2-thiouridine, and 2-thiocytidine); chemically modified bases; biologically modified bases (e.g., methylated bases); intercalated bases; modified sugars (e.g., 2′-fluororibose, ribose, 2′-deoxyribose, arabinose, and hexose); and/or modified phosphate groups (e.g., phosphorothioates and 5′-N-phosphoramidite linkages). In some embodiments, the mRNA comprises one or more nonstandard nucleotide residues. The nonstandard nucleotide residues may include, e.g., 5-methyl-cytidine (“5 mC”), N1-methyl-pseudouridine (“mų”), and/or 2-thio-uridine (“2sU”). In a particular embodiment, one or more of the uridine residues of the mRNA of the disclosure are replaced with N1-methyl-pseudouridine. See, e.g., U.S. Pat. No. 8,278,036 or WO2011012316, incorporated by reference herein, for a discussion of such residues and their incorporation into mRNA. In some embodiments, the mRNA encoding the engineered CasX protein of the disclosure has N1-methyl-pseudouridine nucleosides replacing one or more, or all uridines in the mRNA sequence portion encoding the engineered CasX protein. In some embodiments, the mRNA encoding the engineered CasX protein of the disclosure has N1-methyl-pseudouridine nucleosides replacing one or more, or all uridines in the sequence encoding the engineered CasX protein and one or more additional sequences of the mRNA; e.g., the UTR. In some embodiments, the mRNA encoding the engineered CasX protein of the disclosure has NI-methyl-pseudouridine nucleosides replacing one or more, or all uridines (from the 5′ end to the 3′ end) in the complete mRNA sequence. See, e.g., U.S. Pat. No. 8,278,036 or WO2011012316, incorporated by reference herein, for a discussion of such residues and their incorporation into mRNA. n some embodiments, the mRNA encoding CasX 515 has NI-methyl-pseudouridine nucleosides replacing one or more, or all uridines in the mRNA sequence. In some embodiments, the mRNA encoding CasX 812 has NI-methyl-pseudouridine nucleosides replacing one or more, or all uridines in the mRNA sequence. In some embodiments, the mRNA encoding CasX 491 has N1-methyl-pseudouridine nucleosides replacing one or more, or all uridines in the mRNA sequence. In some embodiments, the mRNA encoding CasX 676 has N1-methyl-pseudouridine nucleosides replacing one or more, or all uridines in the mRNA sequence.

[0146] In some embodiments, the mRNA sequence encoding the engineered CasX protein comprises the sequence of SEQ ID NO: 19817, or a sequence having at least about 50%, at least about 60%, at least about 70%, at least about 80%, at least about 90%, at least about 95%, at least about 95%, at least about 96%, at least about 97%, at least about 98%, or at least about 99% sequence identity thereto. In some embodiments, the mRNA sequence encoding the engineered CasX protein comprises the sequence of SEQ ID NO: 19817. In some embodiments, the mRNA sequence encoding the engineered CasX protein consists of the sequence of SEQ ID NO: 19817. In some embodiments, the mRNA sequence encoding the engineered CasX protein comprises the sequence of SEQ ID NO: 19818, or a sequence having at least about 50%, at least about 60%, at least about 70%, at least about 80%, at least about 90%, at least about 95%, at least about 95%, at least about 96%, at least about 97%, at least about 98%, or at least about 99% sequence identity thereto. In some embodiments, the mRNA sequence encoding the engineered CasX protein comprises the sequence of SEQ ID NO: 19818. In some embodiments, the mRNA sequence encoding the engineered CasX protein consists of the sequence of SEQ ID NO: 19818. In some embodiments, the mRNA sequence encoding the engineered CasX protein comprises the sequence of SEQ ID NO: 19819, or a sequence having at least about 50%, at least about 60%, at least about 70%, at least about 80%, at least about 90%, at least about 95%, at least about 95%, at least about 96%, at least about 97%, at least about 98%, or at least about 99% sequence identity thereto. In some embodiments, the mRNA sequence encoding the engineered CasX protein comprises the sequence of SEQ ID NO: 19819. In some embodiments, the mRNA sequence encoding the engineered CasX protein consists of the sequence of SEQ ID NO: 19819. In some embodiments, the mRNA sequence encoding the engineered CasX protein comprises the sequence of SEQ ID NO: 19820, or a sequence having at least about 50%, at least about 60%, at least about 70%, at least about 80%, at least about 90%, at least about 95%, at least about 95%, at least about 96%, at least about 97%, at least about 98%, or at least about 99% sequence identity thereto. In some embodiments, the mRNA sequence encoding the engineered CasX protein comprises the sequence of SEQ ID NO: 19820. In some embodiments, the mRNA sequence encoding the engineered CasX protein consists of the sequence of SEQ ID NO: 19820. In some embodiments, the DNA sequence encoding the engineered CasX protein is selected from the group consisting of SEQ ID NOS: 19735, 19751, 19752, and 19816.

### f. 5′ Untranslated Region (UTR)

[0147] The 5′ UTR of an mRNA molecule can be a key determinant of both the stability of the mRNA and how efficiently it is translated into protein. Specifically, the 5′ UTR, in conjunction with the 5′ cap structure, serves as a binding site and recruitment platform for the translation pre-initiation complex as well as additional regulatory proteins that may positively or negatively affect translation. Structures within the 5′ UTR can enhance translation by recruiting initiation factors or other protein or RNA factors, reduce translation by physically blocking ribosome binding and scanning, and contribute to the stability of the mRNA by affecting both hydrolysis and nuclease digestion. An exemplary 5′ UTR sequence for use in the mRNA of the disclosure is provided in Table 7. Table 7 lists the RNA sequence, RNA sequence with N1-methylpseudouridine substituted in place of uridine, and DNA sequence of the 5′ UTR.

TABLE 7
5′ UTR sequences

| SEQ ID | Nucleic Acid | |
|---|---|---|
| NO | Sequence* | Description |
| 19821 | AAAUAAGAGAGAAAAG | RNA sequence |
| | AAGAGUAAGAAGAAAU | of 5′ UTR |
| | AUAAGA | |
| 19822 | AAAmψAAGAGAGAAAA | N1-methylpseudouridine |
| | GAAGAGmψAAGAAGAA | substituted |
| | AmψAmψAAGA | RNA sequence |
| | | of 5′ UTR |
| 19823 | AAATAAGAGAGAAAAG | DNA sequence |
| | AAGAGTAAGAAGAAAT | encoding 5′ |
| | ATAAGA | UTR |

*‘mψ’ = N1-methyl-pseudouridine

### g. 5′ Cap

[0148] In some embodiments of the mRNA of the disclosure, the mRNA comprises a 5′ cap linked 5′ to the 5′ UTR of the mRNA sequence of any of the embodiments described herein. In some embodiments, the 5′ cap is a 7-methylguanylate cap. In some embodiments, the 5′ cap has the nucleic acid sequence of m7G (5) ppp (5′) mAG. In other embodiments, the 5′ cap has the nucleic acid sequence of m7G (5′) ppp (5′ (A,G (5′) ppp (5′) A or G (5′) ppp (5′) G.

### h. 3′ UTR

[0149] 3′ UTR sequences can have a significant impact on mRNA stability and translation efficiency, and can determine both subcellular localization and tissue-specific expression. Factors influencing these properties include microRNA binding sites, AU-rich elements that recruit an array of RNA-binding proteins, Pumilio binding elements, and other binding sites for RNA-binding proteins. While many of these interactions with the 3′ UTR are known to negatively impact stability or expression, some can enhance translation. The effects of a 3′ UTR sequence can be highly cell-type specific due to differential expression of microRNAs and RNA binding proteins, which provides opportunities for engineering tissue-specific expression into a therapeutic mRNA. In some embodiments, the 3′ UTR for use in the mRNA of the disclosure is a mouse 3′ UTR. In some embodiments, the 3′ UTR is a mouse HBA gene 3′ UTR.

[0150] An exemplary 3′ UTR sequence for use in the mRNA of the disclosure is provided in Table 8. Table 8 lists the RNA sequence, RNA sequence with NI-methylpseudouridine substituted in place of uridine, and DNA sequence of the 3′ UTR.

TABLE 8
3′ UTR sequences

| SEQ ID | Nucleic Acid | |
|---|---|---|
| NO | Sequence* | Description |
| 19824 | GCUGCCUUCUGCGGGGC | RNA sequence of 3′ |
| | UUGCCUUCUGGCCAUGC | UTR |
| | CCUUCUUCUCUCCCUUG | |
| | CACCUGUACCUCUUGGU | |
| | CUUUGAAUAAAGCCUGA | |
| | GUAGGAAG | |
| 19825 | GCmψGCCmψmψCmψGCG | N1- |
| | GGGCmψmψGCCmψmψCm | methylpseudouridine |
| | ψGGCCAmψGCCCmψmψC | substituted RNA |
| | mψmψCmψCmψCCCmψmψ | sequence of 3′ UTR |
| | GCACCmψGmψACCmψCm | |
| | ψmψGGmψCmψmψmψGAA | |
| | mψAAAGCCmψGAGmψAG | |
| | GAAG | |
| 19740 | GCTGCCTTCTGCGGGGCT | DNA sequence |
| | TGCCTTCTGGCCATGCCC | encoding 3′ UTR |
| | TTCTTCTCTCCCTTGCAC | |
| | CTGTACCTCTTGGTCTTT | |
| | GAATAAAGCCTGAGTAGG | |
| | AAG | |

*‘mψ’ = N1-methyl-pseudouridine

[0151] In some embodiments, the 3′ UTR for use in the mRNA of the disclosure comprises the sequence of SEQ ID NO: 19824, or a sequence having at least about 50%, at least about 60%, at least about 70%, at least about 80%, at least about 90%, at least about 95%, or at least about 99% identity thereto. In some embodiments, the 3′ UTR comprises the sequence of SEQ ID NO: 19824. In some embodiments, the 3′ UTR consists of the sequence of SEQ ID NO: 19824. In some embodiments, the 3′ UTR comprises the sequence of SEQ ID NO: 19825, or a sequence having at least about 50%, at least about 60%, at least about 70%, at least about 80%, at least about 90%, at least about 95%, or at least about 99% identity thereto. In some embodiments, the 3′ UTR comprises the sequence of SEQ ID NO: 19825. In some embodiments, the 3′ UTR consists of the sequence of SEQ ID NO: 19825.

i. Poly (A) Sequence

[0152] Inclusion of a 3′ poly(A) tail in mRNA constructs can contribute to mRNA stability and translation efficiency. Generally, longer poly (A) tails are associated with increased mRNA stability, thereby allowing their translation and promoting high protein expression.

[0153] In some embodiments, the mRNAs of the disclosure comprise a poly (A) sequence. In some embodiments, the poly(A) sequence comprises at least about 40, at least about 50, at least about 60, at least about 70, at least about 80, at least about 90, at least about 100, at least about 110, at least about 120, at least about 130, at least about 140, at least about 150, at least about 160, at least about 170, at least about 180, at least about 185, or at least about 190 adenine nucleotides. In some embodiments, the poly(A) sequence comprises about 40-190 adenine nucleotides. In some embodiments, the poly(A) sequence comprises about 50-150 adenine nucleotides. In some embodiments, the poly(A) sequence comprises about 70-90 adenine nucleotides. In some embodiments, the poly(A) sequence comprises about 78-82 adenine nucleotides. In some embodiments, the poly(A) sequence comprises 80 adenine nucleotides.

[0154] In some embodiments, the poly(A) sequence comprises the nucleic acid sequence of AAAAAAAAAAAAAAAAAAAAAAAAAAAAAAAAAAAAAAAAAAAAAAAAAAAA AAAAAAAAAAAAAAAAAAAAAAAAAAAA (SEQ ID NO: 19738). In some embodiments, the poly(A) sequence comprises 79 adenine nucleotides. In some embodiments, the poly(A) sequence comprises the nucleic acid sequence of AAAAAAAAAAAAAAAAAAAAAAAAAAAAAAAAAAAAAAAAAAAAAAAAAAAA AAAAAAAAAAAAAAAAAAAAAAAAAAA (SEQ ID NO: 19826).

j. mRNA Sequences of the Systems

[0155] The disclosure provides systems comprising mRNA sequences comprising the following components in 5′ to 3′ orientation; a 5′ UTR; a start codon; a sequence encoding a CasX protein; a stop codon; and a 3′ UTR. In some embodiments, the mRNA sequences comprise the following components in 5′ to 3′ orientation: a 5′ UTR; a start codon; an NLS; a sequence encoding a CasX protein; a stop codon; and a 3′ UTR. In some embodiments, the mRNA sequences comprise the following components in 5′ to 3′ orientation; a 5′ UTR; a start codon; a sequence encoding a CasX protein; an NLS; a stop codon; and a 3′ UTR. In some embodiments, the mRNA sequences comprise the following components in 5′ to 3′ orientation; a 5′ UTR; a start codon; an NLS; a sequence encoding a CasX protein; an NLS; a stop codon; and a 3′ UTR. In other cases, the mRNA comprises the following components in 5′ to 3′ orientation; a 5′ cap; a 5′ UTR; a start codon; an NLS; a sequence encoding a CasX protein; a stop codon; a 3′ UTR; and a poly (A) sequence. In some embodiments, the mRNA comprises the following components in 5′ to 3′ orientation; a 5′ cap; a 5′ UTR; a start codon; a sequence encoding a CasX protein; an NLS; a stop codon; a 3′ UTR; and a poly (A) sequence. In some embodiments, the mRNA comprises the following components in 5′ to 3′ orientation; a 5′ cap; a 5′ UTR; a start codon; an NLS; a sequence encoding a CasX protein; an NLS; a stop codon; a 3′ UTR; and a poly (A) sequence. In other cases, the mRNA comprises the following components in 5′ to 3′ orientation: a 5′ cap; a 5′ UTR; a start codon; a sequence encoding a CasX protein; a stop codon; a 3′ UTR; and a poly (A) sequence. In some embodiments, the mRNA has N1-methyl-pseudouridine nucleosides replacing one or more, or all uridines in the complete mRNA sequence.

[0156] In some embodiments, the disclosure provides an mRNA sequence comprising the sequence of SEQ ID NO: 19830 or SEQ ID NO: 19834, or a sequence having at least about 70%, at least about 80%, at least about 90%, at least about 95%, at least about 95%, at least about 96%, at least about 97%, at least about 98%, or at least about 99% sequence identity thereto. In some embodiments, the disclosure provides an mRNA sequence comprising the sequence of SEQ ID NO: 19831 or SEQ ID NO: 19835, or a sequence having at least about 70%, at least about 80%, at least about 90%, at least about 95%, at least about 95%, at least about 96%, at least about 97%, at least about 98%, or at least about 99% sequence identity thereto. In some embodiments, the disclosure provides an mRNA sequence comprising the sequence of SEQ ID NO: 19832 or SEQ ID NO: 19836, or a sequence having at least about 70%, at least about 80%, at least about 90%, at least about 95%, at least about 95%, at least about 96%, at least about 97%, at least about 98%, or at least about 99% sequence identity thereto. In some embodiments, the disclosure provides an mRNA sequence comprising the sequence of SEQ ID NO: 19833 or SEQ ID NO: 19837, or a sequence having at least about 70%, at least about 80%, at least about 90%, at least about 95%, at least about 95%, at least about 96%, at least about 97%, at least about 98%, or at least about 99% sequence identity thereto.

[0157] Exemplary full-length mRNA sequences are provided in Table 9. Table 9 lists the RNA sequences, RNA sequences with N1-methylpseudouridine substituted in place of uridine, and DNA sequences of the mRNAs. The sequences in Table 9 include, from 5′ to 3′, AGG nucleotides 5′ of the 5′ UTR, a 5′ UTR, GCCACC (SEQ ID NO: 19829) nucleotides, a start codon, a sequence encoding a c-MYC NLS, a sequence encoding a linker, a sequence encoding CasX, a sequence encoding a linker, a sequence encoding a c-MYC NLS, a stop codon, a 3′ UTR, and a sequence corresponding to a partial XbaI restriction site (UCUAG, SEQ ID NO: 19827; myCmyAG, SEQ ID NO: 19828; or TCTAG, SEQ ID NO: 19741, for RNA, N1-methylpseudouridine substituted RNA, and DNA sequences, respectively).

TABLE 9
Exemplary full-length mRNA sequences encoding CasX

| SEQ | | |
|---|---|---|
| ID NO | Nucleotide Sequence* | Description |
| 19830 | AGGAAAUAAGAGAGAAAAGAAGAGUAAGAAGAAAUAUAAGAGCCACCAUGGCCCC | Full-length |
| | UGCUGCCAAGAGAGUGAAGCUGGAUAGCAGACAGGAGAUCAAGCGGAUUAAUAAA | RNA |
| | AUUCGGAGAAGACUGGUGAAGGAUUCUAACACAAAGAAGGCUGGCAAGACAGGCC | sequence |
| | CUAUGAAGACACUGCUGGUGAGAGUGAUGACACCCGACCUGAGAGAAAGACUGGA | of mRNA |
| | AAACCUGAGAAAGAAGCCUGAGAAUAUCCCCCAGCCCAUCAGCAACACAAGCCGG | encoding |
| | GCCAACCUGAAUAAGCUGCUGACCGACUACACCGAAAUGAAGAAGGCCAUCCUGC | CasX 491 |
| | ACGUGUAUUGGGAAGAGUUCCAGAAAGACCCAGUCGGCCUGAUGAGCAGAGUGGC | |
| | UCAGCCUGCCAGCAAGAAGAUCGAUCAGAACAAGCUGAAGCCCGAAAUGGACGAG | |
| | AAGGGGAACCUGACAACCGCCGGCUUUGCCUGUAGCCAGUGCGGCCAGCCCCUGU | |
| | UUGUGUACAAACUGGAACAGGUGAGCGAAAAGGGCAAGGCUUACACGAAUUACUU | |
| | CGGCAGAUGCAACGUGGCCGAGCACGAGAAGCUGAUCCUGCUGGCCCAGCUGAAG | |
| | CCUGAGAAGGAUAGCGAUGAGGCAGUGACAUAUUCCCUGGGCAAGUUCGGACAGC | |
| | GGGCCCUGGAUUUUUAUUCCAUUCAUGUGACCAAGGAAUCCACCCACCCCGUCAA | |
| | GCCUCUUGCCCAAAUUGCCGGCAACAGAUACGCCAGCGGCCCCGUGGGCAAGGCC | |
| | CUGAGCGACGCCUGUAUGGGCACCAUCGCCAGCUUCCUGUCUAAGUACCAGGACA | |
| | UUAUCAUCGAGCACCAGAAGGUGGUGAAGGGCAACCAGAAGAGACUGGAGAGCCU | |
| | GCGCGAGCUGGCCGGCAAGGAAAACCUGGAGUAUCCUAGCGUGACCCUGCCUCCU | |
| | CAGCCUCAUACAAAGGAGGGCGUGGAUGCCUACAACGAAGUGAUCGCCCGGGUGC | |
| | GGAUGUGGGUGAACCUGAAUCUGUGGCAGAAGCUGAAGCUGUCUAGAGACGACGC | |
| | CAAGCCCCUGCUGAGACUGAAGGGCUUCCCCAGCUUCCCUCUGGUGGAGAGACAG | |
| | GCAAAUGAAGUGGACUGGUGGGACAUGGUGUGUAACGUGAAGAAGCUGAUCAAUG | |
| | AGAAGAAGGAGGACGGCAAAGUGUUCUGGCAGAAUCUGGCCGGCUACAAGCGUCA | |
| | GGAGGCCCUGCGGCCCUACCUGAGCAGCGAGGAAGACAGAAAGAAGGGCAAGAAG | |
| | UUCGCCCGGUAUCAGCUGGGGGACCUGCUGCUGCACCUCGAGAAGAAGCACGGCG | |
| | AAGACUGGGGGAAGGUGUACGAUGAGGCCUGGGAGCGGAUCGAUAAGAAGGUGGA | |
| | GGGCCUGAGCAAGCACAUCAAGCUGGAGGAGGAACGGAGAUCUGAGGACGCCCAG | |
| | AGCAAGGCCGCCCUGACCGACUGGCUGAGAGCCAAGGCCAGCUUCGUCAUCGAGG | |
| | GGCUGAAGGAGGCCGACAAGGACGAGUUCUGCCGGUGCGAACUGAAGCUGCAGAA | |
| | GUGGUACGGAGAUCUGAGAGGCAAACCUUUCGCCAUCGAGGCCGAGAACAGCAUC | |
| | CUGGACAUCAGCGGCUUCAGCAAGCAGUACAACUGCGCCUUUAUUUGGCAGAAGG | |
| | ACGGAGUGAAGAAGCUGAACCUGUACCUGAUCAUCAACUAUUUCAAGGGCGGCAA | |
| | GCUGAGAUUCAAGAAGAUCAAGCCUGAAGCCUUCGAGGCCAACAGAUUCUACACC | |
| | GUGAUUAACAAGAAAAGCGGAGAGAUCGUGCCAAUGGAAGUGAACUUCAACUUCG | |
| | ACGACCCUAACCUGAUCAUCCUGCCCCUGGCAUUUGGCAAGCGGCAGGGCAGAGA | |
| | GUUCAUCUGGAACGACCUGCUGUCUCUGGAGACCGGCAGCCUGAAGCUGGCCAAC | |
| | GGCAGAGUGAUCGAGAAGACACUGUACAACAGACGAACCAGACAAGACGAGCCCG | |
| | CCCUGUUUGUGGCCCUGACCUUCGAGAGAAGAGAGGUGCUGGACAGCAGCAAUAU | |
| | CAAGCCUAUGAACCUGAUCGGCGUGGACCGGGGCGAGAACAUCCCUGCCGUGAUC | |
| | GCCCUUACCGACCCCGAGGGAUGCCCUCUGAGCCGGUUUAAAGACAGCCUGGGCA | |
| | ACCCUACCCACAUCCUGAGAAUUGGCGAGUCCUACAAGGAGAAGCAGAGAACCAU | |
| | CCAGGCCAAGAAGGAGGUGGAGCAGCGGCGGGCUGGCGGCUACUCCCGGAAGUAC | |
| | GCCAGCAAGGCCAAGAACCUGGCCGACGACAUGGUUAGAAAUACCGCCAGAGACC | |
| | UCCUGUACUACGCUGUGACCCAGGACGCCAUGCUGAUCUUCGAGAACCUGAGCAG | |
| | AGGCUUCGGCAGACAGGGCAAGAGAACCUUCAUGGCCGAGAGACAGUACACCCGG | |
| | AUGGAGGACUGGCUGACCGCCAAGCUGGCCUACGAGGGCCUGUCUAAGACCUACC | |
| | UGUCCAAGACCUUGGCACAGUACACCAGCAAGACAUGCUCUAACUGCGGCUUCAC | |
| | AAUCACGAGCGCCGACUACGACCGGGUGCUGGAGAAACUGAAGAAGACCGCCACA | |
| | GGCUGGAUGACCACCAUUAACGGCAAGGAGCUGAAGGUGGAGGGCCAGAUCACCU | |
| | ACUACAACAGGUACAAACGGCAGAACGUGGUGAAGGACCUGAGCGUGGAACUGGA | |
| | UAGACUGAGCGAGGAAAGCGUAAACAAUGACAUCAGCAGCUGGACCAAGGGCCGG | |
| | AGCGGCGAGGCCCUGAGCCUGCUGAAGAAGAGAUUCUCCCACAGACCAGUGCAGG | |
| | AGAAGUUCGUGUGUCUGAACUGCGGCUUCGAGACCCACGCCGACGAGCAAGCCGC | |
| | CCUGAACAUCGCCCGGUCUUGGCUUUUCCUGCGGAGCCAGGAGUACAAGAAGUAC | |
| | CAGACAAACAAGACCACAGGCAACACAGACAAGAGAGCCUUCGUCGAGACCUGGC | |
| | AGAGCUUCUACAGAAAGAAGCUGAAGGAGGUGUGGAAGCCUGCCGUGGGAAGCCC | |
| | CGCUGCCAAGAGAGUGAAGCUGGACUAAGCUGCCUUCUGCGGGGCUUGCCUUCUG | |
| | GCCAUGCCCUUCUUCUCUCCCUUGCACCUGUACCUCUUGGUCUUUGAAUAAAGCC | |
| | UGAGUAGGAAGUCUAGAAAAAAAAAAAAAAAAAAAAAAAAAAAAAAAAAAAAAAA | |
| | AAAAAAAAAAAAAAAAAAAAAAAAAAAAAAAAAAAAAAAA | |
| 19831 | AGGAAAUAAGAGAGAAAAGAAGAGUAAGAAGAAAUAUAAGAGCCACCAUGGCCCC | Full-length |
| | UGCUGCCAAGAGAGUGAAGCUGGAUAGCAGACAGGAGAUCAAGCGGAUUAAUAAA | RNA |
| | AUUCGGAGAAGACUGGUGAAGGAUUCUAACACAAAGAAGGCUGGCAAGACAGGCC | sequence |
| | CUAUGAAGACACUGCUGGUGAGAGUGAUGACACCCGACCUGAGAGAAAGACUGGA | of mRNA |
| | AAACCUGAGAAAGAAGCCUGAGAAUAUCCCCCAGCCCAUCAGCAACACAAGCCGG | encoding |
| | GCCAACCUGAAUAAGCUGCUGACCGACUACACCGAAAUGAAGAAGGCCAUCCUGC | CasX 515 |
| | ACGUGUAUUGGGAAGAGUUCCAGAAAGACCCAGUCGGCCUGAUGAGCAGAGUGGC | |
| | UCAGCCUGCCAGCAAGAAGAUCGAUCAGAACAAGCUGAAGCCCGAAAUGGACGAG | |
| | AAGGGGAACCUGACAACCGCCGGCUUUGCCUGUAGCCAGUGCGGCCAGCCCCUGU | |
| | UUGUGUACAAACUGGAACAGGUGAGCGAAAAGGGCAAGGCUUACACGAAUUACUU | |
| | CGGCAGAUGCAACGUGGCCGAGCACGAGAAGCUGAUCCUGCUGGCCCAGCUGAAG | |
| | CCUGAGAAGGAUAGCGAUGAGGCAGUGACAUAUUCCCUGGGCAAGUUCGGACAGC | |
| | GGGCCCUGGAUUUUUAUUCCAUUCAUGUGACCAAGGAAUCCACCCACCCCGUCAA | |
| | GCCUCUUGCCCAAAUUGCCGGCAACAGAUACGCCAGCGGCCCCGUGGGCAAGGCC | |
| | CUGAGCGACGCCUGUAUGGGCACCAUCGCCAGCUUCCUGUCUAAGUACCAGGACA | |
| | UUAUCAUCGAGCACCAGAAGGUGGUGAAGGGCAACCAGAAGAGACUGGAGAGCCU | |
| | GCGCGAGCUGGCCGGCAAGGAAAACCUGGAGUAUCCUAGCGUGACCCUGCCUCCU | |
| | CAGCCUCAUACAAAGGAGGGCGUGGAUGCCUACAACGAAGUGAUCGCCCGGGUGC | |
| | GGAUGUGGGUGAACCUGAAUCUGUGGCAGAAGCUGAAGCUGUCUAGAGACGACGC | |
| | CAAGCCCCUGCUGAGACUGAAGGGCUUCCCCAGCUUCCCUCUGGUGGAGAGACAG | |
| | GCAAAUGAAGUGGACUGGUGGGACAUGGUGUGUAACGUGAAGAAGCUGAUCAAUG | |
| | AGAAGAAGGAGGACGGCAAAGUGUUCUGGCAGAAUCUGGCCGGCUACAAGCGUCA | |
| | GGAGGCCCUGCGGCCCUACCUGAGCAGCGAGGAAGACAGAAAGAAGGGCAAGAAG | |
| | UUCGCCCGGUAUCAGCUGGGGGACCUGCUGCUGCACCUCGAGAAGAAGCACGGCG | |
| | AAGACUGGGGGAAGGUGUACGAUGAGGCCUGGGAGCGGAUCGAUAAGAAGGUGGA | |
| | GGGCCUGAGCAAGCACAUCAAGCUGGAGGAGGAACGGAGAUCUGAGGACGCCCAG | |
| | AGCAAGGCCGCCCUGACCGACUGGCUGAGAGCCAAGGCCAGCUUCGUCAUCGAGG | |
| | GGCUGAAGGAGGCCGACAAGGACGAGUUCUGCCGGUGCGAACUGAAGCUGCAGAA | |
| | GUGGUACGGAGAUCUGAGAGGCAAACCUUUCGCCAUCGAGGCCGAGAACAGCAUC | |
| | CUGGACAUCAGCGGCUUCAGCAAGCAGUACAACUGCGCCUUUAUUUGGCAGAAGG | |
| | ACGGAGUGAAGAAGCUGAACCUGUACCUGAUCAUCAACUAUUUCAAGGGCGGCAA | |
| | GCUGAGAUUCAAGAAGAUCAAGCCUGAAGCCUUCGAGGCCAACAGAUUCUACACC | |
| | GUGAUUAACAAGAAAAGCGGAGAGAUCGUGCCAAUGGAAGUGAACUUCAACUUCG | |
| | ACGACCCUAACCUGAUCAUCCUGCCCCUGGCAUUUGGCAAGCGGCAGGGCAGAGA | |
| | GUUCAUCUGGAACGACCUGCUGUCUCUGGAGACCGGCAGCCUGAAGCUGGCCAAC | |
| | GGCAGAGUGAUCGAGAAGACACUGUACAACAGACGAACCAGACAAGACGAGCCCG | |
| | CCCUGUUUGUGGCCCUGACCUUCGAGAGAAGAGAGGUGCUGGACAGCAGCAAUAU | |
| | CAAGCCUAUGAACCUGAUCGGCGUGGACCGGGGCGAGAACAUCCCUGCCGUGAUC | |
| | GCCCUUACCGACCCCGAGGGAUGCCCUCUGAGCCGGUUUAAAGACAGCCUGGGCA | |
| | ACCCUACCCACAUCCUGAGAAUUGGCGAGUCCUACAAGGAGAAGCAGAGAACCAU | |
| | CCAGGCCAAGAAGGAGGUGGAGCAGCGGCGGGCUGGCGGCUACUCCCGGAAGUAC | |
| | GCCAGCAAGGCCAAGAACCUGGCCGACGACAUGGUUAGAAAUACCGCCAGAGACC | |
| | UCCUGUACUACGCUGUGACCCAGGACGCCAUGCUGAUCUUCGAGAACCUGAGCAG | |
| | AGGCUUCGGCAGACAGGGCAAGAGAACCUUCAUGGCCGAGAGACAGUACACCCGG | |
| | AUGGAGGACUGGCUGACCGCCAAGCUGGCCUACGAGGGCCUGCCCUCUAAGACCU | |
| | ACCUGUCCAAGACCUUGGCACAGUACACCAGCAAGACAUGCUCUAACUGCGGCUU | |
| | CACAAUCACGAGCGCCGACUACGACCGGGUGCUGGAGAAACUGAAGAAGACCGCC | |
| | ACAGGCUGGAUGACCACCAUUAACGGCAAGGAGCUGAAGGUGGAGGGCCAGAUCA | |
| | CCUACUACAACAGGUACAAACGGCAGAACGUGGUGAAGGACCUGAGCGUGGAACU | |
| | GGAUAGACUGAGCGAGGAAAGCGUAAACAAUGACAUCAGCAGCUGGACCAAGGGC | |
| | CGGAGCGGCGAGGCCCUGAGCCUGCUGAAGAAGAGAUUCUCCCACAGACCAGUGC | |
| | AGGAGAAGUUCGUGUGUCUGAACUGCGGCUUCGAGACCCACGCCGACGAGCAAGC | |
| | CGCCCUGAACAUCGCCCGGUCUUGGCUUUUCCUGCGGAGCCAGGAGUACAAGAAG | |
| | UACCAGACAAACAAGACCACAGGCAACACAGACAAGAGAGCCUUCGUCGAGACCU | |
| | GGCAGAGCUUCUACAGAAAGAAGCUGAAGGAGGUGUGGAAGCCUGCCGUGGGAAG | |
| | CCCCGCUGCCAAGAGAGUGAAGCUGGACUAAGCUGCCUUCUGCGGGGCUUGCCUU | |
| | CUGGCCAUGCCCUUCUUCUCUCCCUUGCACCUGUACCUCUUGGUCUUUGAAUAAA | |
| | GCCUGAGUAGGAAGUCUAGAAAAAAAAAAAAAAAAAAAAAAAAAAAAAAAAAAAA | |
| | AAAAAAAAAAAAAAAAAAAAAAAAAAAAAAAAAAAAAAAAAAA | |
| 19832 | AGGAAAUAAGAGAGAAAAGAAGAGUAAGAAGAAAUAUAAGAGCCACCAUGGCCCC | Full-length |
| | UGCUGCCAAGAGAGUGAAGCUGGAUAGCAGACAGGAGAUCAAGCGGAUUAAUAAA | RNA |
| | AUUCGGAGAAGACUGGUGAAGGAUUCUAACACAAAGAAGGCUGGCAAGACACGGG | sequence |
| | GCCCUAUGAAGACACUGCUGGUGAGAGUGAUGACACCCGACCUGAGAGAAAGACU | encoding |
| | GGAAAACCUGAGAAAGAAGCCUGAGAAUAUCCCCCAGCCCAUCAGCAACACAAGC | CasX 676 |
| | CGGGCCAACCUGAAUAAGCUGCUGACCGACUACACCGAAAUGAAGAAGGCCAUCC | |
| | UGCACGUGUAUUGGGAAGAGUUCCAGAAAGACCCAGUCGGCCUGAUGAGCAGAGU | |
| | GGCUCAGCCUGCCAGCAAGAAGAUCGAUCAGAACAAGCUGAAGCCCGAAAUGGAC | |
| | GAGAAGGGGAACCUGACAACCGCCGGCUUUGCCUGUAGCCAGUGCGGCCAGCCCC | |
| | UGUUUGUGUACAAACUGGAACAGGUGAGCGAAAAGGGCAAGGCUUACACGAAUUA | |
| | CUUCGGCAGAUGCAACGUGGCCGAGCACGAGAAGCUGAUCAAGCUGGCCCAGCUG | |
| | AAGCCUGAGAAGGAUAGCGAUGAGGCAGUGACAUAUUCCCUGGGCAAGUUCGGAC | |
| | AGCGGGCCCUGGAUUUUUAUUCCAUUCAUGUGACCAAGGAAUCCACCCACCCCGU | |
| | CAAGCCUCUUGCCCAAAUUGCCGGCAACAGAUACGCCUCCAGCCCCGUGGGCAAG | |
| | GCCCUGAGCGACGCCUGUAUGGGCACCAUCGCCAGCUUCCUGUCUAAGUACCAGG | |
| | ACAUUAUCAUCGAGCACCAGAAGGUGGUGAAGGGCAACCAGAAGAGACUGGAGAG | |
| | CCUGCGCGAGCUGGCCGGCAAGGAAAACCUGGAGUAUCCUAGCGUGACCCUGCCU | |
| | CCUCAGCCUCAUACAAAGGAGGGCGUGGAUGCCUACAACGAAGUGAUCGCCCGGG | |
| | UGCGGAUGUGGGUGAACCUGAAUCUGUGGCAGAAGCUGAAGCUGUCUAGAGACGA | |
| | CGCCAAGCCCCUGCUGAGACUGAAGGGCUUCCCCAGCUUCCCUCUGGUGGAGAGA | |
| | CAGGCAAAUGAAGUGGACUGGUGGGACAUGGUGUGUAACGUGAAGAAGCUGAUCA | |
| | AUGAGAAGAAGGAGGACGGCAAAGUGUUCUGGCAGAAUCUGGCCGGCUACAAGCG | |
| | UCAGGAGGCCCUGCGGCCCUACCUGAGCAGCGAGGAAGACAGAAAGAAGGGCAAG | |
| | AAGUUCGCCCGGUAUCAGCUGGGGGACCUGCUGCUGCACCUCGAGAAGAAGCACG | |
| | GCGAAGACUGGGGGAAGGUGUACGAUGAGGCCUGGGAGCGGAUCGAUAAGAAGGU | |
| | GGAGGGCCUGAGCAAGCACAUCAAGCUGGAGGAGGAACGGAGAUCUGAGGACGCC | |
| | CAGAGCAAGGCCGCCCUGACCGACUGGCUGAGAGCCAAGGCCAGCUUCGUCAUCG | |
| | AGGGGCUGAAGGAGGCCGACAAGGACGAGUUCUGCCGGUGCGAACUGAAGCUGCA | |
| | GAAGUGGUACGGAGAUCUGAGAGGCAAACCUUUCGCCAUCGAGGCCGAGAACAGC | |
| | AUCCUGGACAUCAGCGGCUUCAGCAAGCAGUACAACUGCGCCUUUAUUUGGCAGA | |
| | AGGACGGAGUGAAGAAGCUGAACCUGUACCUGAUCAUCAACUAUUUCAAGGGCGG | |
| | CAAGCUGAGAUUCAAGAAGAUCAAGCCUGAAGCCUUCGAGGCCAACAGAUUCUAC | |
| | ACCGUGAUUAACAAGAAAAGCGGAGAGAUCGUGCCAAUGGAAGUGAACUUCAACU | |
| | UCGACGACCCUAACCUGAUCAUCCUGCCCCUGGCAUUUGGCAAGCGGCAGGGCAG | |
| | AGAGUUCAUCUGGAACGACCUGCUGUCUCUGGAGACCGGCAGCCUGAAGCUGGCC | |
| | AACGGCAGAGUGAUCGAGAAGACACUGUACAACAGACGAACCAGACAAGACGAGC | |
| | CCGCCCUGUUUGUGGCCCUGACCUUCGAGAGAAGAGAGGUGCUGGACAGCAGCAA | |
| | UAUCAAGCCUAUGAACCUGAUCGGCGUGGACCGGGGCGAGAACAUCCCUGCCGUG | |
| | AUCGCCCUUACCGACCCCGAGGGAUGCCCUCUGAGCCGGUUUAAAGACAGCCUGG | |
| | GCAACCCUACCCACAUCCUGAGAAUUGGCGAGUCCUACAAGGAGAAGCAGAGAAC | |
| | CAUCCAGGCCAAGAAGGAGGUGGAGCAGCGGCGGGCUGGCGGCUACUCCCGGAAG | |
| | UACGCCAGCAAGGCCAAGAACCUGGCCGACGACAUGGUUAGAAAUACCGCCAGAG | |
| | ACCUCCUGUACUACGCUGUGACCCAGGACGCCAUGCUGAUCUUCGAGAACCUGAG | |
| | CAGAGGCUUCGGCAGACAGGGCAAGAGAACCUUCAUGGCCGAGAGACAGUACACC | |
| | CGGAUGGAGGACUGGCUGACCGCCAAGCUGGCCUACGAGGGCCUGCCCUCUAAGA | |
| | CCUACCUGUCCAAGACCUUGGCACAGUACACCAGCAAGACAUGCUCUAACUGCGG | |
| | CUUCACAAUCACGAGCGCCGACUACGACCGGGUGCUGGAGAAACUGAAGAAGACC | |
| | GCCACAGGCUGGAUGACCACCAUUAACGGCAAGGAGCUGAAGGUGGAGGGCCAGA | |
| | UCACCUACUACAACAGGUACAAACGGCAGAACGUGGUGAAGGACCUGAGCGUGGA | |
| | ACUGGAUAGACUGAGCGAGGAAAGCGUAAACAAUGACAUCAGCAGCUGGACCAAG | |
| | GGCCGGAGCGGCGAGGCCCUGAGCCUGCUGAAGAAGAGAUUCUCCCACAGACCAG | |
| | UGCAGGAGAAGUUCGUGUGUCUGAACUGCGGCUUCGAGACCCACGCCGACGAGCA | |
| | AGCCGCCCUGAACAUCGCCCGGUCUUGGCUUUUCCUGCGGAGCCAGGAGUACAAG | |
| | AAGUACCAGACAAACAAGACCACAGGCAACACAGACAAGAGAGCCUUCGUCGAGA | |
| | CCUGGCAGAGCUUCUACAGAAAGAAGCUGAAGGAGGUGUGGAAGCCUGCCGUGGG | |
| | AAGCCCCGCUGCCAAGAGAGUGAAGCUGGACUAAGCUGCCUUCUGCGGGGCUUGC | |
| | CUUCUGGCCAUGCCCUUCUUCUCUCCCUUGCACCUGUACCUCUUGGUCUUUGAAU | |
| | AAAGCCUGAGUAGGAAGUCUAGAAAAAAAAAAAAAAAAAAAAAAAAAAAAAAAAA | |
| | AAAAAAAAAAAAAAAAAAAAAAAAAAAAAAAAAAAAAAAAAAAAAA | |
| 19833 | AGGAAAUAAGAGAGAAAAGAAGAGUAAGAAGAAAUAUAAGAGCCACCAUGGCCCC | Full-length |
| | UGCUGCCAAGAGAGUGAAGCUGGAUAGCAGACAGGAGAUCAAGCGGAUUAAUAAA | RNA |
| | AUUCGGAGAAGACUGGUGAAGGAUUCUAACACAAAGAAGGCUGGCAAGACAGGCC | sequence |
| | CUAUGAAGACACUGCUGGUGAGAGUGAUGACACCCGACCUGAGAGAAAGACUGGA | of mRNA |
| | AAACCUGAGAAAGAAGCCUGAGAAUAUCCCCCAGCCCAUCAGCAACACAAGCCGG | encoding |
| | GCCAACCUGAAUAAGCUGCUGACCGACUACACCGAAAUGAAGAAGGCCAUCCUGC | CasX 812 |
| | ACGUGUAUUGGGAAGAGUUCCAGAAAGACCCAGUCGGCCUGAUGAGCAGAGUGGC | |
| | UCAGCCUGCCAGCAAGAAGAUCGAUCAGAACAAGCUGAAGCCCGAAAUGGACGAG | |
| | AAGGGGAACCUGACAACCGCCGGCUUUGCCUGUAGCCAGUGCGGCCAGCCCCUGU | |
| | UUGUGUACAAACUGGAACAGGUGAGCGAAAAGGGCAAGGCUUACACGAAUUACUU | |
| | CGGCAGAUGCAACGUGGCCGAGCACGAGAAGCUGAUCCUGCUGGCCCAGCUGAAG | |
| | CCUGAGAAGGAUAGCGAUGAGGCAGUGACAUAUUCCCUGGGCAAGUUCGGACAGC | |
| | GGGCCCUGGAUUUUUAUUCCAUUCAUGUGACCAAGGAAUCCACCCACCCCGUCAA | |
| | GCCUCUUGCCCAAAUUGCCGGCAACAGAUACGCCAGCGGCCCCGUGGGCAAGGCC | |
| | CUGAGCGACGCCUGUAUGGGCACCAUCGCCAGCUUCCUGUCUAAGUACCAGGACA | |
| | UUAUCAUCGAGCACCAGAAGGUGGUGAAGGGCAACCAGAAGAGACUGGAGAGCCU | |
| | GCGCGAGCUGGCCGGCAAGGAAAACCUGGAGUAUCCUAGCGUGACCCUGCCUCCU | |
| | CAGCCUCAUACAAAGGAGGGCGUGGAUGCCUACAACGAAGUGAUCGCCCGGGUGC | |
| | GGAUGUGGGUGAACCUGAAUCUGUGGCAGAAGCUGAAGCUGUCUAGAGACGACGC | |
| | CAAGCCCCUGCUGAGACUGAAGAAGUUCCCCAGCUUCCCUCUGGUGGAGAGACAG | |
| | GCAAAUGAAGUGGACUGGUGGGACAUGGUGUGUAACGUGAAGAAGCUGAUCAAUG | |
| | AGAAGAAGGAGGACGGCAAAGUGUUCUGGCAGAAUCUGGCCGGCUACAAGCGUCA | |
| | GGAGGCCCUGCGGCCCUACCUGAGCAGCGAGGAAGACAGAAAGAAGGGCAAGAAG | |
| | UUCGCCCGGUAUCAGCUGGGGGACCUGCUGCUGCACCUCGAGAAGAAGCACGGCG | |
| | AAGACUGGGGGAAGGUGUACGAUGAGGCCUGGGAGCGGAUCGAUAAGAAGGUGGA | |
| | GGGCCUGAGCAAGCACAUCAAGCUGGAGGAGGAACGGAGAUCUGAGGACGCCCAG | |
| | AGCAAGGCCGCCCUGACCGACUGGCUGAGAGCCAAGGCCAGCUUCGUCAUCGAGG | |
| | GGCUGAAGGAGGCCGACAAGGACGAGUUCUGCCGGUGCGAACUGAAGCUGCAGAA | |
| | GUGGUACGGAGAUCUGAGAGGCAAACCUUUCGCCAUCGAGGCCGAGAACAGCAUC | |
| | CUGGACAUCAGCGGCUUCAGCAAGCAGUACAACUGCGCCUUUAUUUGGCAGAAGG | |
| | ACGGAGUGAAGAAGCUGAACCUGUACCUGAUCAUCAACUAUUUCAAGGGCGGCAA | |
| | GCUGAGAUUCAAGAAGAUCAAGCCUGAAGCCUUCGAGGCCAACAGAUUCUACACC | |
| | GUGAUUAACAAGAAAAGCGGAGAGAUCGUGCCAAUGGAAGUGAACUUCAACUUCG | |
| | ACGACCCUAACCUGAUCAUCCUGCCCCUGGCAUUUGGCAAGCGGCAGGGCAGAGA | |
| | GUUCAUCUGGAACGACCUGCUGUCUCUGGAGACCGGCAGCCUGAAGCUGGCCAAC | |
| | GGCAGAGUGAUCGAGAAGACACUGUACAACAGACGAACCAGACAAGACGAGCCCG | |
| | CCCUGUUUGUGGCCCUGACCUUCGAGAGAAGAGAGGUGCUGGACAGCAGCAAUAU | |
| | CAAGCCUAUGAACCUGAUCGGCGUGGACCGGGGCGAGAACAUCCCUGCCGUGAUC | |
| | GCCCUUACCGACCCCGAGGGAUGCCCUCUGAGCCGGUUUAAAGACAGCCUGGGCA | |
| | ACCCUACCCACAUCCUGAGAAUUGGCGAGUCCUACAAGGAGAAGCAGAGAACCAU | |
| | CCAGGCCAAGAAGGAGGUGGAGCAGCGGCGGGCUGGCGGCUACUCCCGGAAGUAC | |
| | GCCAGCAAGGCCAAGAACCUGGCCGACGACAUGGUUAGAAAUACCGCCAGAGACC | |
| | UCCUGUACUACGCUGUGACCCAGGACGCCAUGCUGAUCUUCGAGAACCUGAGCAG | |
| | AGGCUUCGGCAGACAGGGCAAGAGAACCUUCAUGGCCGAGAGACAGUACACCCGG | |
| | AUGGAGGACUGGCUGACCGCCAAGCUGGCCUACGAGGGCCUGCCCUCUAAGACCU | |
| | ACCUGUCCAAGACCUUGGCACAGUACACCAGCAAGACAUGCUCUAACUGCGGCUU | |
| | CACAAUCACGAGCGCCGACUACGACCGGGUGCUGGAGAAACUGAAGAAGACCGCC | |
| | ACAGGCUGGAUGACCACCAUUAACGGCAAGGAGCUGAAGGUGGAGGGCCAGAUCA | |
| | CCUACUACAACAGGUACAAACGGCAGAACGUGGUGAAGGACCUGAGCGUGGAACU | |
| | GGAUAGACUGAGCGAGGAAAGCGUAAACAAUGACAUCAGCAGCUGGACCAAGGGC | |
| | CGGAGCGGCGAGGCCCUGAGCCUGCUGAAGAAGAGAUUCUCCCACAGACCAGUGC | |
| | AGGAGAAGUUCGUGUGUCUGAACUGCGGCUUCGAGACCCACGCCGACGAGCAAGC | |
| | CGCCCUGAACAUCGCCCGGUCUUGGCUUUUCCUGCGGAGCCAGGAGUACAAGAAG | |
| | UACCAGACAAACAAGACCACAGGCAACACAGACAAGAGAGCCUUCGUCGAGACCU | |
| | GGCAGAGCUUCUACAGAAAGAAGCUGAAGGAGGUGUGGAAGCCUGCCGUGGGAAG | |
| | CCCCGCUGCCAAGAGAGUGAAGCUGGACUAAGCUGCCUUCUGCGGGGCUUGCCUU | |
| | CUGGCCAUGCCCUUCUUCUCUCCCUUGCACCUGUACCUCUUGGUCUUUGAAUAAA | |
| | GCCUGAGUAGGAAGUCUAGAAAAAAAAAAAAAAAAAAAAAAAAAAAAAAAAAAAA | |
| | AAAAAAAAAAAAAAAAAAAAAAAAAAAAAAAAAAAAAAAAAAA | |
| 19834 | AGGAAAmψAAGAGAGAAAAGAAGAGmψAAGAAGAAAmψAmψAAGAGCCACCAmψG | Full-length |
| | GCCCCmψGCmψGCCAAGAGAGmψGAAGCmψGGAmψAGCAGACAGGAGAmψCAAGC | N1- |
| | GGAmψmψAAmψAAAAmψmψCGGAGAAGACmψGGmψGAAGGAmψmψCmψAACACAA | methylpse |
| | AGAAGGCmψGGCAAGACAGGCCCmψAmψGAAGACACmψGCmψGGmψGAGAGmψGA | udouridine |
| | mψGACACCCGACCmψGAGAGAAAGACmψGGAAAACCmψGAGAAAGAAGCCmψGAG | substituted |
| | AAmψAmψCCCCCAGCCCAmψCAGCAACACAAGCCGGGCCAACCmψGAAmψAAGCm | RNA |
| | ψGCmψGACCGACmψACACCGAAAmψGAAGAAGGCCAmψCCmψCGACGmψGmψAmψ | sequence |
| | mψGGGAAGAGmψmψCCAGAAAGACCCAGmψCGGCCmψGAmψGAGCAGAGmψGGCm | of mRNA |
| | ψCAGCCmψGCCAGCAAGAAGAmψCGAmψCAGAACAAGCmψGAAGCCCGAAAmψGG | encoding |
| | ACGAGAAGGGGAACCmψGACAACCGCCGGCmψmψmψGCCmψGmψAGCCAGmψGCG | CasX 491 |
| | GCCAGCCCCmψGmψmψmψGmψGmψACAAACmψGGAACAGGmψGAGCGAAAAGGGC | |
| | AAGGCmψmψACACGAAmψmψACmψmψCGGCAGAmψGCAACGmψGGCCGAGCACGA | |
| | GAAGCmψGAmψCCmψGCmψGGCCCAGCmψGAAGCCmψGAGAAGGAmψAGCGAmψG | |
| | AGGCAGmψGACAmψAmψmψCCCmψGGGCAAGmψmψCGGACAGCGGGCCCmψGGAm | |
| | ψmψmψmψmψAmψmψCCAmψmψCAmψGmψGACCAAGGAAmψCCACCCACCCCGmψC | |
| | AAGCCmψCmψmψGCCCAAAmψmψGCCGGCAACAGAmψACGCCAGCGGCCCCGmψG | |
| | GGCAAGGCCCmψGAGCGACGCCmψGmψAmψGGGCACCAmψCGCCAGCmψmψCCmψ | |
| | GmψCmψAAGmψACCAGGACAmψmψAmψCAmψCGAGCACCAGAAGGmψGGmψGAAG | |
| | GGCAACCAGAAGAGACmψGGAGAGCCmψGCGCGAGCmψGGCCGGCAAGGAAAACC | |
| | mψGGAGmψAmψCCmψAGCGmψGACCCmψGCCmψCCmψCAGCCmψCAmψACAAAGG | |
| | AGGGCGmψGGAmψGCCmψACAACGAAGmψGAmψCGCCCGGGmψGCGGAmψGmψGG | |
| | GmψGAACCmψGAAmψCmψGmψGGCAGAAGCmψGAAGCmψGmψCmψAGAGACGACG | |
| | CCAAGCCCCmψGCmψGAGACmψGAAGGGCmψmψCCCCAGCmψmψCCCmψCmψGGm | |
| | ψGGAGAGACAGGCAAAmψGAAGmψGGACmψGGmψGGGACAmψGGmψGmψGmψAAC | |
| | GmψGAAGAAGCmψGAmψCAAmψGAGAAGAAGGAGGACGGCAAAGmψGmψmψCmψG | |
| | GCAGAAmψCmψGGCCGGCmψACAAGCGmψCAGGAGGCCCmψGCGGCCCmψACCmψ | |
| | GAGCAGCGAGGAAGACAGAAAGAAGGGCAAGAAGmψmψCGCCCGGmψAmψCAGCm | |
| | ψGGGGGACCmψGCmψGCmψGCACCmψCGAGAAGAAGCACGGCGAAGACmψGGGGG | |
| | AAGGmψGmψACGAmψGAGGCCmψGGGAGCGGAmψCGAmψAAGAAGGmψGGAGGGC | |
| | CmψGAGCAAGCACAmψCAAGCmψGGAGGAGGAACGGAGAmψCmψGAGGACGCCCA | |
| | GAGCAAGGCCGCCCmψGACCGACmψGGCmψGAGAGCCAAGGCCAGCmψmψCGmψC | |
| | AmψCGAGGGGCmψGAAGGAGGCCGACAAGGACGAGmψmψCmψGCCGGmψGCGAAC | |
| | mψGAAGCmψGCAGAAGmψGGmψACGGAGAmψCmψGAGAGGCAAACCmψmψmψCGA | |
| | CAmψCGAGGCCGAGAACAGCAmψCCmψGGACAmψCAGCGGCmψmψCAGCAAGCAG | |
| | mψACAACmψGCGCCmψmψmψAmψmψmψGGCAGAAGGACGGAGmψGAAGAAGCmψG | |
| | AACCmψGmψACCmψGAmψCAmψCAACmψAmψmψmψCAAGGGCGGCAAGCmψGAGC | |
| | mψmψCAAGAAGAmψCAAGCCmψGAAGCCmψmψCGAGGCCAACAGAmψmψCmψACA | |
| | CCGmψGAmψmψAACAAGAAAAGCGGAGAGAmψCGmψGCCAAmψGGAAGmψGAACm | |
| | ψmψCAACmψmψCGACGACCCmψAACCmψGAmψCAmψCCmψGCCCCmψGGCAmψmψ | |
| | mψGGCAAGCGGCAGGGCAGAGAGmψmψCAmψCmψGGAACGACCmψGCmψGmψCmψ | |
| | CmψGGAGACCGGCAGCCmψGAAGCmψGGCCAACGGCAGAGmψGAmψCGAGAAGAC | |
| | ACmψGmψACAACAGACGAACCAGACAAGACGAGCCCGCCCmψGmψmψmψGmψGGC | |
| | CCmψGACCmψmψCGAGAGAAGAGAGGmψGCmψGGACAGCAGCAAmψAmψCAAGCC | |
| | mψAmψGAACCmψGAmψCGGCGmψGGACCGGGGCGAGAACAmψCCCmψGCCGmψGA | |
| | AGGAGAAGCAGAGAACCAmψCCAGGCCAAGAAGGAGGmψGGAGCAGCGGCGGGCm | |
| | ψGGCGGCmψACmψCCCGGAAGmψACGCCAGCAAGGCCAAGAACCmψGGCCGACGA | |
| | CCAGGACGCCAmψGCmψGAmψCmψmψCGAGAACCmψGAGCAGAGGCmψmψCGGCA | |
| | GACAGGGCAAGAGAACCmψmψCAmψGGCCGAGAGACAGmψACACCCGGAmψGGAG | |
| | GACmψGGCmψGACCGCCAAGCmψGGCCmψACGAGGGCCmψGmψCmψAAGACCmψA | |
| | CCmψGmψCCAAGACCmψmψGGCACAGmψACACCAGCAAGACAmψGCmψCmψAACm | |
| | ψGCGGCmψmψCACAAmψCACGAGCGCCGACmψACGACCGGGmψGCmψGGAGAAAC | |
| | mψGAAGAAGACCGCCACAGGCmψGGAmψGACCACCAmψmψAACGGCAAGGAGCmψ | |
| | GAAGGmψGGAGGGCCAGAmψCACCmψACmψACAACAGGmψACAAACGGCAGAACG | |
| | mψGGmψGAAGGACCmψGAGCGmψGGAACmψGGAmψAGACmψGAGCGAGGAAAGCG | |
| | mψAAACAAmψGACAmψCAGCAGCmψGGACCAAGGGCCGGAGCGGCGAGGCCCmψG | |
| | AGCCmψGCmψGAAGAAGAGAmψmψCmψCCCACAGACCAGmψGCAGGAGAAGmψmψ | |
| | CGmψGmψGmψCmψGAACmψGCGGCmψmψCGAGACCCACGCCGACGAGCAAGCCGC | |
| | ACAAGAAGmψACCAGACAAACAAGACCACAGGCAACACAGACAAGAGAGCCmψmψ | |
| | CGmψCGAGACCmψGGCAGAGCmψmψCmψACAGAAAGAAGCmψGAAGGAGGmψGmψ | |
| | GGAAGCCmψGCCGmψGGGAAGCCCCGCmψGCCAAGAGAGmψGAAGCmψGGACmψA | |
| | CGAAGCCmψGCCGmψGGGAAGCCCCGCmψGCCAAGAGAGmψGAAGCmψGGACmψA | |
| | CmψGAGmψAGGAAGmψCmψAGAAAAAAAAAAAAAAAAAAAAAAAAAAAAAAAAAA | |
| | AAAAAAAAAAAAAAAAAAAAAAAAAAAAAAAAAAAAAAAAAAAAA | |
| 19835 | AGGAAAmψAAGAGAGAAAAGAAGAGmψAAGAAGAAAmψAmψAAGAGCCACCAmψG | Full-length |
| | GCCCCmψGCmψGCCAAGAGAGmψGAAGCmψGGAmψAGCAGACAGGAGAmψCAAGC | N1- |
| | GGAmψmψAAmψAAAAmψmψCGGAGAAGACmψGGmψGAAGGAmψmψCmψAACACAA | methylpse |
| | AGAAGGCmψGGCAAGACAGGCCCmψAmψGAAGACACmψGCmψGGmψGAGAGmψGA | udouridine |
| | mψGACACCCGACCmψGAGAGAAAGACmψGGAAAACCmψGAGAAAGAAGCCmψGAG | substituted |
| | AAmψAmψCCCCCAGCCCAmψCAGCAACACAAGCCGGGCCAACCmψGAAmψAAGCm | RNA |
| | ψGCmψGACCGACmψACACCGAAAmψGAAGAAGGCCAmψCCmψCGACGmψGmψAmψ | sequence |
| | mψGGGAAGAGmψmψCCAGAAAGACCCAGmψCGGCCmψGAmψGAGCAGAGmψGGCm | of mRNA |
| | ψCAGCCmψGCCAGCAAGAAGAmψCGAmψCAGAACAAGCmψGAAGCCCGAAAmψGG | encoding |
| | ACGAGAAGGGGAACCmψGACAACCGCCGGCmψmψmψGCCmψGmψAGCCAGmψGCG | CasX 515 |
| | GCCAGCCCCmψGmψmψmψGmψGmψACAAACmψGGAACAGGmψGAGCGAAAAGGGC | |
| | AAGGCmψmψACACGAAmψmψACmψmψCGGCAGAmψGCAACGmψGGCCGAGCACGA | |
| | GAAGCmψGAmψCCmψGCmψGGCCCAGCmψGAAGCCmψGAGAAGGAmψAGCGAmψG | |
| | AGGCAGmψGACAmψAmψmψCCCmψGGGCAAGmψmψCGGACAGCGGGCCCmψGGAm | |
| | ψmψmψmψmψAmψmψCCAmψmψCAmψGmψGACCAAGGAAmψCCACCCACCCCGmψC | |
| | AAGCCmψCmψmψGCCCAAAmψmψGCCGGCAACAGAmψACGCCAGCGGCCCCGmψG | |
| | GGCAAGGCCCmψGAGCGACGCCmψGmψAmψGGGCACCAmψCGCCAGCmψmψCCmψ | |
| | GmψCmψAAGmψACCAGGACAmψmψAmψCAmψCGAGCACCAGAAGGmψGGmψGAAG | |
| | GGCAACCAGAAGAGACmψGGAGAGCCmψGCGCGAGCmψGGCCGGCAAGGAAAACC | |
| | mψGGAGmψAmψCCmψAGCGmψGACCCmψGCCmψCCmψCAGCCmψCAmψACAAAGG | |
| | AGGGCGmψGGAmψGCCmψACAACGAAGmψGAmψCGCCCGGGmψGCGGAmψGmψGG | |
| | GmψGAACCmψGAAmψCmψGmψGGCAGAAGCmψGAAGCmψGmψCmψAGAGACGACG | |
| | CCAAGCCCCmψGCmψGAGACmψGAAGGGCmψmψCCCCAGCmψmψCCCmψCmψGGm | |
| | ψGGAGAGACAGGCAAAmψGAAGmψGGACmψGGmψGGGACAmψGGmψGmψGmψAAC | |
| | GmψGAAGAAGCmψGAmψCAAmψGAGAAGAAGGAGGACGGCAAAGmψGmψmψCmψG | |
| | GCAGAAmψCmψGGCCGGCmψACAAGCGmψCAGGAGGCCCmψGCGGCCCmψACCmψ | |
| | GAGCAGCGAGGAAGACAGAAAGAAGGGCAAGAAGmψmψCGCCCGGmψAmψCAGCm | |
| | ψGGGGGACCmψGCmψGCmψGCACCmψCGAGAAGAAGCACGGCGAAGACmψGGGGG | |
| | AAGGmψGmψACGAmψGAGGCCmψGGGAGCGGAmψCGAmψAAGAAGGmψGGAGGGC | |
| | CmψGAGCAAGCACAmψCAAGCmψGGAGGAGGAACGGAGAmψCmψGAGGACGCCCA | |
| | GAGCAAGGCCGCCCmψGACCGACmψGGCmψGAGAGCCAAGGCCAGCmψmψCGmψC | |
| | AmψCGAGGGGCmψGAAGGAGGCCGACAAGGACGAGmψmψCmψGCCGGmψGCGAAC | |
| | mψGAAGCmψGCAGAAGmψGGmψACGGAGAmψCmψGAGAGGCAAACCmψmψmψCGA | |
| | CAmψCGAGGCCGAGAACAGCAmψCCmψGGACAmψCAGCGGCmψmψCAGCAAGCAG | |
| | mψACAACmψGCGCCmψmψmψAmψmψmψGGCAGAAGGACGGAGmψGAAGAAGCmψG | |
| | AACCmψGmψACCmψGAmψCAmψCAACmψAmψmψmψCAAGGGCGGCAAGCmψGAGC | |
| | mψmψCAAGAAGAmψCAAGCCmψGAAGCCmψmψCGAGGCCAACAGAmψmψCmψACA | |
| | CCGmψGAmψmψAACAAGAAAAGCGGAGAGAmψCGmψGCCAAmψGGAAGmψGAACm | |
| | ψmψCAACmψmψCGACGACCCmψAACCmψGAmψCAmψCCmψGCCCCmψGGCAmψmψ | |
| | mψGGCAAGCGGCAGGGCAGAGAGmψmψCAmψCmψGGAACGACCmψGCmψGmψCmψ | |
| | CmψGGAGACCGGCAGCCmψGAAGCmψGGCCAACGGCAGAGmψGAmψCGAGAAGAC | |
| | ACmψGmψACAACAGACGAACCAGACAAGACGAGCCCGCCCmψGmψmψmψGmψGGC | |
| | CCmψGACCmψmψCGAGAGAAGAGAGGmψGCmψGGACAGCAGCAAmψAmψCAAGCC | |
| | mψAmψGAACCmψGAmψCGGCGmψGGACCGGGGCGAGAACAmψCCCmψGCCGmψGA | |
| | mψCGCCCmψmψACCGACCCCGAGGGAmψGCCCmψCmψGAGCCGGmψmψmψAAAGA | |
| | CAGCCmψGGGCAACCCmψACCCACAmψCCmψGAGAAmψmψGGCGAGmψCCmψACA | |
| | AGGAGAAGCAGAGAACCAmψCCAGGCCAAGAAGGAGGmψGGAGCAGCGGCGGGCm | |
| | ψGGCGGCmψACmψCCCGGAAGmψACGCCAGCAAGGCCAAGAACCmψGGCCGACGA | |
| | CAmψGGmψmψAGAAAmψACCGCCAGAGACCmψCCmψGmψACmψACGCmψGmψGAC | |
| | CCAGGACGCCAmψGCmψGAmψCmψmψCGAGAACCmψGAGCAGAGGCmψmψCGGCA | |
| | GACAGGGCAAGAGAACCmψmψCAmψGGCCGAGAGACAGmψACACCCGGAmψGGAG | |
| | GACmψGGCmψGACCGCCAAGCmψGGCCmψACGAGGGCCmψGCCCmψCmψAAGACC | |
| | mψACCmψGmψCCAAGACCmψmψGGCACAGmψACACCAGCAAGACAmψGCmψCmψA | |
| | ACmψGCGGCmψmψCACAAmψCACGAGCGCCGACmψACGACCGGGmψGCmψGGAGA | |
| | AACmψGAAGAAGACCGCCACAGGCmψGGAmψGACCACCAmψmψAACGGCAAGGAG | |
| | CmψGAAGGmψGGAGGGCCAGAmψCACCmψACmψACAACAGGmψACAAACGGCAGA | |
| | ACGmψGGmψGAAGGACCmψGAGCGmψGGAACmψGGAmψAGACmψGAGCGAGGAAA | |
| | GCGmψAAACAAmψGACAmψCAGCAGCmψGGACCAAGGGCCGGAGCGGCGAGGCCC | |
| | mψGAGCCmψGCmψGAAGAAGAGAmψmψCmψCCCACAGACCAGmψGCAGGAGAAGm | |
| | ψmψCGmψGmψGmψCmψGAACmψGCGGCmψmψCGAGACCCACGCCGACGAGCAAGC | |
| | CGCCCmψGAACAmψCGCCCGGmψCmψmψGGCmψmψmψmψCCmψGCGGAGCCAGGA | |
| | GmψACAAGAAGmψACCAGACAAACAAGACCACAGGCAACACAGACAAGAGAGCCm | |
| | ψmψCGmψCGAGACCmψGGCAGAGCmψmψCmψACAGAAAGAAGCmψGAAGGAGGmψ | |
| | GmψGGAAGCCmψGCCGmψGGGAAGCCCCGCmψGCCAAGAGAGmψGAAGCmψGGAC | |
| | mψAAGCmψGCCmψmψCmψGCGGGGCmψmψGCCmψmψCmψGGCCAmψGCCCmψmψC | |
| | mψmψCmψCmψCCCmψmψGCACCmψGmψACCmψCmψmψGGmψCmψmψmψGAAmψAA | |
| | AGCCmψGAGmψAGGAAGmψCmψAGAAAAAAAAAAAAAAAAAAAAAAAAAAAAAAA | |
| | AAAAAAAAAAAAAAAAAAAAAAAAAAAAAAAAAAAAAAAAAAAAAAAA | |
| 19836 | AGGAAAmψAAGAGAGAAAAGAAGAGmψAAGAAGAAAmψAmψAAGAGCCACCAmψG | Full-length |
| | GCCCCmψGCmψGCCAAGAGAGmψGAAGCmψGGAmψAGCAGACAGGAGAmψCAAGC | N1- |
| | GGAmψmψAAmψAAAAmψmψCGGAGAAGACmψGGmψGAAGGAmψmψCmψAACACAA | methylpse |
| | AGAAGGCmψGGCAAGACACGGGGCCCmψAmψGAAGACACmψGCmψGGmψGAGAGm | udouridine |
| | ψGAmψGACACCCGACCmψGAGAGAAAGACmψGGAAAACCmψGAGAAAGAAGCCmψ | (mu) |
| | GAGAAmψAmψCCCCCAGCCCAmψCAGCAACACAAGCCGGGCCAACCmψGAAmψAA | substituted |
| | GCmψGCmψGACCGACmψACACCGAAAmψGAAGAAGGCCAmψCCmψGCACGmψGmψ | RNA |
| | AmψmψGGGAAGAGmψmψCCAGAAAGACCCAGmψCGGCCmψGAmψGAGCAGAGmψG | sequence |
| | GCmψCAGCCmψGCCAGCAAGAAGAmψCGAmψCAGAACAAGCmψGAAGCCCGAAAm | of mRNA |
| | ψGGACGAGAAGGGGAACCmψGACAACCGCCGGCmψmψmψGCCmψGmψAGCCAGmψ | encoding |
| | GCGGCCAGCCCCmψGmψmψmψGmψGmψACAAACmψGGAACAGGmψGAGCGAAAAG | CasX 676 |
| | GGCAAGGCmψmψACACGAAmψmψACmψmψCGGCAGAmψGCAACGmψGGCCGAGCA | |
| | CGAGAAGCmψGAmψCAAGCmψGGCCCAGCmψGAAGCCmψGAGAAGGAmψAGCGAm | |
| | ψGAGGCAGmψGACAmψAmψmψCCCmψGGGCAAGmψmψCGGACAGCGGGCCCmψGG | |
| | AmψmψmψmψmψAmψmψCCAmψmψCAmψGmψGACCAAGGAAmψCCACCCACCCCGm | |
| | ψCAAGCCmψCmψmψGCCCAAAmψmψGCCGGCAACAGAmψACGCCmψCCAGCCCCG | |
| | mψGGGCAAGGCCCmψGAGCGACGCCmψGmψAmψGGGCACCAmψCGCCAGCmψmψC | |
| | CmψGmψCmψAAGmψACCAGGACAmψmψAmψCAmψCGAGCACCAGAAGGmψGGmψG | |
| | AAGGGCAACCAGAAGAGACmψGGAGAGCCmψGCGCGAGCmψGGCCGGCAAGGAAA | |
| | ACCmψGGAGmψAmψCCmψAGCGmψGACCCmψGCCmψCCmψCAGCCmψCAmψACAA | |
| | AGGAGGGCGmψGGAmψGCCmψACAACGAAGmψGAmψCGCCCGGGmψGCGGAmψGm | |
| | ψGGGmψGAACCmψGAAmψCmψGmψGGCAGAAGCmψGAAGCmψGmψCmψAGAGACG | |
| | ACGCCAAGCCCCmψGCmψGAGACmψGAAGGGCmψmψCCCCAGCmψmψCCCmψCmψ | |
| | GGmψGGAGAGACAGGCAAAmψGAAGmψGGACmψGGmψGGGACAmψGGmψGmψGmψ | |
| | AACGmψGAAGAAGCmψGAmψCAAmψGAGAAGAAGGAGGACGGCAAAGmψGmψmψC | |
| | mψGGCAGAAmψCmψGGCCGGCmψACAAGCGmψCAGGAGGCCCmψGCGGCCCmψAC | |
| | CmψGAGCAGCGAGGAAGACAGAAAGAAGGGCAAGAAGmψmψCGCCCGGmψAmψCA | |
| | GCmψGGGGGACCmψGCmψGCmψGCACCmψCGAGAAGAAGCACGGCGAAGACmψGG | |
| | GGGAAGGmψGmψACGAmψGAGGCCmψGGGAGCGGAmψCGAmψAAGAAGGmψGGAG | |
| | GGCCmψGAGCAAGCACAmψCAAGCmψGGAGGAGGAACGGAGAmψCmψGAGGACGC | |
| | CCAGAGCAAGGCCGCCCmψGACCGACmψGGCmψGAGAGCCAAGGCCAGCmψmψCG | |
| | mψCAmψCGAGGGGCmψGAAGGAGGCCGACAAGGACGAGmψmψCmψGCCGGmψGCG | |
| | AACmψGAAGCmψGCAGAAGmψGGmψACGGAGAmψCmψGAGAGGCAAACCmψmψmψ | |
| | CGCCAmψCGAGGCCGAGAACAGCAmψCCmψGGACAmψCAGCGGCmψmψCAGCAAG | |
| | CAGmψACAACmψGCGCCmψmψmψAmψmψmψGGCAGAAGGACGGAGmψGAAGAAGC | |
| | mψGAACCmψGmψACCmψGAmψCAmψCAACmψAmψmψmψCAAGGGCGGCAAGCmψG | |
| | AGAmψmψCAAGAAGAmψCAAGCCmψGAAGCCmψmψCGAGGCCAACAGAmψmψCmψ | |
| | ACACCGmψGAmψmψAACAAGAAAAGCGGAGAGAmψCGmψGCCAAmψGGAAGmψGA | |
| | ACmψmψCAACmψmψCGACGACCCmψAACCmψGAmψCAmψCCmψGCCCCmψGGCAm | |
| | ψmψmψGGCAAGCGGCAGGGCAGAGAGmψmψCAmψCmψGGAACGACCmψGCmψGmψ | |
| | CmψCmψGGAGACCGGCAGCCmψGAAGCmψGGCCAACGGCAGAGmψGAmψCGAGAA | |
| | GACACmψGmψACAACAGACGAACCAGACAAGACGAGCCCGCCCmψGmψmψmψGmψ | |
| | GGCCCmψGACCmψmψCGAGAGAAGAGAGGmψGCmψGGACAGCAGCAAmψAmψCAA | |
| | GCCmψAmψGAACCmψGAmψCGGCGmψGGACCGGGGCGAGAACAmψCCCmψGCCGm | |
| | ψGAmψCGCCCmψmψACCGACCCCGAGGGAmψGCCCmψCmψGAGCCGGmψmψmψAA | |
| | AGACAGCCmψGGGCAACCCmψACCCACAmψCCmψGAGAAmψmψGGCGAGmψCCmψ | |
| | ACAAGGAGAAGCAGAGAACCAmψCCAGGCCAAGAAGGAGGmψGGAGCAGCGGCGG | |
| | GCmψGGCGGCmψACmψCCCGGAAGmψACGCCAGCAAGGCCAAGAACCmψGGCCGA | |
| | CGACAmψGGmψmψAGAAAmψACCGCCAGAGACCmψCCmψGmψACmψACGCmψGmψ | |
| | GACCCAGGACGCCAmψGCmψGAmψCmψmψCGAGAACCmψGAGCAGAGGCmψmψCG | |
| | GCAGACAGGGCAAGAGAACCmψmψCAmψGGCCGAGAGACAGmψACACCCGGAmψG | |
| | GAGGACmψGGCmψGACCGCCAAGCmψGGCCmψACGAGGGCCmψGCCCmψCmψAAG | |
| | ACCmψACCmψGmψCCAAGACCmψmψGGCACAGmψACACCAGCAAGACAmψGCmψC | |
| | mψAACmψGCGGCmψmψCACAAmψCACGAGCGCCGACmψACGACCGGGmψGCmψGG | |
| | AGAAACmψGAAGAAGACCGCCACAGGCmψGGAmψGACCACCAmψmψAACGGCAAG | |
| | GAGCmψGAAGGmψGGAGGGCCAGAmψCACCmψACmψACAACAGGmψACAAACGGC | |
| | AGAACGmψGGmψGAAGGACCmψGAGCGmψGGAACmψGGAmψAGACmψGAGCGAGG | |
| | AAAGCGmψAAACAAmψGACAmψCAGCAGCmψGGACCAAGGGCCGGAGCGGCGAGG | |
| | CCCmψGAGCCmψGCmψGAAGAAGAGAmψmψCmψCCCACAGACCAGmψGCAGGAGA | |
| | AGmψmψCGmψGmψGmψCmψGAACmψGCGGCmψmψCGAGACCCACGCCGACGAGCA | |
| | AGCCGCCCmψGAACAmψCGCCCGGmψCmψmψGGCmψmψmψmψCCmψGCGGAGCCA | |
| | GGAGmψACAAGAAGmψACCAGACAAACAAGACCACAGGCAACACAGACAAGAGAG | |
| | CCmψmψCGmψCGAGACCmψGGCAGAGCmψmψCmψACAGAAAGAAGCmψGAAGGAG | |
| | GmψGmψGGAAGCCmψGCCGmψGGGAAGCCCCGCmψGCCAAGAGAGmψGAAGCmψG | |
| | GACmψAAGCmψGCCmψmψCmψGCGGGGCmψmψGCCmψmψCmψGGCCAmψGCCCmψ | |
| | mψCmψmψCmψCmψCCCmψmψGCACCmψGmψACCmψCmψmψGGmψCmψmψmψGAAm | |
| | ψAAAGCCmψGAGmψAGGAAGmψCmψAGAAAAAAAAAAAAAAAAAAAAAAAAAAAA | |
| | AAAAAAAAAAAAAAAAAAAAAAAAAAAAAAAAAAAAAAAAAAAAAAAAAAA | |
| 19837 | AGGAAAmψAAGAGAGAAAAGAAGAGmψAAGAAGAAAmψAmψAAGAGCCACCAmψG | Full-length |
| | GCCCCmψGCmψGCCAAGAGAGmψGAAGCmψGGAmψAGCAGACAGGAGAmψCAAGC | N1- |
| | GGAmψmψAAmψAAAAmψmψCGGAGAAGACmψGGmψGAAGGAmψmψCmψAACACAA | methylpse |
| | AGAAGGCmψGGCAAGACAGGCCCmψAmψGAAGACACmψGCmψGGmψGAGAGmψGA | udouridine |
| | mψGACACCCGACCmψGAGAGAAAGACmψGGAAAACCmψGAGAAAGAAGCCmψGAG | substituted |
| | AAmψAmψCCCCCAGCCCAmψCAGCAACACAAGCCGGGCCAACCmψGAAmψAAGCm | RNA |
| | mψGGGAAGAGmψmψCCAGAAAGACCCAGmψCGGCCmψGAmψGAGCAGAGmψGGCm | sequence |
| | ψCAGCCmψGCCAGCAAGAAGAmψCGAmψCAGAACAAGCmψGAAGCCCGAAAmψGG | of mRNA |
| | ACGAGAAGGGGAACCmψGACAACCGCCGGCmψmψmψGCCmψGmψAGCCAGmψGCG | encoding |
| | GCCAGCCCCmψGmψmψmψGmψGmψACAAACmψGGAACAGGmψGAGCGAAAAGGGC | CasX 812 |
| | AAGGCmψmψACACGAAmψmψACmψmψCGGCAGAmψGCAACGmψGGCCGAGCACGA | |
| | GAAGCmψGAmψCCmψGCmψGGCCCAGCmψGAAGCCmψGAGAAGGAmψAGCGAmψG | |
| | AGGCAGmψGACAmψAmψmψCCCmψGGGCAAGmψmψCGGACAGCGGGCCCmψGGAm | |
| | ψmψmψmψmψAmψmψCCAmψmψCAmψGmψGACCAAGGAAmψCCACCCACCCCGmψC | |
| | AAGCCmψCmψmψGCCCAAAmψmψGCCGGCAACAGAmψACGCCAGCGGCCCCGmψG | |
| | GGCAAGGCCCmψGAGCGACGCCmψGmψAmψGGGCACCAmψCGCCAGCmψmψCCmψ | |
| | GmψCmψAAGmψACCAGGACAmψmψAmψCAmψCGAGCACCAGAAGGmψGGmψGAAG | |
| | GGCAACCAGAAGAGACmψGGAGAGCCmψGCGCGAGCmψGGCCGGCAAGGAAAACC | |
| | mψGGAGmψAmψCCmψAGCGmψGACCCmψGCCmψCCmψCAGCCmψCAmψACAAAGG | |
| | AGGGCGmψGGAmψGCCmψACAACGAAGmψGAmψCGCCCGGGmψGCGGAmψGmψGG | |
| | GmψGAACCmψGAAmψCmψGmψGGCAGAAGCmψGAAGCmψGmψCmψAGAGACGACG | |
| | CCAAGCCCCmψGCmψGAGACmψGAAGGGCmψmψCCCCAGCmψmψCCCmψCmψGGm | |
| | ψGGAGAGACAGGCAAAmψGAAGmψGGACmψGGmψGGGACAmψGGmψGmψGmψAAC | |
| | GmψGAAGAAGCmψGAmψCAAmψGAGAAGAAGGAGGACGGCAAAGmψGmψmψCmψG | |
| | GCAGAAmψCmψGGCCGGCmψACAAGCGmψCAGGAGGCCCmψGCGGCCCmψACCmψ | |
| | GAGCAGCGAGGAAGACAGAAAGAAGGGCAAGAAGmψmψCGCCCGGmψAmψCAGCm | |
| | ψGGGGGACCmψGCmψGCmψGCACCmψCGAGAAGAAGCACGGCGAAGACmψGGGGG | |
| | AAGGmψGmψACGAmψGAGGCCmψGGGAGCGGAmψCGAmψAAGAAGGmψGGAGGGC | |
| | CmψGAGCAAGCACAmψCAAGCmψGGAGGAGGAACGGAGAmψCmψGAGGACGCCCA | |
| | GAGCAAGGCCGCCCmψGACCGACmψGGCmψGAGAGCCAAGGCCAGCmψmψCGmψC | |
| | AmψCGAGGGGCmψGAAGGAGGCCGACAAGGACGAGmψmψCmψGCCGGmψGCGAAC | |
| | mψGAAGCmψGCAGAAGmψGGmψACGGAGAmψCmψGAGAGGCAAACCmψmψmψCGA | |
| | CAmψCGAGGCCGAGAACAGCAmψCCmψGGACAmψCAGCGGCmψmψCAGCAAGCAG | |
| | mψACAACmψGCGCCmψmψmψAmψmψmψGGCAGAAGGACGGAGmψGAAGAAGCmψG | |
| | AACCmψGmψACCmψGAmψCAmψCAACmψAmψmψmψCAAGGGCGGCAAGCmψGAGC | |
| | mψmψCAAGAAGAmψCAAGCCmψGAAGCCmψmψCGAGGCCAACAGAmψmψCmψACA | |
| | CCGmψGAmψmψAACAAGAAAAGCGGAGAGAmψCGmψGCCAAmψGGAAGmψGAACm | |
| | ψmψCAACmψmψCGACGACCCmψAACCmψGAmψCAmψCCmψGCCCCmψGGCAmψmψ | |
| | mψGGCAAGCGGCAGGGCAGAGAGmψmψCAmψCmψGGAACGACCmψGCmψGmψCmψ | |
| | CmψGGAGACCGGCAGCCmψGAAGCmψGGCCAACGGCAGAGmψGAmψCGAGAAGAC | |
| | ACmψGmψACAACAGACGAACCAGACAAGACGAGCCCGCCCmψGmψmψmψGmψGGC | |
| | CCmψGACCmψmψCGAGAGAAGAGAGGmψGCmψGGACAGCAGCAAmψAmψCAAGCC | |
| | mψAmψGAACCmψGAmψCGGCGmψGGACCGGGGCGAGAACAmψCCCmψGCCGmψGA | |
| | mψCGCCCmψmψACCGACCCCGAGGGAmψGCCCmψCmψGAGCCGGmψmψmψAAAGA | |
| | CAGCCmψGGGCAACCCmψACCCACAmψCCmψGAGAAmψmψGGCGAGmψCCmψACA | |
| | AGGAGAAGCAGAGAACCAmψCCAGGCCAAGAAGGAGGmψGGAGCAGCGGCGGGCm | |
| | ψGGCGGCmψACmψCCCGGAAGmψACGCCAGCAAGGCCAAGAACCmψGGCCGACGA | |
| | CAmψGGmψmψAGAAAmψACCGCCAGAGACCmψCCmψGmψACmψACGCmψGmψGAC | |
| | CCAGGACGCCAmψGCmψGAmψCmψmψCGAGAACCmψGAGCAGAGGCmψmψCGGCA | |
| | GACAGGGCAAGAGAACCmψmψCAmψGGCCGAGAGACAGmψACACCCGGAmψGGAG | |
| | GACmψGGCmψGACCGCCAAGCmψGGCCmψACGAGGGCCmψGCCCmψCmψAAGACC | |
| | mψACCmψGmψCCAAGACCmψmψGGCACAGmψACACCAGCAAGACAmψGCmψCmψA | |
| | ACmψGCGGCmψmψCACAAmψCACGAGCGCCGACmψACGACCGGGmψGCmψGGAGA | |
| | AACmψGAAGAAGACCGCCACAGGCmψGGAmψGACCACCAmψmψAACGGCAAGGAG | |
| | CmψGAAGGmψGGAGGGCCAGAmψCACCmψACmψACAACAGGmψACAAACGGCAGA | |
| | ACGmψGGmψGAAGGACCmψGAGCGmψGGAACmψGGAmψAGACmψGAGCGAGGAAA | |
| | GCGmψAAACAAmψGACAmψCAGCAGCmψGGACCAAGGGCCGGAGCGGCGAGGCCC | |
| | mψGAGCCmψGCmψGAAGAAGAGAmψmψCmψCCCACAGACCAGmψGCAGGAGAAGm | |
| | ψmψCGmψGmψGmψCmψGAACmψGCGGCmψmψCGAGACCCACGCCGACGAGCAAGC | |
| | CGCCCmψGAACAmψCGCCCGGmψCmψmψGGCmψmψmψmψCCmψGCGGAGCCAGGA | |
| | GmψACAAGAAGmψACCAGACAAACAAGACCACAGGCAACACAGACAAGAGAGCCm | |
| | ψmψCGmψCGAGACCmψGGCAGAGCmψmψCmψACAGAAAGAAGCmψGAAGGAGGmψ | |
| | GmψGGAAGCCmψGCCGmψGGGAAGCCCCGCmψGCCAAGAGAGmψGAAGCmψGGAC | |
| | mψAAGCmψGCCmψmψCmψGCGGGGCmψmψGCCmψmψCmψGGCCAmψGCCCmψmψC | |
| | mψmψCmψCmψCCCmψmψGCACCmψGmψACCmψCmψmψGGmψCmψmψmψGAAmψAA | |
| | AGCCmψGAGmψAGGAAGmψCmψAGAAAAAAAAAAAAAAAAAAAAAAAAAAAAAAA | |
| | AAAAAAAAAAAAAAAAAAAAAAAAAAAAAAAAAAAAAAAAAAAAAAAA | |
| 19838 | AGGAAATAAGAGAGAAAAGAAGAGTAAGAAGAAATATAAGAGCCACCATGGCCCC | Full-length |
| | TGCTGCCAAGAGAGTGAAGCTGGATAGCAGACAGGAGATCAAGCGGATTAATAAA | DNA |
| | ATTCGGAGAAGACTGGTGAAGGATTCTAACACAAAGAAGGCTGGCAAGACAGGCC | sequence |
| | CTATGAAGACACTGCTGGTGAGAGTGATGACACCCGACCTGAGAGAAAGACTGGA | of mRNA |
| | AAACCTGAGAAAGAAGCCTGAGAATATCCCCCAGCCCATCAGCAACACAAGCCGG | encoding |
| | GCCAACCTGAATAAGCTGCTGACCGACTACACCGAAATGAAGAAGGCCATCCTGC | CasX 491 |
| | ACGTGTATTGGGAAGAGTTCCAGAAAGACCCAGTCGGCCTGATGAGCAGAGTGGC | |
| | TCAGCCTGCCAGCAAGAAGATCGATCAGAACAAGCTGAAGCCCGAAATGGACGAG | |
| | AAGGGGAACCTGACAACCGCCGGCTTTGCCTGTAGCCAGTGCGGCCAGCCCCTGT | |
| | TTGTGTACAAACTGGAACAGGTGAGCGAAAAGGGCAAGGCTTACACGAATTACTT | |
| | CGGCAGATGCAACGTGGCCGAGCACGAGAAGCTGATCCTGCTGGCCCAGCTGAAG | |
| | CCTGAGAAGGATAGCGATGAGGCAGTGACATATTCCCTGGGCAAGTTCGGACAGC | |
| | GGGCCCTGGATTTTTATTCCATTCATGTGACCAAGGAATCCACCCACCCCGTCAA | |
| | GCCTCTTGCCCAAATTGCCGGCAACAGATACGCCAGCGGCCCCGTGGGCAAGGCC | |
| | CTGAGCGACGCCTGTATGGGCACCATCGCCAGCTTCCTGTCTAAGTACCAGGACA | |
| | TTATCATCGAGCACCAGAAGGTGGTGAAGGGCAACCAGAAGAGACTGGAGAGCCT | |
| | GCGCGAGCTGGCCGGCAAGGAAAACCTGGAGTATCCTAGCGTGACCCTGCCTCCT | |
| | CAGCCTCATACAAAGGAGGGCGTGGATGCCTACAACGAAGTGATCGCCCGGGTGC | |
| | GGATGTGGGTGAACCTGAATCTGTGGCAGAAGCTGAAGCTGTCTAGAGACGACGC | |
| | CAAGCCCCTGCTGAGACTGAAGGGCTTCCCCAGCTTCCCTCTGGTGGAGAGACAG | |
| | GCAAATGAAGTGGACTGGTGGGACATGGTGTGTAACGTGAAGAAGCTGATCAATG | |
| | AGAAGAAGGAGGACGGCAAAGTGTTCTGGCAGAATCTGGCCGGCTACAAGCGTCA | |
| | GGAGGCCCTGCGGCCCTACCTGAGCAGCGAGGAAGACAGAAAGAAGGGCAAGAAG | |
| | TTCGCCCGGTATCAGCTGGGGGACCTGCTGCTGCACCTCGAGAAGAAGCACGGCG | |
| | AAGACTGGGGGAAGGTGTACGATGAGGCCTGGGAGCGGATCGATAAGAAGGTGGA | |
| | GGGCCTGAGCAAGCACATCAAGCTGGAGGAGGAACGGAGATCTGAGGACGCCCAG | |
| | AGCAAGGCCGCCCTGACCGACTGGCTGAGAGCCAAGGCCAGCTTCGTCATCGAGG | |
| | GGCTGAAGGAGGCCGACAAGGACGAGTTCTGCCGGTGCGAACTGAAGCTGCAGAA | |
| | GTGGTACGGAGATCTGAGAGGCAAACCTTTCGCCATCGAGGCCGAGAACAGCATC | |
| | CTGGACATCAGCGGCTTCAGCAAGCAGTACAACTGCGCCTTTATTTGGCAGAAGG | |
| | ACGGAGTGAAGAAGCTGAACCTGTACCTGATCATCAACTATTTCAAGGGCGGCAA | |
| | GCTGAGATTCAAGAAGATCAAGCCTGAAGCCTTCGAGGCCAACAGATTCTACACC | |
| | GTGATTAACAAGAAAAGCGGAGAGATCGTGCCAATGGAAGTGAACTTCAACTTCG | |
| | ACGACCCTAACCTGATCATCCTGCCCCTGGCATTTGGCAAGCGGCAGGGCAGAGA | |
| | GTTCATCTGGAACGACCTGCTGTCTCTGGAGACCGGCAGCCTGAAGCTGGCCAAC | |
| | GGCAGAGTGATCGAGAAGACACTGTACAACAGACGAACCAGACAAGACGAGCCCG | |
| | CCCTGTTTGTGGCCCTGACCTTCGAGAGAAGAGAGGTGCTGGACAGCAGCAATAT | |
| | CAAGCCTATGAACCTGATCGGCGTGGACCGGGGCGAGAACATCCCTGCCGTGATC | |
| | GCCCTTACCGACCCCGAGGGATGCCCTCTGAGCCGGTTTAAAGACAGCCTGGGCA | |
| | ACCCTACCCACATCCTGAGAATTGGCGAGTCCTACAAGGAGAAGCAGAGAACCAT | |
| | CCAGGCCAAGAAGGAGGTGGAGCAGCGGCGGGCTGGCGGCTACTCCCGGAAGTAC | |
| | GCCAGCAAGGCCAAGAACCTGGCCGACGACATGGTTAGAAATACCGCCAGAGACC | |
| | TCCTGTACTACGCTGTGACCCAGGACGCCATGCTGATCTTCGAGAACCTGAGCAG | |
| | AGGCTTCGGCAGACAGGGCAAGAGAACCTTCATGGCCGAGAGACAGTACACCCGG | |
| | ATGGAGGACTGGCTGACCGCCAAGCTGGCCTACGAGGGCCTGTCTAAGACCTACC | |
| | TGTCCAAGACCTTGGCACAGTACACCAGCAAGACATGCTCTAACTGCGGCTTCAC | |
| | AATCACGAGCGCCGACTACGACCGGGTGCTGGAGAAACTGAAGAAGACCGCCACA | |
| | GGCTGGATGACCACCATTAACGGCAAGGAGCTGAAGGTGGAGGGCCAGATCACCT | |
| | ACTACAACAGGTACAAACGGCAGAACGTGGTGAAGGACCTGAGCGTGGAACTGGA | |
| | TAGACTGAGCGAGGAAAGCGTAAACAATGACATCAGCAGCTGGACCAAGGGCCGG | |
| | AGCGGCGAGGCCCTGAGCCTGCTGAAGAAGAGATTCTCCCACAGACCAGTGCAGG | |
| | AGAAGTTCGTGTGTCTGAACTGCGGCTTCGAGACCCACGCCGACGAGCAAGCCGC | |
| | CCTGAACATCGCCCGGTCTTGGCTTTTCCTGCGGAGCCAGGAGTACAAGAAGTAC | |
| | CAGACAAACAAGACCACAGGCAACACAGACAAGAGAGCCTTCGTCGAGACCTGGC | |
| | AGAGCTTCTACAGAAAGAAGCTGAAGGAGGTGTGGAAGCCTGCCGTGGGAAGCCC | |
| | CGCTGCCAAGAGAGTGAAGCTGGACTAAGCTGCCTTCTGCGGGGCTTGCCTTCTG | |
| | GCCATGCCCTTCTTCTCTCCCTTGCACCTGTACCTCTTGGTCTTTGAATAAAGCC | |
| | TGAGTAGGAAGTCTAGAAAAAAAAAAAAAAAAAAAAAAAAAAAAAAAAAAAAAAA | |
| | AAAAAAAAAAAAAAAAAAAAAAAAAAAAAAAAAAAAAAAA | |
| 19839 | AGGAAATAAGAGAGAAAAGAAGAGTAAGAAGAAATATAAGAGCCACCATGGCCCC | Full-length |
| | TGCTGCCAAGAGAGTGAAGCTGGATAGCAGACAGGAGATCAAGCGGATTAATAAA | DNA |
| | ATTCGGAGAAGACTGGTGAAGGATTCTAACACAAAGAAGGCTGGCAAGACAGGCC | sequence |
| | CTATGAAGACACTGCTGGTGAGAGTGATGACACCCGACCTGAGAGAAAGACTGGA | encoding |
| | AAACCTGAGAAAGAAGCCTGAGAATATCCCCCAGCCCATCAGCAACACAAGCCGG | CasX 515 |
| | GCCAACCTGAATAAGCTGCTGACCGACTACACCGAAATGAAGAAGGCCATCCTGC | |
| | ACGTGTATTGGGAAGAGTTCCAGAAAGACCCAGTCGGCCTGATGAGCAGAGTGGC | |
| | TCAGCCTGCCAGCAAGAAGATCGATCAGAACAAGCTGAAGCCCGAAATGGACGAG | |
| | AAGGGGAACCTGACAACCGCCGGCTTTGCCTGTAGCCAGTGCGGCCAGCCCCTGT | |
| | TTGTGTACAAACTGGAACAGGTGAGCGAAAAGGGCAAGGCTTACACGAATTACTT | |
| | CGGCAGATGCAACGTGGCCGAGCACGAGAAGCTGATCCTGCTGGCCCAGCTGAAG | |
| | CCTGAGAAGGATAGCGATGAGGCAGTGACATATTCCCTGGGCAAGTTCGGACAGC | |
| | GGGCCCTGGATTTTTATTCCATTCATGTGACCAAGGAATCCACCCACCCCGTCAA | |
| | GCCTCTTGCCCAAATTGCCGGCAACAGATACGCCAGCGGCCCCGTGGGCAAGGCC | |
| | CTGAGCGACGCCTGTATGGGCACCATCGCCAGCTTCCTGTCTAAGTACCAGGACA | |
| | TTATCATCGAGCACCAGAAGGTGGTGAAGGGCAACCAGAAGAGACTGGAGAGCCT | |
| | GCGCGAGCTGGCCGGCAAGGAAAACCTGGAGTATCCTAGCGTGACCCTGCCTCCT | |
| | CAGCCTCATACAAAGGAGGGCGTGGATGCCTACAACGAAGTGATCGCCCGGGTGC | |
| | GGATGTGGGTGAACCTGAATCTGTGGCAGAAGCTGAAGCTGTCTAGAGACGACGC | |
| | CAAGCCCCTGCTGAGACTGAAGGGCTTCCCCAGCTTCCCTCTGGTGGAGAGACAG | |
| | GCAAATGAAGTGGACTGGTGGGACATGGTGTGTAACGTGAAGAAGCTGATCAATG | |
| | AGAAGAAGGAGGACGGCAAAGTGTTCTGGCAGAATCTGGCCGGCTACAAGCGTCA | |
| | GGAGGCCCTGCGGCCCTACCTGAGCAGCGAGGAAGACAGAAAGAAGGGCAAGAAG | |
| | TTCGCCCGGTATCAGCTGGGGGACCTGCTGCTGCACCTCGAGAAGAAGCACGGCG | |
| | AAGACTGGGGGAAGGTGTACGATGAGGCCTGGGAGCGGATCGATAAGAAGGTGGA | |
| | GGGCCTGAGCAAGCACATCAAGCTGGAGGAGGAACGGAGATCTGAGGACGCCCAG | |
| | AGCAAGGCCGCCCTGACCGACTGGCTGAGAGCCAAGGCCAGCTTCGTCATCGAGG | |
| | GGCTGAAGGAGGCCGACAAGGACGAGTTCTGCCGGTGCGAACTGAAGCTGCAGAA | |
| | GTGGTACGGAGATCTGAGAGGCAAACCTTTCGCCATCGAGGCCGAGAACAGCATC | |
| | CTGGACATCAGCGGCTTCAGCAAGCAGTACAACTGCGCCTTTATTTGGCAGAAGG | |
| | ACGGAGTGAAGAAGCTGAACCTGTACCTGATCATCAACTATTTCAAGGGCGGCAA | |
| | GCTGAGATTCAAGAAGATCAAGCCTGAAGCCTTCGAGGCCAACAGATTCTACACC | |
| | GTGATTAACAAGAAAAGCGGAGAGATCGTGCCAATGGAAGTGAACTTCAACTTCG | |
| | ACGACCCTAACCTGATCATCCTGCCCCTGGCATTTGGCAAGCGGCAGGGCAGAGA | |
| | GTTCATCTGGAACGACCTGCTGTCTCTGGAGACCGGCAGCCTGAAGCTGGCCAAC | |
| | GGCAGAGTGATCGAGAAGACACTGTACAACAGACGAACCAGACAAGACGAGCCCG | |
| | CCCTGTTTGTGGCCCTGACCTTCGAGAGAAGAGAGGTGCTGGACAGCAGCAATAT | |
| | CAAGCCTATGAACCTGATCGGCGTGGACCGGGGCGAGAACATCCCTGCCGTGATC | |
| | GCCCTTACCGACCCCGAGGGATGCCCTCTGAGCCGGTTTAAAGACAGCCTGGGCA | |
| | ACCCTACCCACATCCTGAGAATTGGCGAGTCCTACAAGGAGAAGCAGAGAACCAT | |
| | CCAGGCCAAGAAGGAGGTGGAGCAGCGGCGGGCTGGCGGCTACTCCCGGAAGTAC | |
| | GCCAGCAAGGCCAAGAACCTGGCCGACGACATGGTTAGAAATACCGCCAGAGACC | |
| | TCCTGTACTACGCTGTGACCCAGGACGCCATGCTGATCTTCGAGAACCTGAGCAG | |
| | AGGCTTCGGCAGACAGGGCAAGAGAACCTTCATGGCCGAGAGACAGTACACCCGG | |
| | ATGGAGGACTGGCTGACCGCCAAGCTGGCCTACGAGGGCCTGCCCTCTAAGACCT | |
| | ACCTGTCCAAGACCTTGGCACAGTACACCAGCAAGACATGCTCTAACTGCGGCTT | |
| | CACAATCACGAGCGCCGACTACGACCGGGTGCTGGAGAAACTGAAGAAGACCGCC | |
| | ACAGGCTGGATGACCACCATTAACGGCAAGGAGCTGAAGGTGGAGGGCCAGATCA | |
| | CCTACTACAACAGGTACAAACGGCAGAACGTGGTGAAGGACCTGAGCGTGGAACT | |
| | GGATAGACTGAGCGAGGAAAGCGTAAACAATGACATCAGCAGCTGGACCAAGGGC | |
| | CGGAGCGGCGAGGCCCTGAGCCTGCTGAAGAAGAGATTCTCCCACAGACCAGTGC | |
| | AGGAGAAGTTCGTGTGTCTGAACTGCGGCTTCGAGACCCACGCCGACGAGCAAGC | |
| | CGCCCTGAACATCGCCCGGTCTTGGCTTTTCCTGCGGAGCCAGGAGTACAAGAAG | |
| | TACCAGACAAACAAGACCACAGGCAACACAGACAAGAGAGCCTTCGTCGAGACCT | |
| | GGCAGAGCTTCTACAGAAAGAAGCTGAAGGAGGTGTGGAAGCCTGCCGTGGGAAG | |
| | CCCCGCTGCCAAGAGAGTGAAGCTGGACTAAGCTGCCTTCTGCGGGGCTTGCCTT | |
| | CTGGCCATGCCCTTCTTCTCTCCCTTGCACCTGTACCTCTTGGTCTTTGAATAAA | |
| | GCCTGAGTAGGAAGTCTAGAAAAAAAAAAAAAAAAAAAAAAAAAAAAAAAAAAAA | |
| | AAAAAAAAAAAAAAAAAAAAAAAAAAAAAAAAAAAAAAAAAAA | |
| 19840 | AGGAAATAAGAGAGAAAAGAAGAGTAAGAAGAAATATAAGAGCCACCATGGCCCC | Full-length |
| | TGCTGCCAAGAGAGTGAAGCTGGATAGCAGACAGGAGATCAAGCGGATTAATAAA | DNA |
| | ATTCGGAGAAGACTGGTGAAGGATTCTAACACAAAGAAGGCTGGCAAGACACGGG | sequence |
| | GCCCTATGAAGACACTGCTGGTGAGAGTGATGACACCCGACCTGAGAGAAAGACT | encoding |
| | GGAAAACCTGAGAAAGAAGCCTGAGAATATCCCCCAGCCCATCAGCAACACAAGC | CasX 676 |
| | CGGGCCAACCTGAATAAGCTGCTGACCGACTACACCGAAATGAAGAAGGCCATCC | |
| | TGCACGTGTATTGGGAAGAGTTCCAGAAAGACCCAGTCGGCCTGATGAGCAGAGT | |
| | GGCTCAGCCTGCCAGCAAGAAGATCGATCAGAACAAGCTGAAGCCCGAAATGGAC | |
| | GAGAAGGGGAACCTGACAACCGCCGGCTTTGCCTGTAGCCAGTGCGGCCAGCCCC | |
| | TGTTTGTGTACAAACTGGAACAGGTGAGCGAAAAGGGCAAGGCTTACACGAATTA | |
| | CTTCGGCAGATGCAACGTGGCCGAGCACGAGAAGCTGATCAAGCTGGCCCAGCTG | |
| | AAGCCTGAGAAGGATAGCGATGAGGCAGTGACATATTCCCTGGGCAAGTTCGGAC | |
| | AGCGGGCCCTGGATTTTTATTCCATTCATGTGACCAAGGAATCCACCCACCCCGT | |
| | CAAGCCTCTTGCCCAAATTGCCGGCAACAGATACGCCTCCAGCCCCGTGGGCAAG | |
| | GCCCTGAGCGACGCCTGTATGGGCACCATCGCCAGCTTCCTGTCTAAGTACCAGG | |
| | ACATTATCATCGAGCACCAGAAGGTGGTGAAGGGCAACCAGAAGAGACTGGAGAG | |
| | CCTGCGCGAGCTGGCCGGCAAGGAAAACCTGGAGTATCCTAGCGTGACCCTGCCT | |
| | CCTCAGCCTCATACAAAGGAGGGCGTGGATGCCTACAACGAAGTGATCGCCCGGG | |
| | TGCGGATGTGGGTGAACCTGAATCTGTGGCAGAAGCTGAAGCTGTCTAGAGACGA | |
| | CGCCAAGCCCCTGCTGAGACTGAAGGGCTTCCCCAGCTTCCCTCTGGTGGAGAGA | |
| | CAGGCAAATGAAGTGGACTGGTGGGACATGGTGTGTAACGTGAAGAAGCTGATCA | |
| | ATGAGAAGAAGGAGGACGGCAAAGTGTTCTGGCAGAATCTGGCCGGCTACAAGCG | |
| | TCAGGAGGCCCTGCGGCCCTACCTGAGCAGCGAGGAAGACAGAAAGAAGGGCAAG | |
| | AAGTTCGCCCGGTATCAGCTGGGGGACCTGCTGCTGCACCTCGAGAAGAAGCACG | |
| | GCGAAGACTGGGGGAAGGTGTACGATGAGGCCTGGGAGCGGATCGATAAGAAGGT | |
| | GGAGGGCCTGAGCAAGCACATCAAGCTGGAGGAGGAACGGAGATCTGAGGACGCC | |
| | CAGAGCAAGGCCGCCCTGACCGACTGGCTGAGAGCCAAGGCCAGCTTCGTCATCG | |
| | AGGGGCTGAAGGAGGCCGACAAGGACGAGTTCTGCCGGTGCGAACTGAAGCTGCA | |
| | GAAGTGGTACGGAGATCTGAGAGGCAAACCTTTCGCCATCGAGGCCGAGAACAGC | |
| | ATCCTGGACATCAGCGGCTTCAGCAAGCAGTACAACTGCGCCTTTATTTGGCAGA | |
| | AGGACGGAGTGAAGAAGCTGAACCTGTACCTGATCATCAACTATTTCAAGGGCGG | |
| | CAAGCTGAGATTCAAGAAGATCAAGCCTGAAGCCTTCGAGGCCAACAGATTCTAC | |
| | ACCGTGATTAACAAGAAAAGCGGAGAGATCGTGCCAATGGAAGTGAACTTCAACT | |
| | TCGACGACCCTAACCTGATCATCCTGCCCCTGGCATTTGGCAAGCGGCAGGGCAG | |
| | AGAGTTCATCTGGAACGACCTGCTGTCTCTGGAGACCGGCAGCCTGAAGCTGGCC | |
| | AACGGCAGAGTGATCGAGAAGACACTGTACAACAGACGAACCAGACAAGACGAGC | |
| | CCGCCCTGTTTGTGGCCCTGACCTTCGAGAGAAGAGAGGTGCTGGACAGCAGCAA | |
| | TATCAAGCCTATGAACCTGATCGGCGTGGACCGGGGCGAGAACATCCCTGCCGTG | |
| | ATCGCCCTTACCGACCCCGAGGGATGCCCTCTGAGCCGGTTTAAAGACAGCCTGG | |
| | GCAACCCTACCCACATCCTGAGAATTGGCGAGTCCTACAAGGAGAAGCAGAGAAC | |
| | CATCCAGGCCAAGAAGGAGGTGGAGCAGCGGCGGGCTGGCGGCTACTCCCGGAAG | |
| | TACGCCAGCAAGGCCAAGAACCTGGCCGACGACATGGTTAGAAATACCGCCAGAG | |
| | ACCTCCTGTACTACGCTGTGACCCAGGACGCCATGCTGATCTTCGAGAACCTGAG | |
| | CAGAGGCTTCGGCAGACAGGGCAAGAGAACCTTCATGGCCGAGAGACAGTACACC | |
| | CGGATGGAGGACTGGCTGACCGCCAAGCTGGCCTACGAGGGCCTGCCCTCTAAGA | |
| | CCTACCTGTCCAAGACCTTGGCACAGTACACCAGCAAGACATGCTCTAACTGCGG | |
| | CTTCACAATCACGAGCGCCGACTACGACCGGGTGCTGGAGAAACTGAAGAAGACC | |
| | GCCACAGGCTGGATGACCACCATTAACGGCAAGGAGCTGAAGGTGGAGGGCCAGA | |
| | TCACCTACTACAACAGGTACAAACGGCAGAACGTGGTGAAGGACCTGAGCGTGGA | |
| | ACTGGATAGACTGAGCGAGGAAAGCGTAAACAATGACATCAGCAGCTGGACCAAG | |
| | GGCCGGAGCGGCGAGGCCCTGAGCCTGCTGAAGAAGAGATTCTCCCACAGACCAG | |
| | TGCAGGAGAAGTTCGTGTGTCTGAACTGCGGCTTCGAGACCCACGCCGACGAGCA | |
| | AGCCGCCCTGAACATCGCCCGGTCTTGGCTTTTCCTGCGGAGCCAGGAGTACAAG | |
| | AAGTACCAGACAAACAAGACCACAGGCAACACAGACAAGAGAGCCTTCGTCGAGA | |
| | CCTGGCAGAGCTTCTACAGAAAGAAGCTGAAGGAGGTGTGGAAGCCTGCCGTGGG | |
| | AAGCCCCGCTGCCAAGAGAGTGAAGCTGGACTAAGCTGCCTTCTGCGGGGCTTGC | |
| | CTTCTGGCCATGCCCTTCTTCTCTCCCTTGCACCTGTACCTCTTGGTCTTTGAAT | |
| | AAAGCCTGAGTAGGAAGTCTAGAAAAAAAAAAAAAAAAAAAAAAAAAAAAAAAAA | |
| | AAAAAAAAAAAAAAAAAAAAAAAAAAAAAAAAAAAAAAAAAAAAAA | |
| 19841 | AGGAAATAAGAGAGAAAAGAAGAGTAAGAAGAAATATAAGAGCCACCATGGCCCC | Full-length |
| | TGCTGCCAAGAGAGTGAAGCTGGATAGCAGACAGGAGATCAAGCGGATTAATAAA | DNA |
| | ATTCGGAGAAGACTGGTGAAGGATTCTAACACAAAGAAGGCTGGCAAGACAGGCC | sequence |
| | CTATGAAGACACTGCTGGTGAGAGTGATGACACCCGACCTGAGAGAAAGACTGGA | encoding |
| | AAACCTGAGAAAGAAGCCTGAGAATATCCCCCAGCCCATCAGCAACACAAGCCGG | CasX 812 |
| | GCCAACCTGAATAAGCTGCTGACCGACTACACCGAAATGAAGAAGGCCATCCTGC | |
| | ACGTGTATTGGGAAGAGTTCCAGAAAGACCCAGTCGGCCTGATGAGCAGAGTGGC | |
| | TCAGCCTGCCAGCAAGAAGATCGATCAGAACAAGCTGAAGCCCGAAATGGACGAG | |
| | AAGGGGAACCTGACAACCGCCGGCTTTGCCTGTAGCCAGTGCGGCCAGCCCCTGT | |
| | TTGTGTACAAACTGGAACAGGTGAGCGAAAAGGGCAAGGCTTACACGAATTACTT | |
| | CGGCAGATGCAACGTGGCCGAGCACGAGAAGCTGATCCTGCTGGCCCAGCTGAAG | |
| | CCTGAGAAGGATAGCGATGAGGCAGTGACATATTCCCTGGGCAAGTTCGGACAGC | |
| | GGGCCCTGGATTTTTATTCCATTCATGTGACCAAGGAATCCACCCACCCCGTCAA | |
| | GCCTCTTGCCCAAATTGCCGGCAACAGATACGCCAGCGGCCCCGTGGGCAAGGCC | |
| | CTGAGCGACGCCTGTATGGGCACCATCGCCAGCTTCCTGTCTAAGTACCAGGACA | |
| | TTATCATCGAGCACCAGAAGGTGGTGAAGGGCAACCAGAAGAGACTGGAGAGCCT | |
| | GCGCGAGCTGGCCGGCAAGGAAAACCTGGAGTATCCTAGCGTGACCCTGCCTCCT | |
| | CAGCCTCATACAAAGGAGGGCGTGGATGCCTACAACGAAGTGATCGCCCGGGTGC | |
| | GGATGTGGGTGAACCTGAATCTGTGGCAGAAGCTGAAGCTGTCTAGAGACGACGC | |
| | CAAGCCCCTGCTGAGACTGAAGAAGTTCCCCAGCTTCCCTCTGGTGGAGAGACAG | |
| | GCAAATGAAGTGGACTGGTGGGACATGGTGTGTAACGTGAAGAAGCTGATCAATG | |
| | AGAAGAAGGAGGACGGCAAAGTGTTCTGGCAGAATCTGGCCGGCTACAAGCGTCA | |
| | GGAGGCCCTGCGGCCCTACCTGAGCAGCGAGGAAGACAGAAAGAAGGGCAAGAAG | |
| | TTCGCCCGGTATCAGCTGGGGGACCTGCTGCTGCACCTCGAGAAGAAGCACGGCG | |
| | AAGACTGGGGGAAGGTGTACGATGAGGCCTGGGAGCGGATCGATAAGAAGGTGGA | |
| | GGGCCTGAGCAAGCACATCAAGCTGGAGGAGGAACGGAGATCTGAGGACGCCCAG | |
| | AGCAAGGCCGCCCTGACCGACTGGCTGAGAGCCAAGGCCAGCTTCGTCATCGAGG | |
| | GGCTGAAGGAGGCCGACAAGGACGAGTTCTGCCGGTGCGAACTGAAGCTGCAGAA | |
| | GTGGTACGGAGATCTGAGAGGCAAACCTTTCGCCATCGAGGCCGAGAACAGCATC | |
| | CTGGACATCAGCGGCTTCAGCAAGCAGTACAACTGCGCCTTTATTTGGCAGAAGG | |
| | ACGGAGTGAAGAAGCTGAACCTGTACCTGATCATCAACTATTTCAAGGGCGGCAA | |
| | GCTGAGATTCAAGAAGATCAAGCCTGAAGCCTTCGAGGCCAACAGATTCTACACC | |
| | GTGATTAACAAGAAAAGCGGAGAGATCGTGCCAATGGAAGTGAACTTCAACTTCG | |
| | ACGACCCTAACCTGATCATCCTGCCCCTGGCATTTGGCAAGCGGCAGGGCAGAGA | |
| | GTTCATCTGGAACGACCTGCTGTCTCTGGAGACCGGCAGCCTGAAGCTGGCCAAC | |
| | GGCAGAGTGATCGAGAAGACACTGTACAACAGACGAACCAGACAAGACGAGCCCG | |
| | CCCTGTTTGTGGCCCTGACCTTCGAGAGAAGAGAGGTGCTGGACAGCAGCAATAT | |
| | CAAGCCTATGAACCTGATCGGCGTGGACCGGGGCGAGAACATCCCTGCCGTGATC | |
| | GCCCTTACCGACCCCGAGGGATGCCCTCTGAGCCGGTTTAAAGACAGCCTGGGCA | |
| | ACCCTACCCACATCCTGAGAATTGGCGAGTCCTACAAGGAGAAGCAGAGAACCAT | |
| | CCAGGCCAAGAAGGAGGTGGAGCAGCGGCGGGCTGGCGGCTACTCCCGGAAGTAC | |
| | GCCAGCAAGGCCAAGAACCTGGCCGACGACATGGTTAGAAATACCGCCAGAGACC | |
| | TCCTGTACTACGCTGTGACCCAGGACGCCATGCTGATCTTCGAGAACCTGAGCAG | |
| | AGGCTTCGGCAGACAGGGCAAGAGAACCTTCATGGCCGAGAGACAGTACACCCGG | |
| | ATGGAGGACTGGCTGACCGCCAAGCTGGCCTACGAGGGCCTGCCCTCTAAGACCT | |
| | ACCTGTCCAAGACCTTGGCACAGTACACCAGCAAGACATGCTCTAACTGCGGCTT | |
| | CACAATCACGAGCGCCGACTACGACCGGGTGCTGGAGAAACTGAAGAAGACCGCC | |
| | ACAGGCTGGATGACCACCATTAACGGCAAGGAGCTGAAGGTGGAGGGCCAGATCA | |
| | CCTACTACAACAGGTACAAACGGCAGAACGTGGTGAAGGACCTGAGCGTGGAACT | |
| | GGATAGACTGAGCGAGGAAAGCGTAAACAATGACATCAGCAGCTGGACCAAGGGC | |
| | CGGAGCGGCGAGGCCCTGAGCCTGCTGAAGAAGAGATTCTCCCACAGACCAGTGC | |
| | AGGAGAAGTTCGTGTGTCTGAACTGCGGCTTCGAGACCCACGCCGACGAGCAAGC | |
| | CGCCCTGAACATCGCCCGGTCTTGGCTTTTCCTGCGGAGCCAGGAGTACAAGAAG | |
| | TACCAGACAAACAAGACCACAGGCAACACAGACAAGAGAGCCTTCGTCGAGACCT | |
| | GGCAGAGCTTCTACAGAAAGAAGCTGAAGGAGGTGTGGAAGCCTGCCGTGGGAAG | |
| | CCCCGCTGCCAAGAGAGTGAAGCTGGACTAAGCTGCCTTCTGCGGGGCTTGCCTT | |
| | CTGGCCATGCCCTTCTTCTCTCCCTTGCACCTGTACCTCTTGGTCTTTGAATAAA | |
| | GCCTGAGTAGGAAGTCTAGAAAAAAAAAAAAAAAAAAAAAAAAAAAAAAAAAAAA | |
| | AAAAAAAAAAAAAAAAAAAAAAAAAAAAAAAAAAAAAAAAAAA | |

### IV. Guide Nucleic Acids of the Systems for Genetic Editing of Target Nucleic Acid

[0158] In another aspect, the present disclosure provides systems comprising a messenger RNA (mRNA) sequence encoding an engineered CasX protein and one or more guide ribonucleic acids (gRNA) for use in modifying an LPA target nucleic acid in a cell. As used herein, the term “gRNA” covers naturally-occurring molecules and gRNA variants, including chimeric gRNA variants comprising domains from different gRNA, gRNAs of the disclosure comprise a scaffold and a targeting sequence complementary to a target nucleic acid of a cell. As used herein, a “system”, used interchangeably with “composition”, can comprise an mRNA encoding an engineered CasX protein and one or more gRNAs of any of the embodiments disclosed herein, which can be utilized as gene editing pairs.

[0159] In some embodiments, the disclosure provides systems comprising an mRNA encoding an engineered CasX protein and one or more gRNA as a CasX; gRNA system designed, upon expression of the engineered CasX protein in a transfected cell, to form a ribonucleoprotein (RNP) complex with the gRNA, to target and edit specific locations in the LPA target nucleic acid sequence of the cell. The gRNA provides target specificity to the complex by including a targeting sequence (or “spacer”) having a nucleotide sequence that is complementary to a sequence of the target nucleic acid sequence while the engineered CasX protein of the system provides the site-specific activity such as cleavage or nicking of the target sequence that is guided to a target site (e.g., stabilized at a target site) within a target nucleic acid sequence by virtue of its association with the gRNA. Both single-stranded cleavage and double-stranded cleavage are possible, and double-stranded cleavage can occur as a result of two distinct single-stranded cleavage events by the engineered CasX protein. In some embodiments, indels are introduced in the target nucleic acid by the CasX; gRNA systems of the embodiments described herein and cellular repair systems that can disrupt the protein reading frame of the targeted gene.

[0160] Embodiments of gRNAs and formulations of mRNAs and gRNAs for use in the editing of target nucleic acids are described herein, below.

a. Reference gRNA and gRNA Variants

[0161] As used herein, a “reference gRNA” refers to a CRISPR guide ribonucleic acid comprising a wild-type sequence of a naturally-occurring gRNA. In some embodiments, a gRNA scaffold of the disclosure may be subjected to one or more mutagenesis methods, such as the mutagenesis methods described in WO2022120095A1 and WO2020247882A1, incorporated by reference herein, which may include Deep Mutational Evolution (DME), deep mutational scanning (DMS), error prone PCR, cassette mutagenesis, random mutagenesis, staggered extension PCR, gene shuffling, domain swapping, or chemical modification to generate one or more gRNA variants with enhanced or varied properties relative to the gRNA scaffold that was modified. The activity of the gRNA scaffold from which a gRNA variant was derived may be used as a benchmark against which the activity of the gRNA variant is compared, thereby measuring improvements in function or other characteristics of the gRNA scaffold.

[0162] Table 10 provides the sequences of reference gRNA tracr and scaffold sequences. In some embodiments, the disclosure provides gRNA sequences wherein the gRNA has a scaffold comprising a sequence having one or more nucleotide modifications relative to a reference gRNA sequence of any one of SEQ ID NOS: 451-463 of Table 10.

TABLE 10
Reference gRNA tracr and scaffold sequences

| SEQ ID NO. | Nucleotide Sequence |
|---|---|
| 451 | ACAUCUGGCGCGUUUAUUCCAUUACUUUGGAGCCAGUCCCAGCGACUAUGUCGUAUGGACG |
| | AAGCGCUUAUUUAUCGGAGAGAAACCGAUAAGUAAAACGCAUCAAAG |
| 452 | UACUGGCGCUUUUAUCUCAUUACUUUGAGAGCCAUCACCAGCGACUAUGUCGUAUGGGUAA |
| | AGCGCUUAUUUAUCGGAGAGAAAUCCGAUAAAUAAGAAGCAUCAAAG |
| 453 | ACAUCUGGCGCGUUUAUUCCAUUACUUUGGAGCCAGUCCCAGCGACUAUGUCGUAUGGACG |
| | AAGCGCUUAUUUAUCGGAGA |
| 454 | ACAUCUGGCGCGUUUAUUCCAUUACUUUGGAGCCAGUCCCAGCGACUAUGUCGUAUGGACG |
| | AAGCGCUUAUUUAUCGG |
| 455 | UACUGGCGCUUUUAUCUCAUUACUUUGAGAGCCAUCACCAGCGACUAUGUCGUAUGGGUAA |
| | AGCGCUUAUUUAUCGGAGA |
| 456 | UACUGGCGCUUUUAUCUCAUUACUUUGAGAGCCAUCACCAGCGACUAUGUCGUAUGGGUAA |
| | AGCGCUUAUUUAUCGG |
| 457 | GUUUACACACUCCCUCUCAUAGGGU |
| 458 | GUUUACACACUCCCUCUCAUGAGGU |
| 459 | UUUUACAUACCCCCUCUCAUGGGAU |
| 460 | GUUUACACACUCCCUCUCAUGGGGG |
| 461 | CCAGCGACUAUGUCGUAUGG |
| 462 | GCGCUUAUUUAUCGGAGAGAAAUCCGAUAAAUAAGAAGC |
| 463 | GGCGCUUUUAUCUCAUUACUUUGAGAGCCAUCACCAGCGACUAUGUCGUAUGGGUAAAGCG |
| | CUUAUUUAUCGGA |

b. GRNA Domains and their Function

[0163] The gRNAs of the systems of the disclosure comprise two segments: a targeting sequence and a protein-binding segment. The targeting segment of a gRNA includes a nucleotide sequence (referred to interchangeably as a guide sequence, a spacer, a targeter, or a targeting sequence) that is complementary to (and therefore hybridizes with) a specific sequence (a target site) within the target nucleic acid sequence (e.g., a strand of a double stranded target DNA, a target ssRNA, a target ssDNA, etc.), described more fully below. The targeting sequence of a gRNA is capable of binding to a target nucleic acid sequence, including, in the context of the present disclosure, a coding sequence, a complement of a coding sequence, a non-coding sequence, and to accessory elements. The protein-binding segment (or “activator” or “protein-binding sequence”) interacts with (e.g., binds to) a CasX protein as a complex, forming an RNP (described more fully, below). The protein-binding segment is alternatively referred to herein as a “scaffold”, which is comprised of several regions, described more fully, below. The properties and characteristics of CasX gRNA, both wild-type and variants, are described in WO2020247882A1, US20220220508A1, and WO2022120095A1, incorporated by reference herein.

[0164] In the case of a reference gRNA, the gRNA occurs naturally as a dual guide RNA (dgRNA), wherein the targeter and the activator portions each have a duplex-forming segment that have complementarity with one another and hybridize to one another to form a double stranded duplex (dsRNA duplex for a gRNA). The term “targeter” or “targeter RNA” is used herein to refer to a crRNA-like molecule (crRNA; “CRISPR RNA”) of a CasX dual guide RNA (and therefore of a CasX single guide RNA when the “activator” and the “targeter” are linked together, e.g., by intervening nucleotides). The crRNA has a 5′ region that anneals with the tracrRNA followed by the nucleotides of the targeting sequence. In the case of the gRNA for use in the systems of the disclosure, the scaffolds are designed such that the activator and targeter portions are covalently linked to one another (rather than hybridizing to one another) and comprise a single molecule, and can be referred to as a “single-molecule gRNA,” “single guide RNA”, a “single-molecule guide RNA,” a “one-molecule guide RNA”, or a “sgRNA”. The gRNA of the disclosure are all single molecule versions.

[0165] Collectively, the assembled gRNAs of the disclosure comprise distinct structured regions, or domains; the RNA triplex, the scaffold stem loop, the extended stem loop, the pseudoknot, and the targeting sequence that, in the embodiments of the disclosure is specific for a target nucleic acid and is located on the 3′ end of the gRNA. The RNA triplex, the scaffold stem loop, the pseudoknot and the extended stem loop, together with the unstructured triplex loop that bridges portions of the triplex, together, are referred to as the “scaffold” of the gRNA. In some cases, the scaffold stem further comprises a bubble. In other cases, the scaffold further comprises a triplex loop region. In still other cases, the scaffold further comprises a 5′ unstructured region. In some embodiments, the gRNA scaffolds of the disclosure for use in the CasX:gRNA systems comprise a scaffold stem loop having the sequence of CCAGCGACUAUGUCGUAGUGG (SEQ ID NO: 542), or a sequence having 1, 2, 3, 4, or 5 mismatches thereto. In some embodiments, the gRNA scaffolds of the disclosure comprise a scaffold stem loop having the sequence of CCAGCGACUAUGUCGUAGUGG (SEQ ID NO: 542) or a sequence having 1, 2, 3, 4, or 5 mismatches thereto.

[0166] Each of the structured domains contribute to establish the global RNA fold of the guide and retain functionality of the guide; particularly the ability to properly complex with the CasX protein. For example, the guide scaffold stem interacts with the helical I domain of CasX protein, while residues within the triplex, triplex loop, and pseudoknot stem interact with the OBD of the CasX protein. Together, these interactions confer the ability of the guide to bind and form an RNP with the CasX that retains stability, while the spacer (or targeting sequence) directs and defines the specificity of the RNP for binding a specific sequence of DNA.

[0167] Site-specific binding and/or cleavage of a target nucleic acid sequence (e.g., genomic DNA) by the CasX protein can occur at one or more locations (e.g., a sequence of a target nucleic acid) determined by base-pairing complementarity between the targeting sequence of the gRNA and the target nucleic acid sequence. Thus, for example, the gRNA of the disclosure have sequences complementarity to and therefore can hybridize with the target nucleic acid that is adjacent to a sequence complementary to a TC protospacer adjacent motif (PAM) motif or a PAM sequence, such as ATC, CTC, GTC, or TTC. Because the targeting sequence of a guide sequence hybridizes with a sequence of a target nucleic acid sequence, a targeting sequence can be modified by a user to hybridize with a specific target nucleic acid sequence, so long as the location of the PAM sequence is considered. By selection of the targeting sequences of the gRNA, defined regions of the target nucleic acid sequence or sequences bracketing a particular location within the target nucleic acid can be modified or edited using the CasX:gRNA systems described herein. In some embodiments, the targeting sequence of the gRNA has between 15 and 22 consecutive nucleotides. In some embodiments, the targeting sequence has 15, 16, 17, 18, 19, 20, 21, or 22 consecutive nucleotides. In some embodiments, the targeting sequence consists of 20 consecutive nucleotides. In some embodiments, the targeting sequence consists of 19 consecutive nucleotides. In some embodiments, the targeting sequence consists of 18 consecutive nucleotides. In some embodiments, the targeting sequence consists of 17 consecutive nucleotides. In some embodiments, the targeting sequence consists of 16 consecutive nucleotides. In some embodiments, the targeting sequence consists of 15 consecutive nucleotides.

[0168] By selection of the targeting sequences of the gRNA, defined regions of the target nucleic acid sequence can be modified or edited using the CasX:gRNA systems described herein. In some embodiments, the target nucleic acid comprises a PAM sequence located 5′ of the targeting sequence with at least a single nucleotide separating the PAM from the first nucleotide of the targeting sequence. In some embodiments, the PAM is located on the non-targeted strand of the target region, i.e. the strand that is complementary to the target nucleic acid.

[0169] As described herein in Example 1, a computational analysis was performed to identify a set of targeting sequences with desirable characteristics based on their predicted activity and specificity. In some embodiments, the targeting sequence is complementary to a single sequence in the LPA locus; i.e., the sequence is not duplicated in the gene. In some embodiments, the targeting sequence is complementary to a nucleic acid sequence that is unique within the LPA locus. In the foregoing embodiments, the use of a targeting sequence complementary to a single and/or unique sequence in the LPA locus avoids the introduction of multiple breaks in the LPA gene. Sequences within the LPA locus are highly repetitive, with multiple kringle IV (KIV) type 2 domains within the LPA coding sequence (see FIG. 1). Accordingly, without wishing to be bound by theory, it is thought that use of a specific targeting sequence that produces but one break in the LPA gene is important for avoiding chromosomal rearrangements, which may be deleterious. In some embodiments, the targeting sequence for use in the systems of the disclosure is not complementary to a sequence encoding a Kringle domain. The human LPA locus is found on chromosome 6, along with two genes that share a high degree of homologous sequences; the PLG gene, which encoded plasminogen, and the LPA-like pseudogene, LPAL.2. In some embodiments, a targeting sequence is not complementary to the human LPA-like pseudogene, LPAL2. In some embodiments, a targeting sequence is not complementary to human PLG.

[0170] In some embodiments, the targeting sequence for use in the systems of the disclosure is complementary to an exon of the LPA gene. In some embodiments, the targeting sequence of the gRNA for use in the systems of the disclosure is complementary to a sequence of an exon selected from the group consisting of exon 1, exon 2, exon 3, exon 4, exon 5, exon 6, exon 7, exon 8, exon 9, exon 10, exon 11, exon 12, exon 13, exon 14, exon 15, exon 16, exon 17, exon 18, exon 19, exon 20, exon 21, exon 22, exon 23, exon 24, exon 25, exon 26, exon 27, exon 28, exon 29, exon 30, exon 31, exon 32, exon 33, exon 34, exon 35, exon 36, exon 37, exon 38, and exon 39, wherein the identities of the exons correspond to those of human reference genome build hg38. In some embodiments, the targeting sequence of the gRNA for use in the systems of the disclosure is complementary to a sequence of an exon selected from the group consisting of exon 2, exon 17, exon 18, exon 19, exon 20, exon 21, exon 22, exon 23, exon 24, exon 25, exon 26, exon 27, exon 28, exon 29, exon 31, exon 32, exon 33, exon 34, exon 35, exon 36, exon 37, exon 38, and exon 39, wherein the identities of the exons correspond to those of human reference genome build hg38. In some embodiments, the targeting sequence of the gRNA for use in the systems of the disclosure is complementary to a sequence of an exon encoding a Kringle IV (KIV)-1, a KIV-2 I, a KIV-2 II, a KIV-2 III, a KIV-2 IV, a KIV-2 V, a KIV-2 VI, a KIV-3, a KIV-4, a KIV-5, a KIV-6, a KIV-6, a KIV-7, a KIV-8, a KIV-9), a KIV-10, a K V, a Protease 1, a Protease 2, a Protease 3, a Protease 4, a Protease 5, or a Protease 6 domain, wherein the identities of the domains correspond to those of human reference genome build hg38. In some embodiments, the targeting sequence for use in the systems of the disclosure is complementary to an intron of the LPA gene. In some embodiments, the targeting sequence of the gRNA for use in the systems of the disclosure is complementary to a sequence of an intron selected from the group consisting of intron 1, intron 2, intron 3, intron 4, intron 5, intron 6, intron 7, intron 8, intron 9, intron 10, intron 11, intron 12, intron 13, intron 14, intron 15, intron 16, intron 17, intron 18, intron 19, intron 20, intron 21, intron 22, intron 23, intron 24, intron 25, intron 26, intron 27, intron 28, intron 29, intron 30, intron 31, intron 32, intron 33, intron 34, intron 35, intron 36, intron 37, and intron 38, wherein the identities of the introns correspond to those of human reference genome build hg38. In some embodiments, the targeting sequence of the gRNA for use in the systems of the disclosure is complementary to a sequence of an intron selected from the group consisting of intron 1, intron 7, intron 17, intron 18, intron 19, intron 24, intron 26, intron 28, intron 33, intron 37, intron 38, wherein the identities of the introns correspond to those of human reference genome build hg38. In some embodiments, the targeting sequence of the gRNA is complementary to a sequence of an LPA intron-exon junction. In some embodiments, the targeting sequence of the gRNA is complementary to a sequence encoding an untranslated region (UTR) of the LPA gene. In some embodiments, the targeting sequence is complementary to a cis-regulatory element of the LPA gene. In some embodiments, the targeting sequence for use in the systems of the disclosure is complementary to a sequence proximal to the transcription start site of the LPA gene, e.g., within about 300 nucleotides, about 310 nucleotides, about 320 nucleotides, or about 330) nucleotides of the transcription start site. In some embodiments, the targeting sequence for use in the systems of the disclosure is complementary to a sequence that is known to be devoid of a single nucleotide polymorphism (SNP). In some embodiments, the targeting sequence is complementary to a sequence that harbors less than 5% SNP in the LPA gene found in the general human population.

[0171] Representative, but non-limiting examples of targeting sequences complementary to LPA target nucleic acids are presented as SEQ ID NOS: 544-19698, and are presented below as Table 11. The targeting sequences for an LPA target nucleic acid presented in Table 11 are suitable for linkage to the gRNA scaffolds of the disclosure; e.g., gRNA 174, 235, or 316, or chemically-modified versions thereof. In some embodiments, the targeting sequence of the gRNA comprises a sequence having at least about 65%, at least about 75%, at least about 85%, or at least about 95% identity to a sequence selected from the group consisting of SEQ ID NOS: 544-19698. In some embodiments, the targeting sequence of the gRNA is selected from the group consisting of SEQ ID NOS: 544-19698, as set forth in Table 11 with 1, 2, 3, 4, or 5 nucleotide(s) removed from the 3′ end of the sequence. In some embodiments, the PAM sequence is ATC. In some embodiments, the targeting sequence for an ATC PAM in the LPA locus comprises SEQ ID NOS: 544-651 and 904-5069, or a sequence that is at least 50% identical, at least 55% identical, at least 60% identical, at least 65% identical, at least 70% identical, at least 75% identical, at least 80% identical, at least 85% identical, at least 90% identical, at least 95% identical, or at least 99% identical to SEQ ID NOS: 544-651 and 904-5069. In some embodiments, the targeting sequence for an ATC PAM in the IPA locus is selected from the group consisting of SEQ ID NOS: 544-651 and 904-5069. In some embodiments, the PAM sequence is CTC. In some embodiments, the targeting sequence for a CTC PAM in the IPA locus comprises SEQ ID NOS: 652-691 and 5070-10230, or a sequence that is at least 50% identical, at least 55% identical, at least 60% identical, at least 65% identical, at least 70% identical, at least 75% identical, at least 80% identical, at least 85% identical, at least 90% identical, at least 95% identical, or at least 99% identical to SEQ ID NOS: 652-691 and 5070-10230. In some embodiments, the targeting sequence for a CTC PAM is selected from the group consisting of SEQ ID NOS: 652-691 and 5070-10230. In some embodiments, the PAM sequence is GTC. In some embodiments, the targeting sequences for a GTC PAM in the LPA locus comprises SEQ ID NOS: 692-748 and 10231-13209 or a sequence that is at least 50% identical, at least 55% identical, at least 60% identical, at least 65% identical, at least 70% identical, at least 75% identical, at least 80% identical, at least 85% identical, at least 90% identical, at least 95% identical, or at least 99% identical to SEQ ID NOS: 692-748 and 10231-13209. In some embodiments, the targeting sequence for a GTC PAM is selected from the group consisting of SEQ ID NOS: 692-748 and 10231-13209. In some embodiments, the PAM sequence is TTC. In some embodiments, a targeting sequences for a TTC PAM in the LPA locus comprises SEQ ID NOS: 749-903 and 13210-19698, or a sequence that is at least 50% identical, at least 55% identical, at least 60% identical, at least 65% identical, at least 70% identical, at least 75% identical, at least 80% identical, at least 85% identical, at least 90% identical, at least 95% identical, or at least 99% identical to SEQ ID NOS: 749-903 and 13210-19698. In some embodiments, a targeting sequence for a TTC PAM is selected from the group consisting of SEQ ID NOS: 749-903 and 13210-19698.

[0172] In some embodiments, the targeting sequence is linked to a gRNA scaffold of the disclosure as described herein. In some embodiments, the gRNA scaffold comprises a sequence of SEQ ID NOS: 464-466, or a chemically modified version thereof.

[0173] In some embodiments, the targeting sequence of the gRNA comprises a sequence selected from the group consisting of SEQ ID NOS: 762-903, or a sequence that is at least 50% identical, at least 55% identical, at least 60% identical, at least 65% identical, at least 70% identical, at least 75% identical, at least 80% identical, at least 85% identical, at least 90% identical, at least 95% identical, or at least 99% identical thereto. In some embodiments, a targeting sequence for linkage to a gRNA scaffold is chemically-modified by the addition of a 2′O-methyl group to the last 1, 2, or 3 nucleotides of the 3′ end of the targeting sequence linked to the 3′ end of the scaffold and each of the modified nucleotides is linked to the adjoining nucleotide by a phosphorothioate bond.

[0174] In some embodiments, the targeting sequence is complementary to a sequence of an exon, an intron, an exon-intron junction, or a candidate cis-regulatory element (cCRE) of the human LPA gene. In some embodiments, the LPA exon comprises Exon 2, Exon 18, Exon 18, Exon 19, Exon 20, Exon 21, Exon 22, Exon 23, Exon 24, Exon 25, Exon 26, Exon 27, Exon 28, Exon 29, Exon 31, Exon 32, Exon 33, Exon 34, Exon 35, Exon 26, Exon 27, Exon 38, or Exon 39, wherein the identities of the exons correspond to those of human reference genome build hg38. In some embodiments, the targeting sequence complementary to Exon 2 comprises a nucleic acid sequence of SEQ ID NO: 864. In some embodiments, the targeting sequence complementary to Exon 18 comprises a nucleic acid sequence of SEQ ID NOS: 778, 813, 814, 870, or 871. In some embodiments, the targeting sequence complementary to Exon 19 comprises a nucleic acid sequence of SEQ ID NO: 840, 841, 842, 873, or 874. In some embodiments, the targeting sequence complementary to Exon 20 comprises a nucleic acid sequence of SEQ ID NO: 779 or 876. In some embodiments, the targeting sequence complementary to Exon 21 comprises a nucleic acid sequence of SEQ ID NO: 815, 877, or 878. In some embodiments, the targeting sequence complementary to Exon 22 comprises a nucleic acid sequence of SEQ ID NO: 879. In some embodiments, the targeting sequence complementary to Exon 23 comprises a nucleic acid sequence of SEQ ID NO: 780 or 880. In some embodiments, the targeting sequence complementary to Exon 24 comprises a nucleic acid sequence of SEQ ID NO: 881 or 882. In some embodiments, the targeting sequence complementary to Exon 25 comprises a nucleic acid sequence of SEQ ID NO: 816. In some embodiments, the targeting sequence complementary to Exon 26 comprises a nucleic acid sequence of SEQ ID NO: 781, 817, or 884. In some embodiments, the targeting sequence complementary to Exon 27 comprises a nucleic acid sequence of SEQ ID NO: 819. In some embodiments, the targeting sequence complementary to Exon 28 comprises a nucleic acid sequence of SEQ ID NO: 782 or 820. In some embodiments, the targeting sequence complementary to Exon 29 comprises a nucleic acid sequence of SEQ ID NO: 824. In some embodiments, the targeting sequence complementary to Exon 31 comprises a nucleic acid sequence of SEQ ID NO: 787 or 825. In some embodiments, the targeting sequence complementary to Exon 32 comprises a nucleic acid sequence of SEQ ID NO: 788, 789, 826, or 827. In some embodiments, the targeting sequence complementary to Exon 33 comprises a nucleic acid sequence of SEQ ID NO: 890. In some embodiments, the targeting sequence complementary to Exon 35 comprises a nucleic acid sequence of SEQ ID NO: 792, 830, 896, or 897. In some embodiments, the targeting sequence complementary to Exon 36 comprises a nucleic acid sequence of SEQ ID NO: 831 or 898. In some embodiments, the targeting sequence complementary to Exon 37 comprises a nucleic acid sequence of SEQ ID NO: 793 or 832. In some embodiments, the targeting sequence complementary to Exon 38 comprises a nucleic acid sequence of SEQ ID NO: 794 or 901. In some embodiments, the targeting sequence complementary to Exon 38 comprises a nucleic acid sequence of SEQ ID NO: 794 or 901. In some embodiments, the targeting sequence complementary to Exon 39 comprises a nucleic acid of SEQ ID NO: 837.

[0175] In some embodiments, the LPA intron comprises Intron 1, Intron 7, Intron 17, intron 18, Intron 19, Intron 24, Intron 26, Intron 28, Intron 33, Intron 37, or Intron 38, wherein the identities of the introns correspond to those of human reference genome build hg38. In some embodiments, the targeting sequence complementary to Intron 1 comprises a nucleic acid sequence of SEQ ID NO: 771, 772, 773, 774, 775, 776, 777, 805, 806, 807, 808, 809, 810, 811, 854, 855, 856, 857, 858, 859, 860, 861, 862, or 863. In some embodiments, the targeting sequence complementary to Intron 7 comprises a nucleic acid sequence oof SEQ ID NOS: 812. 865, 866, or867. In some embodiments, the targeting sequence complementary to Intron 24 comprises a nucleic acid sequence of SEQ ID NO: 883. In some embodiments, the targeting sequence complementary to Intron 28 comprises a nucleic acid sequence of SEQ ID NOS: 783, 784, 785, 786, 821, 822, 823, 885, 886, 887, 888, or 889. In some embodiments, the targeting sequence complementary to intron 33 comprises a nucleic acid sequence of SEQ ID NO: 790, 791 828, 829, 891, 892, 893, 894, or 895. In some embodiments, the targeting sequence complementary to intron 37 comprise a nucleic acid sequence of SEQ ID NO: 833, 834, 835, 843, 844, 889, or 900.

[0176] The targeting sequence that may target an exon-intron junction of the human LPA gene and may target one or more of: Exon2-Intron 1, Exon17-Intron 17, Exon 19-Intron 18, Exon20-Intron 19, Exon34-Intron 33, or Exon 39-Intron 38, wherein the identities of the exon-intron junctions correspond to those of human reference genome build hg38. In some embodiments, the targeting sequence complementary to the exon-intron junction of Exon2-Intron 1 comprises a nucleic acid sequence of SEQ ID NO: 862 or 863. In some embodiments, the targeting sequence complementary to the exon-intron junction of Exon17-Intron 17 comprises a nucleic acid sequence of SEQ ID NO: 868. In some embodiments, the targeting sequence complementary to the exon-intron junction of Exon 18-Intron 17 comprises a nucleic acid sequence of SEQ ID NO: 869. In some embodiments, the targeting sequence complementary to the exon-intron junction of Exon 19-Intron 18 comprises a nucleic acid sequence of SEQ ID NO: 872. In some embodiments, the targeting sequence complementary to the exon-intron junction of Exon 20-Intron 19 comprises a nucleic acid sequence of SEQ ID NO: 875. In some embodiments, the targeting sequence complementary to the exon-intron junction of Exon 34-Intron 33 comprises a nucleic acid sequence of SEQ ID NO: 895. In some embodiments, the targeting sequence complementary to the exon-intron junction of Exon 39-Intron 38 comprises a nucleic acid sequence of SEQ ID NO: 836.

[0177] In some embodiments, the targeting sequence may target or be complementary to a cCRE of the human LPA gene, wherein the identities of the cCRE correspond to those of human reference genome build hg38 and may comprise a nucleic acid sequence of SEQ ID NOS: 762, 763, 764, 765, 766, 767, 769, 798, 799, 800, 801, 839, 846, 847, 848, 849, 850, 851, 852, or 853. In some embodiments, the targeting sequence may target an untranslated region (UTR) of an exon. In some embodiments the targeting sequence may target or be complementary to the 3′UTR of Exon 39, wherein the identities of exon 39 corresponds to that of human reference genome build hg38 and may comprise a nucleic acid sequence of SEQ ID NO: 795, 796, 797, 838, 845, 902, or 903. In some embodiments, the targeting sequence may comprise a nucleic acid sequence of any nucleic acid sequence of SEQ ID NO: 768, 770, 802, 803, or 804.

[0178] In some embodiments, a targeting sequence of the gRNA comprises a sequence selected from the group consisting of SEQ ID NO: 771, SEQ ID NO: 775, SEQ ID NO: 776, SEQ ID NO: 780, SEQ ID NO: 787, SEQ ID NO: 788, SEQ ID NO: 789, SEQ ID NO: 792, SEQ ID NO: 793, SEQ ID NO: 795, SEQ ID NO: 799, SEQ ID NO: 805, SEQ ID NO: 806, SEQ ID NO: 807, SEQ ID NO: 809, SEQ ID NO: 811, SEQ ID NO: 813, SEQ ID NO: 814, SEQ ID NO: 815, SEQ ID NO: 817, SEQ ID NO: 818, SEQ ID NO: 819, SEQ ID NO: 820, SEQ ID NO: 824, SEQ ID NO: 825, SEQ ID NO: 826, SEQ ID NO: 828, SEQ ID NO: 829, SEQ ID NO: 833, SEQ ID NO: 834, SEQ ID NO: 835, SEQ ID NO: 836, SEQ ID NO: 840, SEQ ID NO: 843, SEQ ID NO: 851, SEQ ID NO: 852, SEQ ID NO: 853, SEQ ID NO: 854, SEQ ID NO: 857, SEQ ID NO: 858, SEQ ID NO: 859, SEQ ID NO: 862, SEQ ID NO: 863, SEQ ID NO: 864, SEQ ID NO: 865, SEQ ID NO: 869, SEQ ID NO: 871, SEQ ID NO: 873, SEQ ID NO: 875, SEQ ID NO: 876, SEQ ID NO: 877, SEQ ID NO: 878, SEQ ID NO: 881, SEQ ID NO: 883, SEQ ID NO: 884, SEQ ID NO: 890, SEQ ID NO: 896, SEQ ID NO: 897, SEQ ID NO: 898, and SEQ ID NO: 901, or a sequence that is at least 50% identical, at least 55% identical, at least 60% identical, at least 65% identical, at least 70% identical, at least 75% identical, at least 80% identical, at least 85% identical, at least 90% identical, at least 95% identical, or at least 99% identical thereto. In some embodiments, a targeting sequence for linkage to a gRNA scaffold is chemically-modified by the addition of a 2′O-methyl group to the last 1. 2, or 3 nucleotides of the 3′ end of the targeting sequence linked to the 3′ end of the scaffold and each of the modified nucleotides is linked to the adjoining nucleotide by a phosphorothioate bond.

[0179] In some embodiments, a targeting sequence of the gRNA comprises a sequence selected from the group consisting of SEQ ID NO: 776, SEQ ID NO: 792, SEQ ID NO: 817, SEQ ID NO: 826, SEQ ID NO: 878, SEQ ID NO: 896, SEQ ID NO: 898, and SEQ ID NO: 901 or a sequence that is at least 50% identical, at least 55% identical, at least 60% identical, at least 65% identical, at least 70% identical, at least 75% identical, at least 80% identical, at least 85% identical, at least 90% identical, at least 95% identical, or at least 99% identical thereto.

[0180] In some embodiments, the targeting sequence of the gRNA comprises a sequence selected from the group consisting of SEQ ID NO: 817, SEQ ID NO: 826, SEQ ID NO: 898, and SEQ ID NO: 901. In some embodiments, a targeting sequence for linkage to a gRNA scaffold of the disclosure, e.g., gRNA 174, 235, or 316, or chemically-modified version thereof, may comprise the sequence of SEQ ID NO: 901. In some embodiments, a targeting sequence for linkage to a gRNA scaffold of the disclosure, e.g., gRNA 174, 235, or 316, or chemically-modified version thereof, may comprise the sequence of SEQ ID NO: 817. In some embodiments, a targeting sequence for linkage to a gRNA scaffold of the disclosure, e.g., gRNA 174, 235, or 316, or chemically-modified version thereof, may comprise the sequence of SEQ ID NO: 826. In some embodiments, a targeting sequence for linkage to a gRNA scaffold of the disclosure, e.g., gRNA 174, 235, or 316, or chemically-modified version thereof, may comprise the sequence of SEQ ID NO: 898.

[0181] In some embodiments, the targeting sequence of the gRNA is chemically-modified by the addition of a 2′O-methyl group to the last 1, 2, or 3 nucleotides of the 3′ end of the targeting sequence linked to the 3′ end of the scaffold and each of the modified nucleotides is linked to the adjoining nucleotide by a phosphorothioate bond. In some embodiments, a chemically modified gRNA with a targeting sequence comprises a sequence selected from the group consisting of SEQ ID NOS: 19855-19862, or a sequence having at least about 70%, at least about 80%, at least about 90%, at least about 95%, at least about 96%, at least about 97%, at least about 98%, at least about 99% sequence identity thereto. In some embodiments, the chemically-modified gRNA targeting an LPA target sequence comprises a sequence selected from the group consisting of SEQ ID NOS: 19855-19862. In some embodiments, the chemically-modified gRNA targeting an LPA target sequence comprises a sequence of SEQ ID NO: 19855. In some embodiments, the chemically-modified gRNA targeting an LPA target sequence comprises a sequence of SEQ ID NO: 19856. In some embodiments, the chemically-modified gRNA targeting an LPA target sequence for use in the LNP comprises a sequence of SEQ ID NO: 19857. In some embodiments, the chemically-modified gRNA targeting an LPA target sequence comprises a sequence of SEQ ID NO: 19858. In some embodiments, the chemically-modified gRNA targeting an LPA target sequence comprises a sequence of SEQ ID NO: 19859. In some embodiments, the chemically-modified gRNA targeting an LPA target sequence comprises a sequence of SEQ ID NO: 19860. In some embodiments, the chemically-modified gRNA targeting an LPA target sequence comprises a sequence of SEQ ID NO: 19861. In some embodiments, the chemically-modified gRNA targeting an LPA target sequence for comprises a sequence of SEQ ID NO: 19862.

[0182] In a particular embodiment, the targeting sequence of the gRNA comprises a sequence of SEQ ID NO: 901. In a particular embodiment, the targeting sequence of the gRNA comprises a sequence of SEQ ID NO: 817. In a particular embodiment, the targeting sequence of the gRNA comprises a sequence of SEQ ID NO: 826. In a particular embodiment, the targeting sequence of the gRNA comprises a sequence of SEQ ID NO: 898. In some embodiments, the targeting sequence of SEQ ID NO: 901 is chemically-modified by the addition of a 2′O-methyl group to the last 1, 2, or 3 nucleotides of the 3′ end of the targeting sequence linked to the 3′ end of the scaffold and each of the modified nucleotides is linked to the adjoining nucleotide by a phosphorothioate bond. In some embodiments, a chemically modified gRNA with targeting sequence comprises a sequence of SEQ ID NOS: 19855, or a sequence having at least about 70%, at least about 80%, at least about 90%, at least about 95%, at least about 96%, at least about 97%, at least about 98%, at least about 99% sequence identity thereto.

TABLE 11
RNA Sequences of Targeting Sequences Specific to Human LPA

| SEQ ID NO: | PAM Sequence |
|---|---|
| 544-651, 904-5069 | ATC |
| 749-903, 13210-19698 | TTC |
| 652-691, 5070-10230 | CTC |
| 692-748, 10231-13209 | GTC |

TABLE 12
RNA Sequences of Exemplary Targeting
Sequences Specific to Human LPA

| SEQ ID NO: | PAM Sequence |
|---|---|
| 762-903 | TTC |

[0183] In some embodiments, the gRNA and linked targeting sequence used in a system of the disclosure exhibit a low degree of off-target effects to the DNA of a cell. As used herein, “off-target effects” refers to off-target effects of unintended cleavage and mutations at untargeted genomic sites showing a similar but not an identical sequence compared to the target site. In some embodiments, the off-target effects exhibited by a gRNA and linked targeting sequence in a system of the disclosure is less than about 5%, less than about 4%, less than 3%, less than about 2%, less than about 1%, less than about 0.5%, less than 0.1% in cells. In some embodiments the off-target effects are determined in silico. In some embodiments the off-target effects are determined in an in vitro cell-free assay. In some embodiments the off-target effects are determined in a cell-based assay. In some embodiments the off-target effects are determined in a subject administered a therapeutic dose of a CasX:gRNA system of the disclosure.

c, gRNA Modifications

[0184] In another aspect, the disclosure relates to gRNA that comprise one or more modifications relative to a gRNA scaffold from which it was derived. In some embodiments, a gRNA variant for use in the systems of the disclosure comprises one or more nucleotide substitutions, insertions, deletions, or swapped or replaced domains relative to a gRNA sequence of the disclosure that improve a characteristic relative to the reference gRNA. Exemplary regions for modifications and swapped regions or domains include the RNA triplex, the pseudoknot, the scaffold stem loop, and the extended stem loop. In some embodiments, the gRNA variant of the disclosure comprises at least a first swapped region from a different gRNA, resulting in a chimeric gRNA. In some embodiments, the gRNA scaffold comprising one or more modifications retains the ability to complex with the engineered CasX described herein as a ribonucleoprotein (RNP). A representative example of such a chimeric gRNA is guide 316 (SEQ ID NO: 466), in which the extended step of gRNA scaffold 235 is replaced with the extended stem of gRNA scaffold 174, wherein the resulting 316 variant retains the ability to form an RNP with a CasX protein and, in some cases, exhibits an improved functional characteristic compared to the parent 235, when assessed in an in vitro or in vivo assay under comparable conditions.

[0185] All gRNAs that have one or more improved functions, characteristics, or add one or more new functions when the gRNA scaffold variant is compared to a gRNA scaffold from which it was derived, while retaining the functional properties of being able to complex with the CasX and guide the CasX ribonucleoprotein holo complex to the target nucleic acid are envisaged as within the scope of the disclosure. In some embodiments, the gRNA has an improved characteristic selected from the group consisting of increased editing activity, increased pseudoknot stem stability, increased triplex region stability, increased scaffold stem stability, extended stem stability, reduced off-target folding intermediates, and increased binding affinity to a CasX protein, or any combination thereof. In some cases of the foregoing, the improved characteristic is assessed in an in vitro assay, including the assays of the Examples. In other cases of the foregoing, the improved characteristic is assessed in vivo.

[0186] In some embodiments, the gRNA variant scaffold has improved manufacturability compared to the gRNA scaffold from which it was derived. In a particular embodiment, the 316 gRNA scaffold has a shorter sequence compared to the 235 scaffold from which it was derived. In some embodiments, the shorter sequence length of the 316 scaffold confers the improvements of a higher fidelity in the ability to create the guide synthetically with the correct and complete sequence, as well as an enhanced ability to be successfully incorporated into an LNP.

[0187] Table 13 provides exemplary gRNA variant scaffold sequences of the disclosure that are utilized as gRNA scaffolds or for the generation of the gRNAs for use in the CasX:gRNA systems of the disclosure. In some embodiments, the gRNA variant scaffold for use in the systems comprises any one of the sequences listed in Table 13 or a sequence having at least about 50%, at least about 60%, at least about 70%, at least about 80%, at least about 90%, at least about 95%, at least about 95%, at least about 96%, at least about 97%, at least about 98%, at least about 99% sequence identity thereto, wherein the gRNA variant retains the ability to form an RNP with a CasX of the disclosure. In other embodiments, the gRNA variant scaffold for use in the CasX:gRNA systems comprises any one of the sequences listed in Table 13 wherein the gRNA variant retains the ability to form an RNP with a CasX of the disclosure. It will be understood that in those embodiments wherein a vector comprises a DNA encoding sequence for a gRNA, that thymine (T) bases can be substituted for the uracil (U) bases of any of the gRNA sequence embodiments described herein.

TABLE 13
Exemplary gRNA Scaffold Sequences

| SEQ ID | Scaffold | |
|---|---|---|
| NO: | variant ID | Nucleotide sequence |
| 464 | 174 | ACUGGCGCUUUUAUCUGAUUACUUUGAGAGCC |
| | | AUCACCAGCGACUAUGUCGUAGUGGGUAAAGCUCCCUCUUCGGAGGGAGCAUCAAAG |
| 465 | 235 | ACUGGCGCUUCUAUCUGAUUACUCUGAGCGCCAUCACCAGCGAC |
| | | UAUGUCGUAGUGGGUAAAGCCGCUUACGGACUUCGGUCCGUAAGAGGCAUCAGAG |
| 466 | 316 | ACUGGCGCUUCUAUCUGAUUACUCUGAGCGCCAUCACCAGCGACUA |
| | | UGUCGUAGUGGGUAAAGCUCCCUCUUCGGAGGGAGCAUCAGAG |

[0188] Additional gRNA variants contemplated for use in the systems of the disclosure are selected from the group consisting of SEQ ID NOS: 467-541. Further gRNA variants for use in the systems of the disclosure are described in International Publication Nos. WO2020247882 and WO2022120095, which are hereby incorporated by reference in their entirety.

d, gRNA Scaffold 316

[0189] Guide scaffolds can be made by several methods, including recombinantly or by solid-phase RNA synthesis. However, the length of the scaffold can affect the manufacturability when using solid-phase RNA synthesis, with longer lengths resulting in increased manufacturing costs, decreased purity and yield, and higher rates of synthesis failures. For use in lipid nanoparticle (LNP) formulations, solid-phase RNA synthesis of the scaffold is preferred to generate the quantities needed for commercial development. While previous experiments had identified gRNA scaffold 235 as having enhanced properties relative to gRNA scaffold 174, its increased length (in nucleotides) rendered its use for LNP formulations problematic due to synthetic manufacturing constraints. Accordingly, alternative sequences were sought. In some embodiments, the disclosure provides a gRNA wherein the gRNA scaffold and linked targeting sequence has a sequence less than about 115 nucleotides, less than about 110 nucleotides, or less than about 100 nucleotides.

[0190] In one embodiment, a gRNA scaffold was designed wherein the scaffold 235 sequence was modified by a domain swap in which the extended stem loop of scaffold 174 replaced the extended stem loop of the 235 scaffold, resulting in the chimeric gRNA scaffold 316, having the sequence ACUGGCGCUUCUAUCUGAUUACUCUGAGCGCCAUCACCAGCGACUAUGUCGUA GUG GGUAAAGCUCCCUCUUCGGAGGGAGCAUCAGAG (SEQ ID NO: 466), having 89 nucleotides, compared with the 99 nucleotides of gRNA scaffold 235. The resulting 316 scaffold had the further advantage in that the extended stem loop does not contain CpG motifs; an enhanced property conferring reduced potential to elicit an immune response. In some embodiments, the disclosure provides gRNA 316 variants that are chemically-modified, described below.

e. Chemically-Modified gRNAs

[0191] In some embodiments, the gRNAs have one or more chemical modifications. In some embodiments, the chemical modification is the addition of a 2′O-methyl group to one or more nucleotides of the sequence. In some embodiments, the chemical modification is substitution of a phosphorothioate bond between two or more nucleotides of the sequence. In some embodiments, the first 1, 2, or 3 nucleotides of the 5′ end of the scaffold (i.e., A, C, and U in the case of gRNA 174, 235, and 316) are modified by the addition of a 2′O-methyl group and each of the modified nucleotides is linked to the adjoining nucleotide by a phosphorothioate bond. Similarly, the last 1, 2, or 3 nucleotides of the 3′ end of the targeting sequence linked to the 3′ end of the scaffold are similarly modified. In some embodiments, the disclosure provides gRNA with chemical modifications selected from the group consisting of the sequences of SEQ ID NOS: 19704-19712:19714-19722:19724-19732, as set forth in Table 27, or a sequence having at least about 70%, at least about 80%, at least about 90%, at least about 95%, at least about 96%, at least about 97%, at least about 98%, at least about 99% sequence identity thereto. In some embodiments, the gRNA with chemical modifications comprises a scaffold of SEQ ID NOS: 19704-19712:19714-19722:19724-19732, i.e., a sequence of SEQ ID NOS: 19704-19712:19714-19722:19724-19732 without the 20 nucleotides of the 3′ spacer represented in the foregoing sequences as undefined nucleotides. In some embodiments, a gRNA with chemical modifications to the scaffold and a targeting sequence complementary to the LPA gene comprises a sequence selected from the group consisting of SEQ ID NOS: 19855-19862, or a sequence having at least about 70%, at least about 80%, at least about 90%, at least about 95%, at least about 96%, at least about 97%, at least about 98%, at least about 99% sequence identity thereto. In some embodiments, a gRNA with chemical modifications to the scaffold and a targeting sequence complementary to the LPA gene comprises a sequence selected from the group consisting of SEQ ID NOS: 19855-19862. A schematic of the structure of gRNA variants 174, 235, and 316 are shown in FIGS. 8A-8C, respectively. In some embodiments, the gRNA with chemical modifications exhibit improved stability compared to gRNA without chemical modifications.

f. Complex Formation with CasX Protein

[0192] Upon delivery or expression of the components of the system in a target cell, the gRNA is capable of complexing as an RNP with a CasX protein and binding to the target nucleic acid of the LPA gene. In some embodiments, a gRNA variant has an improved ability to form an RNP complex with a CasX protein when compared to a reference gRNA or a gRNA variant from which it was derived. Improving ribonucleoprotein complex formation may, in some embodiments, improve the efficiency with which functional RNPs are assembled. In some embodiments, greater than 90%, greater than 93%, greater than 95%, greater than 96%, greater than 97%, greater than 98% or greater than 99% of RNPs comprising a gRNA variant and its targeting sequence are competent for gene editing or modification of a target nucleic acid.

### V. Polynucleotides and Vectors

[0193] In another aspect, the present disclosure relates to polynucleotides encoding the engineered CasX proteins and gRNAs that have utility in the editing of the LPA gene. Additionally, the disclosure provides vectors comprising polynucleotides encoding the engineered CasX proteins and the gRNAs described herein. In some cases, the vectors are utilized for the expression and recovery of the engineered CasX protein and gRNA components of the gene editing pair. In other cases, the vectors are utilized for the delivery of the encoding polynucleotides to target cells for the editing of the target nucleic acid, as described more fully, below. In some embodiments, sequences encoding the engineered CasX protein and a gRNA are templated on the same vector. In some embodiments, sequences encoding the engineered CasX protein and a gRNA are templated on different vectors. In some embodiments, the gRNA is not encoded by a longer polynucleotide. Suitable vectors are described, for example, in WO2022120095A1 and WO2020247882A1, incorporated by reference herein. As described in WO2022120095A1 and WO2020247882A1, depending on the host/vector system utilized, any of a number of suitable transcription and translation control elements, including constitutive and inducible promoters, transcription enhancer elements, transcription terminators, etc. may be used in the expression vector.

[0194] In some embodiments, the disclosure provides polynucleotide sequences encoding the engineered CasX proteins of any of the embodiments described herein, including the engineered CasX proteins of SEQ ID NOS: 4-7 as set forth in Table 1, or sequences having at least about 50%, at least about 60%, at least about 70%, at least about 80%, at least about 90%, at least about 95%, at least about 96%, at least about 97%, at least about 98%, or at least about 99% sequence identity thereto. In some embodiments, the disclosure provides an isolated polynucleotide sequence encoding a gRNA variant of any of the embodiments described herein. In some embodiments, the disclosure provides polynucleotides encoding a gRNA scaffold sequence of SEQ ID NOS: 464-466 as set forth in Table 10, or a sequence having at least about 50%, at least about 60%, at least about 70%, at least about 80%, at least about 90%, at least about 95%, at least about 96%, at least about 97%, at least about 98%, at least about 99% sequence identity thereto, wherein the expressed gRNA variant retains the ability to form an RNP with a CasX. In other embodiments, the disclosure provides polynucleotide sequences encoding gRNA scaffolds of SEQ ID NOS: 464-466 comprising targeting sequences of SEQ ID NOS: 749-903 and 13210-19698, or sequences having at least about 65%, at least about 75%, at least about 85%, or at least about 95% identity thereto.

[0195] In some embodiments, the disclosure relates to methods to produce polynucleotide sequences encoding the engineered CasX protein or the gRNA of any of the embodiments described herein, including variants thereof, as well as methods to express the proteins expressed or RNA transcribed by the polynucleotide sequences. In general, the methods include producing a polynucleotide sequence coding for the engineered CasX protein or the gRNA of any of the embodiments described herein and incorporating the encoding gene into an expression vector. In some embodiments, the vector is designed for transduction of cells for modification of the LPA target nucleic acid. Such vectors can include a retroviral vector, a lentiviral vector, an adenoviral vector, an adeno-associated viral (AAV) vector, a herpes simplex virus (HSV) vector, a plasmid, a minicircle, a nanoplasmid, a DNA vector, and an RNA vector. In other embodiments, the expression vector is designed for production of engineered CasX protein, an mRNA encoding CasX, or gRNA in either a cell-free system or in a host cell. For production of the encoded engineered CasX protein or mRNA encoding same, or the gRNA of any of the embodiments described herein in a host cell, the methods include transforming an appropriate host cell with an expression vector comprising the encoding polynucleotide, and culturing the host cell under conditions causing or permitting the resulting engineered CasX protein, mRNA encoding same, or the gRNA of any of the embodiments described herein to be expressed or transcribed in the transformed host cell, thereby producing the engineered CasX protein, mRNA encoding same, or the gRNA, which are recovered by methods described herein (e.g., in the Examples, below) or by standard purification methods known in the art. Standard recombinant techniques in molecular biology are used to make the polynucleotides and expression vectors of the present disclosure.

[0196] In accordance with the disclosure, nucleic acid sequences that encode the engineered CasX protein or the gRNA of any of the embodiments described herein are used to generate recombinant DNA molecules that direct the expression in appropriate host cells. Several cloning strategies are suitable for performing the present disclosure, many of which are used to generate a construct that comprises a gene coding for a composition of the present disclosure, or its complement. In some embodiments, the cloning strategy is used to create a gene that encodes a construct that comprises nucleotides encoding the engineered CasX protein or the gRNA that is used to transform a host cell for expression of the composition.

[0197] In one approach, a construct is first prepared containing the DNA sequence encoding an engineered CasX protein or a gRNA. Exemplary methods for the preparation of such constructs are described in the Examples. The construct is then used to create an expression vector suitable for transforming a host cell, such as a prokaryotic or eukaryotic host cell for the expression and recovery of the protein construct, in the case of the engineered CasX, or the gRNA. Where desired, the host cell is an E. coli. In other embodiments, the host cell is a eukaryotic cell. The eukaryotic host cell can be selected from Baby Hamster Kidney fibroblast (BHK) cells, human embryonic kidney 293 (HEK293), human embryonic kidney 293T (HEK293T), NSO cells, SP2/0) cells, YO myeloma cells, P3X63 mouse myeloma cells, PER cells, PER.C6 cells, hybridoma cells, NIH3T3 cells, CV-1 (simian) in Origin with SV40 genetic material (COS), HeLa, Chinese hamster ovary (CHO), yeast cells, or other eukaryotic cells known in the art suitable for the production of recombinant products. Exemplary methods for the creation of expression vectors, the transformation of host cells and the expression and recovery of the engineered CasX protein, mRNA encoding same, or the gRNA are described in the Examples.

[0198] The gene encoding the engineered CasX protein or the gRNA construct can be made in one or more steps, either fully synthetically or by synthesis combined with enzymatic processes, such as restriction enzyme-mediated cloning. PCR and overlap extension, including methods more fully described in the Examples. The methods disclosed herein can be used, for example, to ligate sequences of polynucleotides encoding the various components into a gene of a desired sequence. Genes encoding polypeptide compositions are assembled from oligonucleotides using standard techniques of gene synthesis.

[0199] In some embodiments, the nucleotide sequence encoding an engineered CasX protein is codon optimized using one or more parameters to enhance expression in the target cell. In some embodiments, the modifications to the mRNA by codon optimization and/or substitution of modified nucleotides in the sequence results in an improved characteristic of at least about 1.1 to about 100,000-fold improved relative to the unmodified mRNA. Non-limiting examples of such parameters include the codon usage in human host cells (e.g., utilizing the codon adaptation index (CAI)), minimizing rare codons, utilizing codon-usage tables derived from biologics intended for use as therapeutics, utilizing an mRNA stability index, or reducing GC content. Methods of codon-optimization, and codon usage in various organisms is known in the art. See, for example, www.genscript.com/tools/codon-frequency-table. This type of optimization can entail a mutation of an encoding nucleotide sequence to mimic the codon preferences of the intended host organism or cell while encoding the same protein. Thus, the codons can be changed, but the encoded protein remains unchanged. For example, if the intended target cell of the engineered CasX protein was a human cell, a human codon-optimized CasX-encoding nucleotide sequence could be used. As another non-limiting example, if the intended host cell were a mouse cell, then a mouse codon-optimized CasX-encoding nucleotide sequence could be generated. The gene design can be performed using algorithms that optimize codon usage and amino acid composition appropriate for the host cell utilized in the production of the engineered CasX protein or the gRNA. In one method of the disclosure, a library of polynucleotides encoding the components of the constructs is created and then assembled, as described above. The resulting genes are then assembled and the resulting genes used to transform a host cell and produce and recover the engineered CasX protein or the gRNA compositions for evaluation of its properties or for use in the modification of the LPA gene, as described herein.

[0200] In some embodiments, a nucleotide sequence encoding a gRNA is operably linked to a control element, e.g., a transcriptional control element, such as a promoter. In some embodiments, a nucleotide sequence encoding an engineered CasX protein is operably linked to a control element, e.g., a transcriptional control element, such as a promoter. In some cases, the promoter is a constitutively active promoter. In some cases, the promoter is a regulatable promoter. In some cases, the promoter is an inducible promoter. In some cases, the promoter is a tissue-specific promoter. In some cases, the promoter is a cell type-specific promoter. In some cases, the transcriptional control element (e.g., the promoter) is functional in a targeted cell type or targeted cell population. For example, in some cases, the transcriptional control element can be functional in eukaryotic cells, e.g., hepatocytes or a liver sinusoidal endothelial cell.

[0201] Non-limiting examples of Pol II promoters operably linked to the polynucleotide encoding the engineered CasX of the disclosure include, but are not limited to EF-1alpha. EF-1 alpha core promoter. Jens Tornoe (JeT), promoters from cytomegalovirus (CMV), CMV immediate early (CMVIE). CMV enhancer, herpes simplex virus (HSV) thymidine kinase, early and late simian virus 40 (SV40), the SV40 enhancer, long terminal repeats (LTRs) from retrovirus, mouse metallothionein-I, adenovirus major late promoter (Ad MLP). CMV promoter full-length promoter, the minimal CMV promoter, the chicken β-actin promoter (CBA). CBA hybrid (CBh), chicken β-actin promoter with cytomegalovirus enhancer (CB7), chicken beta-Actin promoter and rabbit beta-Globin splice acceptor site fusion (CAG), the rous sarcoma virus (RSV) promoter, the HIV-Ltr promoter, the hPGK promoter, the HSV TK promoter, a 7SK promoter, the Mini-TK promoter, the human synapsin I (SYN) promoter which confers neuron-specific expression, beta-actin promoter, super core promoter 1 (SCP1), the Mecp2 promoter for selective expression in neurons, the minimal IL-2 promoter, the Rous sarcoma virus enhancer/promoter (single), the spleen focus-forming virus long terminal repeat (LTR) promoter, the TBG promoter, promoter from the human thyroxine-binding globulin gene (Liver specific), the PGK promoter, the human ubiquitin C promoter (UBC), the UCOE promoter (Promoter of HNRPA2B1-CBX3), the synthetic CAG promoter, the Histone H2 promoter, the Histone H3 promoter, the Ulal small nuclear RNA promoter (226 nt), the Ulal small nuclear RNA promoter (226 nt), the Ulb2 small nuclear RNA promoter (246 nt) 26, the GUSB promoter, the CBh promoter, rhodopsin (Rho) promoter, silencing-prone spleen focus forming virus (SFFV) promoter, a human H1 promoter (H1), a POLI promoter, the TTR minimal enhancer/promoter, the b-kinesin promoter, mouse mammary tumor virus long terminal repeat (LTR) promoter, the human eukaryotic initiation factor 4A (EIF4A1) promoter, the ROSA26 promoter, the glyceraldehyde 3-phosphate dehydrogenase (GAPDH) promoter, tRNA promoters, and truncated versions and sequence variants of the foregoing. In a particular embodiment, the Pol II promoter is EF-1alpha, wherein the promoter enhances transfection efficiency, the transgene transcription or expression of the engineered CasX protein, the proportion of expression-positive clones and the copy number of the episomal vector in long-term culture.

[0202] Non-limiting examples of Pol III promoters operably linked to the polynucleotide encoding the gRNA variants of the disclosure include, but are not limited to U6, mini U6. U6 truncated promoters, 7SK, and H1 variants. BiH1 (Bidrectional H1 promoter). BiU6. Bi7SK. BiH1 (Bidirectional U6, 7SK, and H1 promoters), gorilla U6, rhesus U6, human 7SK, human H1 promoters, and truncated versions and sequence variants thereof. In the foregoing embodiment, the pol III promoter enhances the transcription of the gRNA. In a particular embodiment, the Pol III promoter is U6, wherein the promoter enhances expression of the CRISPR gRNA. In another particular embodiment, the promoter linked to the gene encoding the tropism factor is CMV promoter. Experimental details and data for the use of such promoters are provided in the Examples.

[0203] Selection of the appropriate vector and promoter is well within the level of ordinary skill in the art, as it related to controlling expression. The expression vector may also contain a ribosome binding site for translation initiation, and a transcription terminator. The expression vector may also include appropriate sequences for amplifying expression. The expression vector may also include nucleotide sequences encoding protein tags (e.g., 6×His tag, hemagglutinin tag, fluorescent protein, etc.) that can be fused to the engineered CasX protein protein that are used for purification or detection.

[0204] Recombinant expression vectors of the disclosure can also comprise elements that facilitate robust expression of the proteins and the gRNAs of the disclosure. For example, recombinant expression vectors can include one or more of a polyadenylation signal (poly (A)), an intronic sequence or a post-transcriptional regulatory element such as a woodchuck hepatitis post-transcriptional regulatory element (WPRE). Exemplary poly (A) sequences include hGH poly (A) signal (short), HSV TK poly (A) signal, synthetic polyadenylation signals, SV40 poly (A) signal, β-globin poly (A) signal and the like. A person of ordinary skill in the art will be able to select suitable elements to include in the recombinant expression vectors described herein.

[0205] The polynucleotides encoding the engineered CasX proteins or the gRNA sequences can be individually cloned into an expression vector. Selection of the appropriate vector and promoter is well within the level of ordinary skill in the art, as it relates to controlling expression, e.g., for modifying expression of the engineered CasX protein. The expression vector may also contain a ribosome binding site for translation initiation and a transcription terminator. The expression vector may also include appropriate sequences for amplifying expression. The expression vector may also include nucleotide sequences encoding protein tags (e.g., 6×His tag, hemagglutinin tag, FLAG tag, fluorescent protein, etc.) that can be fused to the CasX protein, thus resulting in a CasX fusion protein that can be used for purification or detection.

[0206] The nucleic acid sequence is inserted into the vector by a variety of procedures. In general, DNA is inserted into an appropriate restriction endonuclease site(s) using techniques known in the art. Vector components generally include, but are not limited to, one or more of a signal sequence, an origin of replication, one or more marker genes, an enhancer element, a promoter, and a transcription termination sequence. Construction of suitable vectors containing one or more of these components employs standard ligation techniques which are known to the skilled artisan. Such techniques are well known in the art and well described in the scientific and patent literature. Various vectors are publicly available. The vector may, for example, be in the form of a plasmid, cosmid, viral particle, or phage that may conveniently be subjected to recombinant DNA procedures, and the choice of vector will often depend on the host cell into which it is to be introduced. Thus, the vector may be an autonomously replicating vector, i.e., a vector, which exists as an extrachromosomal entity, the replication of which is independent of chromosomal replication, e.g., a plasmid. Alternatively, the vector may be one which, when introduced into a host cell, is integrated into the host cell genome and replicated together with the chromosome(s) into which it has been integrated. Once introduced into a suitable host cell, expression of the engineered CasX protein or an mRNA encoding same can be determined using any nucleic acid or protein assay known in the art. For example, the presence of transcribed mRNA of the engineered CasX protein can be detected and/or quantified by conventional hybridization assays (e.g., Northern blot analysis), amplification procedures (e.g. RT-PCR), SAGE (U.S. Pat. No. 5,695,937), and array-based technologies (see e.g., U.S. Pat. Nos. 5,405,783, 5,412,087 and 5,445,934), using probes complementary to any region of CasX polynucleotide.

[0207] In some embodiments, a vector is created for the transcription of the gene encoding the engineered CasX protein and expression and recovery of the resulting encoding mRNA. In some embodiments, the mRNA is generated by in vitro transcription (IVT) using a PCR product or linearized plasmid DNA template and a T7 RNA polymerase, wherein the plasmid contains a T7 promoter. If using a PCR product, DNA sequences encoding candidate mRNAs will be cloned into a plasmid containing a T7 promoter, wherein the plasmid DNA template will be linearized and then used to perform IVT reactions for expression of the mRNA. Exemplary methods for the generation of such vectors and the production and recovery of the mRNA are provided in the Examples, below.

### VI. Particles for Delivery of CasX:gRNA Systems

[0208] In another aspect, the present disclosure provides particle compositions for delivery of the CasX:gRNA systems to cells or to subjects for the modification of the LPA gene. In some embodiments, the disclosure provides synthetic nanoparticles that encapsidate gRNA variants and mRNA encoding engineered CasX proteins of any of the embodiments described herein. In some embodiments, materials for the creation of biodegradable polymeric nanoparticles (PNP) include polylactide, poly (lactic-co-glycolic acid) (PLGA), poly (ethyl cyanoacry late), poly(butyl cyanoacrylate), poly(isobutyl cyanoacrylate), and poly (isohexyl cyanoacry late), polyglutamic acid (PGA), poly (ε-caprolactone) (PCL), cyclodextrin, and natural polymers for instance chitosan, albumin, gelatin, and alginate are the most utilized polymers for the synthesis of PNP (Production and clinical development of nanoparticles for gene delivery. Molecular Therapy-Methods & Clinical Development 3:16023; doi: 10.1038 (2016)). In some embodiments, the disclosure provides virus-like particles for delivery of the engineered CasX protein and gRNA (see, WO2021113772A1, incorporated by reference herein). In other embodiments, the disclosure provides lipid nanoparticles that encapsidate gRNA variants and mRNA encoding engineered CasX proteins of any of the embodiments described herein, described more fully, below. In other embodiments, the particles are lipid nanoparticles that separately encapsulate a gRNA variant and a mRNA encoding engineered CasX proteins of any of the embodiments, and the two types of particles are administered separately.

a. Lipid Nanoparticles (LNP)

[0209] In another aspect, the present disclosure provides lipid nanoparticles (LNP) for delivery to cells or to subjects for the modification of the LPA gene. In some embodiments, the LNPs of the disclosure are tissue-specific, have excellent biocompatibility, and can deliver the CasX:gRNA systems with high efficiency, and thus can be used for the modification (e.g. editing) of the target nucleic acid.

[0210] In their native forms, nucleic acid polymers are unstable in biological fluids and cannot penetrate into the cytoplasm of target cells, thus requiring delivery systems. Lipid nanoparticles (LNP) have proven useful for both the protection and delivery of nucleic acids to tissues and cells. Furthermore, the use of mRNA in LNPs to encode an engineered CasX protein eliminates the possibility of undesirable genome integration compared to DNA vectors. Moreover. mRNA efficiently transfects both mitotic and non-mitotic cells, as it does not require to enter into the nucleus since it exerts its function in the cytoplasmic compartment. LNPs as a delivery platform offers the additional advantage of being able to co-formulate both the mRNA encoding the nuclease and the gRNA into single LNP particles.

[0211] Accordingly, in various embodiments, the disclosure comprises lipid nanoparticles and compositions comprising same that may be used for a variety of purposes, including the delivery of encapsulated or associated (e.g., complexed) therapeutic agents such as nucleic acids to cells, both in vitro and in vivo. In certain embodiments, the disclosure comprises methods of treating or preventing diseases or disorders in a subject in need thereof by contacting the subject with a lipid nanoparticle that encapsulates or is associated with a suitable therapeutic agent, such as the systems, gRNAs and mRNAs described herein.

[0212] In certain embodiments, the lipid nanoparticles are useful for the delivery of nucleic acids, including. e.g., the mRNA comprising a sequence encoding the CasX of the disclosure, including the sequences of SEQ ID NOS: 4-7 as set forth in Table 1 and the gRNA embodiments of the disclosure, including the sequences of SEQ ID NOS: 464-466 of Table 13. In some embodiments, the present disclosure provides LNP in which the gRNA and mRNA comprising a sequence encoding the engineered CasX are incorporated into single LNP particles. In other embodiments, the present disclosure provides LNP in which the gRNA and mRNA comprising a sequence encoding the engineered CasX are incorporated into separate LNP particles, which can be formulated together in varying ratios for administration. In some embodiments, the mRNA for incorporation into the LNP of the disclosure comprise a sequence that encodes any of the engineered CasX described herein, including the sequences of SEQ ID NOS: 4-7 as set forth in Table 1. In some embodiments, the mRNA encoding the engineered CasX for incorporation into the LNP of the disclosure comprise the sequences selected from the group consisting of SEQ ID NOS: 19699-19702. 19813-19820, and 19830-19837. In some embodiments, the mRNA encoding the engineered CasX for incorporation into the LNP of the disclosure comprise the sequences selected from the group consisting of SEQ ID NOS: 19700. 19818. 19831 and 19835. In some embodiments, the mRNA further comprises a 5′ cap sequence linked 5′ to the 5′ UTR of the mRNA sequence wherein the 5′ cap has the nucleic acid sequence selected from the group consisting of m7G (5) ppp (5″) mAG, m7G (5′) ppp (5′ (A.G (5′) ppp (5′) A and G (5′) ppp (5′) G. In some embodiments, the gRNA scaffold for use in the LNP comprises the sequence of SEQ ID NO: 466 or a chemically modified version thereof. In some embodiments, the chemically-modified gRNA targeting an LPA target sequence for use in the LNP comprises a sequence selected from the group consisting of SEQ ID NOS: 19855-19862, or a sequence having at least about 70%, at least about 80%, at least about 90%, at least about 95%, at least about 96%, at least about 97%, at least about 98%, at least about 99% sequence identity thereto. In some embodiments, the chemically-modified gRNA targeting an LPA target sequence for use in the LNP comprises a sequence selected from the group consisting of SEQ ID NOS: 19855-19862. In some embodiments, the chemically-modified gRNA targeting an LPA target sequence for use in the LNP comprises a sequence of SEQ ID NO: 19855. In some embodiments, the chemically-modified gRNA targeting an LPA target sequence for use in the LNP comprises a sequence of SEQ ID NO: 19856. In some embodiments, the chemically-modified gRNA targeting an LPA target sequence for use in the LNP comprises a sequence of SEQ ID NO: 19857. In some embodiments, the chemically-modified gRNA targeting an LPA target sequence for use in the LNP comprises a sequence of SEQ ID NO: 19858. In some embodiments, the chemically-modified gRNA targeting an LPA target sequence for use in the LNP comprises a sequence of SEQ ID NO: 19859. In some embodiments, the chemically-modified gRNA targeting an LPA target sequence for use in the LNP comprises a sequence of SEQ ID NO: 19860. In some embodiments, the chemically-modified gRNA targeting an IPA target sequence for use in the LNP comprises a sequence of SEQ ID NO: 19861. In some embodiments, the chemically-modified gRNA targeting an LPA target sequence for use in the LNP comprises a sequence of SEQ ID NO: 19862.

[0213] The lipid nanoparticles and compositions of certain embodiments of the disclosure may be used to induce expression of a desired protein both in vitro and in vivo by contacting cells with a lipid nanoparticle comprising one or more novel ionizable lipids described herein, wherein the lipid nanoparticle encapsulates or is associated with a nucleic acid that is expressed to produce the desired protein (e.g., a messenger RNA encoding the engineered CasX protein). In some embodiments, the lipid nanoparticles and compositions may be used to decrease the expression of the LPA target gene both in vitro and in vivo by contacting cells with a lipid nanoparticle comprising one or more novel cationic lipids described herein, wherein the lipid nanoparticle encapsulates or is associated with one or more nucleic acids of the CasX:gRNA systems of the disclosure that modify the target nucleic acid. The lipid nanoparticles and compositions of embodiments of the disclosure may also be used for co-delivery of different nucleic acids (e.g., mRNA and plasmid DNA) separately or in combination, such as may be useful to provide an effect requiring colocalization of different nucleic acids (e.g., mRNA encoding for a suitable gene modifying enzyme and gRNA for targeting of the target nucleic acid).

[0214] In some embodiments, the mRNA of the disclosure encoding the engineered CasX protein may be provided in a solution to be mixed with a lipid solution such that the mRNA may be encapsulated in the lipid nanoparticles. A suitable mRNA solution may be any aqueous solution containing mRNA to be encapsulated at various concentrations. For example, a suitable mRNA solution may contain an mRNA at a concentration of or greater than about 0.01 mg/ml, 0.05 mg/ml, 0.06 mg/ml, 0.07 mg/ml, 0.08 mg/ml, 0.09 mg/ml, 0.1 mg/ml, 0.15 mg/ml, 0.2 mg/ml, 0.3 mg/ml, 0.4 mg/ml, 0.5 mg/ml, 0.6 mg/ml, 0.7 mg/ml, 0.8 mg/ml, 0.9 mg/ml, 1.0 mg/ml, 1.25 mg/ml, 1.5 mg/ml, 1.75 mg/ml, or 2.0 mg/ml. In some embodiments, a suitable mRNA solution may contain an mRNA at a concentration ranging from about 0.01-2.0 mg/ml, 0.01-1.5 mg/ml, 0.01-1.25 mg/ml, 0.01-1.0 mg/ml, 0.01-0.9 mg/ml, 0.01-0.8 mg/ml, 0.01-0.7 mg/ml, 0.01-0.6 mg/ml, 0.01-0.5 mg/ml, 0.01-0.4 mg/ml, 0.01-0.3 mg/ml, 0.01-0.2 mg/ml, 0.01-0.1 mg/ml, 0.05-1.0 mg/ml, 0.05-0.9 mg/ml, 0.05-0.8 mg/ml, 0.05-0.7 mg/ml, 0.05-0.6 mg/ml, 0.05-0.5 mg/ml, 0.05-0.4 mg/ml, 0.05-0.3 mg/ml, 0.05-0.2 mg/ml, 0.05-0.1 mg/ml, 0.1-1.0 mg/ml, 0.2-0.9 mg/ml, 0.3-0.8 mg/ml, 0.4-0.7 mg/ml, or 0.5-0.6 mg/ml. In some embodiments, a suitable mRNA solution may contain an mRNA at a concentration up to about 5.0 mg/ml, 4.0 mg/ml, 3.0 mg/ml, 2.0 mg/ml, 1.0 mg/ml, 0.9 mg/ml, 0.8 mg/ml, 0.7 mg/ml, 0.6 mg/ml, 0.5 mg/ml, 0.4 mg/ml, 0.3 mg/ml, 0.2 mg/ml, 0.1 mg/ml, 0.05 mg/ml, 0.04 mg/ml, 0.03 mg/ml, 0.02 mg/ml, 0.01 mg/ml, or 0.05 mg/ml.

[0215] Early formulations of LNP utilizing permanently cationic lipids resulted in LNPs with positive surface charge that proved toxic in vivo, plus were rapidly cleared by phagocytic cells. By changing to ionizable cationic lipids bearing tertiary or quaternary amines, especially those with pKa <7, resulting LNP achieve efficient encapsulation of nucleic acid polymers at low pH by interacting electrostatically with the negative charges of the phosphate backbone of mRNA, that also result in largely neutral systems at physiological pH values, thus alleviating problems associated with permanently-charged cationic lipids. The lipid composition usually consists of an ionizable amino lipid, a helper lipid (usually a phospholipid), cholesterol, and a polyethylene glycol-lipid conjugate (PEG-lipid) to improve the colloidal stability in biological environments by reducing aspecific absorption of plasma proteins and forming a hydration layer over the nanoparticles, and are formulated at typical mole ratios of 50:10:37-39:1.5-2.5, with variations made to adjust individual properties. Herein, “ionizable lipid” means an amine-containing lipid which can be easily protonated, and for example, it may be a lipid of which charge state changes depending on the surrounding pH. The ionizable lipid may be protonated (positively charged) at a pH below the pKa of a cationic lipid, and it may be substantially neutral at a pH over the pKa. In one example, the LNP may comprise a protonated ionizable lipid and/or an ionizable lipid showing neutrality. In some embodiments, the LNP has a pKa of 5 to 8, 5.5 to 7.5, 6 to 7, or 6.5 to 7. The pKa of the LNP is important for in vivo stability and release of the nucleic acid payload of the LNP. In some embodiments, the LNP having the foregoing pKa ranges may be safely delivered to a target organ (for example, the liver, lung, heart, spleen, as well as to tumors) and/or target cell (hepatocyte, LSEC, cardiac cell, cancer cell, etc.) in vivo, and after endocytosis, exhibit a positive charge to release the encapsulated payload through electrostatic interaction with an anionic protein of the endosome membrane.

[0216] The ionizable lipid is an ionizable compound having characteristics similar to lipids generally, and through electrostatic interaction with a nucleic acid (for example, an mRNA of the disclosure), may play a role of encapsulating the nucleic acid within the LNP with high efficiency.

[0217] According to the type of the amine comprised in the ionizable lipid, (i) the nucleic acid encapsulation efficiency, (ii) PDI (polydispersity index), and/or (iii) the nucleic acid delivery efficiency to tissue and/or cells constituting an organ (for example, hepatocytes or liver sinusoidal endothelial cells in the liver) of the LNP may be different. In certain embodiments, the ionizable cationic lipid comprises from about 46 mol % to about 66 mol % of the total lipid present in the particle.

[0218] The LNP comprising an ionizable lipid comprising an amine may have one or more kinds of the following characteristics: (1) encapsulating a drug with high efficiency; (2) uniform size of prepared particles (or having a low PDI value); and/or (3) excellent nucleic acid delivery efficiency to organs such as liver, lung, heart, spleen, as well as to tumors, and/or cells constituting such organs (for example, hepatocytes, LSEC, cardiac cells, cancer cells, etc.).

[0219] The lipid composition usually consists of an ionizable amino lipid, a helper lipid (usually a phospholipid), cholesterol, and a polyethylene glycol-lipid conjugate (PEG-lipid) to improve the colloidal stability in biological environments by reducing aspecific absorption of plasma proteins and forming a hydration layer over the nanoparticles and are formulated at typical mole ratios of 50:10:37-39:1.5-2.5, with variations made to adjust individual properties. As the PEG-lipid forms the surface lipid, the size of the LNP can be readily varied by varying the proportion of surface (PEG) lipid to the core (ionizable cationic) lipids. In some embodiments, the PEG-lipid can be varied from ˜1 to 5 mol % to modify particle properties such as size, stability, and circulation time. In particular, the cationic lipid form plays a crucial role both in nucleic acid encapsulation through electrostatic interactions and intracellular release by disrupting endosomal membranes. The mRNA are encapsulated within the LNP by the ionic interactions they form with the positively charged cationic (or ionizable) lipid. Non-limiting examples of ionizable cationic lipid components utilized in the LNP of the disclosure are selected from DLin-MC3-DMA (heptatriaconta-6,9,28,31-tetraen-19-y14-(dimethylamino) butanoate). DLin-KC2-DMA (2,2-dilinoleyl-4-(2-dimethylaminoethyl)-[1,3]-dioxolane), and TNT (1,3,5-triazinane-2,4,6-trione) and TT (N1,N3,N5-tris(2-aminoethyl)benzene-1,3,5-tricarboxamide). Non-limiting examples of helper lipids utilized in the LNP of the disclosure are selected from DSPC (1,2-distearoyl-sn-glycero-3-phosphocholine). POPC (2-Oleoyl-1-palmitoyl-sn-glycero-3-phosphocholine) and DOPE (1,2-Dioleoyl-sn-glycero-3-phosphoethanolamine). Cholesterol and PEG-DMG ((R)-2,3-bis (octadecyloxy) propyl-1-(methoxy polyethylene glycol 2000) carbamate) or PEG-DSG (1,2-Distearoyl-rac-gly cero-3-methylpolyoxyethylene glycol 2000) are components utilized for the stability, circulation, and size of the LNP.

[0220] In other embodiments, the ionizable cationic lipid in the nucleic acid-lipid particles of the disclosure may comprise, for example, one or more ionizable cationic lipids wherein the ionizable cationic lipid is a dialkyl lipid. In another embodiment, the ionizable cationic lipid is a trialkyl lipid. In one particular embodiment, the ionizable cationic lipid is selected from the group consisting of 1,2-dilinoleyloxy-N,N-dimethylaminopropane (DLinDMA), 1,2-dilinolenyloxy-N,N-dimethylaminopropane (DLinDMA), 1,2-di-gamma.-linolenyloxy-N,N-dimethylaminopropane (gamma.-DLinDMA), 2,2-dilinoleyl-4-(2-dimethylaminoethyl)-[1,3]-dioxolane (DLin-K-C2-DMA), 2,2-dilinoleyl-4-dimethylaminomethyl-[1,3]-dioxolane (DLin-K-DMA), dilinoleylmethyl-3-dimethylaminopropionate (DLin-M-C2-DMA), or salts thereof and mixtures thereof. In a particular embodiment, the ionizable cationic lipid is selected from the group consisting of 1,2-dilinoleyloxy-N,N-dimethylaminopropane (DLinDMA), 1,2-dilinolenyloxy-N,N-dimethylaminopropane (DLenDMA), 1,2-di-, gamma.-linolenyloxy-N, N-dimethylaminopropane (.gamma.-DLenDMA; a salt thereof, or a mixture thereof. In some embodiments, the N/P ratio (nitrogen from the cationic/ionizable lipid and phosphate from the nucleic acid) is in the range of is about 3:1 to 7:1, or about 4:1 to 6:1, or is 3:1, or is 4:1, or is 5:1, or is 6:1, or is 7:1.

[0221] The phospholipid of the elements of the LNP according to one example plays a role of covering and protecting a core formed by interaction of the ionizable lipid and nucleic acid in the LNP, and may facilitate cell membrane permeation and endosomal escape during intracellular delivery of the nucleic acid by binding to the phospholipid bilayer of a target cell.

[0222] For the phospholipid, a phospholipid which can promote fusion of the LNP according to one example may be used without limitation, and for example, it may be one or more kinds selected from the group consisting of dioleoylphosphatidylethanolamine (DOPE), distearoylphosphatidylcholine (DSPC), palmitoyloleoylphosphatidylcholine (POPC), egg phosphatidylcholine (EPC), dioleoylphosphatidylcholine (DOPC), dipalmitoylphosphatidylcholine (DPPC), dioleoylphosphatidylglycerol (DOPG), dipalmitoylphosphatidylglycerol (DPPG), distearoylphosphatidylethanolamine (DSPE), phosphatidylethanolamine (PE), dipalmitoylphosphatidylethanolamine, 1,2-dioleoyl-sn-glycero-3-phosphoethanolamine, 1-palmitoyl-2-oleoyl-sn-glycero-3-phosphoethanolamine (POPE), 1-palmitoyl-2-oleoyl-sn-glycero-3-phosphocholine (POPC), 1,2-dioleoyl-sn-glycero-3-[phospho-L-serine] (DOPS), 1,2-dioleoyl-sn-glycero-3-[phospho-L-serine] and the like. In one example, the LNP comprising DOPE may be effective in mRNA delivery (excellent drug delivery efficacy).

[0223] The cholesterol of the elements of the LNP according to one example may provide morphological rigidity to lipid filling in the LNP and be dispersed in the core and surface of the nanoparticle to improve the stability of the nanoparticle.

[0224] Herein, “lipid-PEG (polyethyleneglycol) conjugate”, “lipid-PEG”, “PEG-lipid”, “PEG-lipid”, or “lipid-PEG” refers to a form in which lipid and PEG are conjugated and means a lipid in which a polyethylene glycol (PEG) polymer which is a hydrophilic polymer is bound to one end. The lipid-PEG conjugate contributes to the particle stability in serum of the nanoparticle within the LNP, and plays a role of preventing aggregation between nanoparticles. In addition, the lipid-PEG conjugate may protect nucleic acids from degrading enzyme during in vivo delivery of the nucleic acids and enhance the stability of nucleic acids in vivo and increase the half-life of the drug encapsulated in the nanoparticle. Examples of PEG-lipid conjugates include, but are not limited to, PEG-DAG conjugates, PEG-DAA conjugates, and mixtures thereof. In certain embodiments, the PEG-lipid conjugate is selected from the group consisting of a PEG-diacylglycerol (PEG-DAG) conjugate, a PEG-dialkyloxypropyl (PEG-DAA) conjugate, a PEG-phospholipid conjugate, a PEG-ceramide (PEG-Cer) conjugate, and a mixture thereof. In certain embodiments, the PEG-lipid conjugate is a PEG-DAA conjugate. In certain embodiments, the PEG-DAA conjugate in the lipid particle may comprise a PEG-didecyloxypropyl (C10) conjugate, a PEG-dilaury loxypropyl (C12) conjugate, a PEG-dimyristyloxypropyl (C14) conjugate, a PEG-dipalmity loxypropyl (C16) conjugate, a PEG-distearyloxypropyl (C18) conjugate, or mixtures thereof. In certain embodiments, wherein the PEG-DAA conjugate is a PEG-dimyristyloxypropyl (C14) conjugate. In other embodiments, the lipid-PEG conjugate may be PEG bound to phospholipid such as phosphatidylethanolamine (PEG-PE), PEG conjugated to ceramide (PEG-CER, ceramide-PEG conjugate, ceramide-PEG, cholesterol or PEG conjugated to derivative thereof, PEG-c-DOMG, PEG-DMG, PEG-DLPE, PEG-DMPE, PEG-DPPC. PEG-DSPE (DSPE-PEG), and a mixture thereof, and for example, may be C16-PEG2000 ceramide (N-palmitoyl-sphingosine-1-{succinyl[methoxy (polyethylene glycol)2000]}), DMG-PEG 2000, 14:0 PEG2000 PE.

[0225] In certain embodiments, the conjugated lipid that inhibits aggregation of particles comprises from about 0).5 mol % to about 3 mol % of the total lipid present in the particle.

[0226] In one example, the average molecular weight of the lipid-PEG conjugate may be 100 daltons to 10,000 daltons, 200 daltons to 8,000 daltons, 500 daltons to 5,000 daltons, 1,000 daltons to 3,000 daltons, 1,000 daltons to 2,600 daltons, 1,500 daltons to 2,600 daltons, 1,500 daltons to 2,500 daltons, 2,000 daltons to 2,600 daltons, 2,000 daltons to 2,500 daltons, or 2,000 daltons.

[0227] For the lipid in the lipid-PEG conjugate, any lipid capable of binding to polyethyleneglycol may be used without limitation, and the phospholipid and/or cholesterol which are other elements of the LNP may be also used. Specifically, the lipid in the lipid-PEG conjugate may be ceramide, dimyristoylglycerol (DMG), succinoyl-diacylglycerol (s-DAG), distearoylphosphatidylcholine (DSPC), distearoylphosphatidylethanolamine (DSPE), or cholesterol, but not limited thereto.

[0228] In the lipid-PEG conjugate, the PEG may be directly conjugated to the lipid or linked to the lipid via a linker moiety. Any linker moiety suitable for binding PEG to the lipid may be used, and for example, includes an ester-free linker moiety and an ester-containing linker moiety. The ester-free linker moiety includes not only amido (—C(O) NH—), amino (—NR—), carbonyl (—C(O)—), carbamate (—NHC (O)O—), urea (—NHC (O) NH—), disulfide (—S—S—), ether (—O—), succinyl (—(O) CCH2CH2C(O)—), succinamidyl (—NHC (O) CH2CH2C (O) NH—), ether, disulfide but also combinations thereof (for example, a linker containing both a carbamate linker moiety and an amido linker moiety), but not limited thereto. The ester-containing linker moiety includes for example, carbonate (—OC (O)O—), succinoyl, phosphate ester (—O—(O) POH—O—), sulfonate ester, and combinations thereof, but not limited thereto.

[0229] In certain embodiments, the nucleic acid-lipid particle has a total lipid:mRNA mass ratio of from about 5:1 to about 15:1. In some embodiments, the weight ratio of the ionizable lipid and nucleic acid comprised in the LNP may be 1 to 20:1, 1 to 15:1, 1 to 10:1, 5 to 20:1, 5 to 15:1, 5 to 10:1, 7.5 to 20:1, 7.5 to 15:1, or 7.5 to 10:1.

[0230] In one example, the LNP may comprise the ionizable lipid of 20 to 50 parts by weight, phospholipid of 10 to 30 parts by weight, cholesterol of 20 to 60 parts by weight (or 20 to 60 parts by weight), and lipid-PEG conjugate of 0.1 to 10 parts by weight (or 0.25 to 10 parts by weight, 0.5 to 5 parts by weight). The LNP may comprise the ionizable lipid of 20 to 50% by weight, phospholipid of 10 to 30% by weight, cholesterol of 20 to 60% by weight (or 30 to 60% by weight), and lipid-PEG conjugate of 0.1 to 10% by weight (or 0.25 to 10% by weight, 0.5 to 5% by weight) based on the total nanoparticle weight. In other example, the LNP may comprise the ionizable lipid of 25 to 50% by weight, phospholipid of 10 to 20% by weight, cholesterol of 35 to 55% by weight, and lipid-PEG conjugate of 0.1 to 10% by weight (or 0.25 to 10% by weight, 0.5 to 5% by weight), based on the total nanoparticle weight.

[0231] In some embodiments, the approach to formulating the LNP of the disclosure (described more fully in the examples) is to dissolve lipids in an organic solvent such as ethanol, which is then mixed through a micromixer with the nucleic acid dissolved in an acidic buffer (usually pH 4). At this pH the ionizable cationic lipid is positively charged and interacts with the negatively-charged nucleic acid polymers. The resulting nanostructures containing the nucleic acids are then converted to neutral LNP when dialyzed against a neutral buffer during the ethanol removal step. The LNP formed by this have a distinct electron-dense nanostructured core where the ionizable cationic lipids are organized into inverted micelles around the encapsulated mRNA molecules, as opposed to the traditional bilayer liposomal structures.

[0232] In some embodiments, the LNP may have an average diameter of 20 nm to 200 nm, 20 to 180 nm, 20 nm to 170 nm, 20 nm to 150 nm, 20 nm to 120 nm, 20 nm to 100 nm, 20 nm to 90 nm, 30 nm to 200 nm, 30 to 180 nm, 30 nm to 170 nm, 30 nm to 150 nm, 30 nm to 120 nm, 30 nm to 100 nm, 30 nm to 90 nm, 40 nm to 200 nm, 40 to 180 nm, 40 nm to 170 nm, 40 nm to 150 nm, 40 nm to 120 nm, 40 nm to 100 nm, 40 nm to 90 nm, 40 nm to 80 nm, 40 nm to 70 nm, 50 nm to 200 nm, 50 to 180 nm, 50 nm to 170 nm, 50 nm to 150 nm, 50 nm to 120 nm, 50 nm to 100 nm, 50 nm to 90 nm, 60 nm to 200 nm, 60 to 180 nm, 60 nm to 170 nm, 60 nm to 150 nm, 60 nm to 120 nm, 60 nm to 100 nm, 60 nm to 90 nm, 70 nm to 200 nm, 70 to 180 nm, 70 nm to 170 nm, 70 nm to 150 nm, 70 nm to 120 nm, 70 nm to 100 nm, 70 nm to 90 nm, 80 nm to 200 nm, 80 to 180 nm, 80 nm to 170 nm, 80 nm to 150 nm, 80 nm to 120 nm, 80 nm to 100 nm, 80 nm to 90 nm, 90 nm to 200 nm, 90 to 180 nm, 90 nm to 170 nm, 90 nm to 150 nm, 90 nm to 120 nm, or 90 nm to 100 nm for easy introduction into liver tissue, hepatocytes and/or LSEC (liver sinusoidal endothelial cells). The LNP may be sized for easy introduction into organs or tissues, including but not limited to liver, lung, heart, spleen, as well as to tumors. When the size of the LNP is smaller than the above range, it is difficult to maintain stability as the surface area of the LNP is excessively increased, and thus delivery to the target tissue and/or drug effect may be reduced. The LNP may specifically target liver tissue. The LNP may imitate metabolic behaviors of natural lipoproteins very similarly and may be usefully applied for the lipid metabolism process by the liver and therapeutic mechanism through this. During the drug delivery to hepatocytes or and/or LSEC (liver sinusoidal endothelial cells), the diameter of the fenestrae leading from the sinusoidal lumen to the hepatocytes and LSEC is about 140 nm in mammals and about 100 nm in humans, so the composition for drug delivery having a diameter in the above ranges may have excellent drug delivery efficiency to hepatocytes and LSEC than the LNP having the diameter outside the above range.

[0233] According to one example, the LNP comprised in the composition for nucleic acid delivery into target cells may comprise the ionizable lipid: phospholipid: cholesterol: lipid-PEG conjugate in the range described above or at a molar ratio of 20 to 50:10 to 30:30 to 60:0.5 to 5, at a molar ratio of 25 to 45:10 to 25:40 to 50:0.5 to 3, at a molar ratio of 25 to 45:10 to 20:40 to 55:0.5 to 3, or at a molar ratio of 25 to 45:10 to 20:40 to 55:1.0 to 1.5. The LNP comprising components at a molar ratio in the above range may have excellent drug delivery efficiency specific to cells of target organs.

[0234] The LNP according to one example exhibits a positive charge under the acidic pH condition by showing a pKa of 5 to 8, 5.5 to 7.5, 6 to 7, or 6.5 to 7, and may encapsulate a nucleic acid with high efficiency by easily forming a complex with a nucleic acid through electrostatic interaction with a therapeutic agent such as a nucleic acid showing a negative charge, and it may be usefully used as a composition for intracellular or in vivo drug delivery of a drug (for example, nucleic acid). Herein, “encapsulation” refers to encapsulating a delivery substance for surrounding and embedding it in vivo efficiently, and the drug encapsulation efficiency (encapsulation efficiency) mean the content of the drug encapsulated in the LNP for the total drug content used for preparation.

[0235] The encapsulation efficiency of the nucleic acids of the composition in the LNP may be 70% or more, 75% or more, 80% or more, 85% or more, 90% or more, 91% or more, 92% or more, 94% or more, or 95% or more. In other embodiments, the encapsulation efficiency of the nucleic acids of the composition in the LNP is over 80% to 99% or less, over 80% to 97% or less, over 80% to 95% or less, 85% or more to 95% or less, 87% or more to 95% or less, 90% or more to 95% or less, 91% or more to 95% or less, 91% or more to 94% or less, over 91% to 95% or less, 92% or more to 99% or less, 92% or more to 97% or less, or 92% or more to 95% or less. As used herein, “encapsulation efficiency” means the percentage of LNP particles containing the nucleic acids to be incorporated within the LNP. In some embodiments, the mRNA encoding the engineered CasX protein and a gRNA of any of the embodiments of the disclosure are fully encapsulated in the nucleic acid-lipid particle.

[0236] The target organs to which a nucleic acid is delivered by the LNP include, but are not limited to the liver, lung, heart, spleen, as well as to tumors. The LNP according to one example is liver tissue-specific and has excellent biocompatibility and can deliver the nucleic acids of a composition with high efficiency, and thus it can be usefully used in related technical fields such as lipid nanoparticle-mediated gene therapy. In a particular embodiment, the target cell to which the nucleic acids are delivered by the LNP according to one example may be a hepatocyte and/or LSEC in vivo. In other embodiments, the disclosure provides LNP formulated for delivery of the nucleic acids of the embodiments to cells ex vivo.

[0237] The disclosure also provides a pharmaceutical composition comprising an mRNA encoding an engineered CasX protein and a gRNA variant described herein, and a pharmaceutically acceptable carrier.

[0238] In certain embodiments, the nucleic acid-lipid particle has an electron dense core.

[0239] In some embodiments, the disclosure provides nucleic acid-lipid particles comprising: (a) an mRNA encoding the engineered CasX and a gRNA variant described herein; (b) one or more ionizable cationic lipids or salts thereof comprising from about 50 mol % to about 85 mol % of the total lipid present in the particle; (c) one or more non-cationic lipids comprising from about 13 mol % to about 49.5 mol % of the total lipid present in the particle; and (d) one or more conjugated lipids that inhibit aggregation of particles comprising from about 0).5 mol % to about 2 mol % of the total lipid present in the particle. In certain embodiments the CasX mRNA and gRNA may be present in the same nucleic acid-lipid particle, or they may be present in different nucleic acid-lipid particles.

[0240] In some embodiments, the disclosure provides nucleic acid-lipid particles comprising: (a) an mRNA encoding the CasX described herein; (b) a ionizable cationic lipid or a salt thereof comprising from about 52 mol % to about 62 mol % of the total lipid present in the particle; (c) a mixture of a phospholipid and cholesterol or a derivative thereof comprising from about 36 mol % to about 47 mol % of the total lipid present in the particle; and (d) a PEG-lipid conjugate comprising from about 1 mol % to about 2 mol % of the total lipid present in the particle. In one particular embodiment, the formulation is a four-component system comprising about 1.4 mol % PEG-lipid conjugate (e.g., PEG2000-C-DMA), about 57.1 mol % ionizable cationic lipid (e.g., DLin-K-C2-DMA) or a salt thereof, about 7.1 mol % DPPC (or DSPC), and about 34.3 mol % cholesterol (or derivative thereof).

[0241] In another embodiment, the nucleic acid-lipid particle comprises: (a) an mRNA encoding the engineered CasX protein and a gRNA of any of the embodiments described herein; (b) a ionizable cationic lipid or a salt thereof comprising from about 46.5 mol % to about 66.5 mol % of the total lipid present in the particle; (c) cholesterol or a derivative thereof comprising from about 31.5 mol % to about 42.5 mol % of the total lipid present in the particle; and (d) a PEG-lipid conjugate comprising from about 1 mol % to about 2 mol % of the total lipid present in the particle. In one particular embodiment, the formulation is a three-component system which is phospholipid-free and comprises about 1.5 mol % PEG-lipid conjugate (e.g., PEG2000-C-DMA), about 61.5 mol % ionizable cationic lipid (e.g., DLin-K-C2-DMA) or a salt thereof, and about 36.9 mol % cholesterol (or derivative thereof).

[0242] Additional formulations are described in PCT Publication No. WO 09/127060 and published U.S. patent application publication numbers US 2011/0071208 A1 and US 2011/0076335 A1, the disclosures of which are herein incorporated by reference in their entirety.

[0243] In another embodiment, the nucleic acid-lipid particle comprises: (a) an mRNA encoding the engineered CasX protein and a gRNA of any of the embodiments described herein; (b) one or more ionizable lipids or salts thereof comprising from about 2 mol % to about 50 mol % of the total lipid present in the particle; (c) one or more non-cationic lipids comprising from about 5 mol % to about 90 mol % of the total lipid present in the particle; and (d) one or more conjugated lipids that inhibit aggregation of particles comprising from about 0).5 mol % to about 20 mol % of the total lipid present in the particle.

[0244] In another embodiment, the nucleic acid-lipid particle comprises: (a) an mRNA encoding the engineered CasX protein and a gRNA of any of the embodiments described herein; (b) a ionizable cationic lipid or a salt thereof comprising from about 30 mol % to about 50 mol % of the total lipid present in the particle; (c) a mixture of a phospholipid and cholesterol or a derivative thereof comprising from about 47 mol % to about 69 mol % of the total lipid present in the particle; and (d) a PEG-lipid conjugate comprising from about 1 mol % to about 3 mol % of the total lipid present in the particle. In one particular embodiment, the formulation is a four-component system which comprises about 2 mol % PEG-lipid conjugate (e.g., PEG2000-C-DMA), about 40 mol % ionizable cationic lipid (e.g., DLin-K-C2-DMA) or a salt thereof, about 10 mol % DPPC (or DSPC), and about 48 mol % cholesterol (or derivative thereof).

[0245] In another embodiment, the nucleic acid-lipid particle comprises: (a) an mRNA encoding the engineered CasX protein and a gRNA of any of the embodiments described herein; (b) one or more ionizable cationic lipids or salts thereof comprising from about 50 mol % to about 65 mol % of the total lipid present in the particle; (c) one or more non-cationic lipids comprising from about 25 mol % to about 45 mol % of the total lipid present in the particle; and (d) one or more conjugated lipids that inhibit aggregation of particles comprising from about 5 mol % to about 10 mol % of the total lipid present in the particle.

[0246] In another embodiment, the nucleic acid-lipid particle comprises: (a) an mRNA encoding the engineered CasX protein and a gRNA of any of the embodiments described herein; (b) a ionizable cationic lipid or a salt thereof comprising from about 50 mol % to about 60) mol % of the total lipid present in the particle; (c) a mixture of a phospholipid and cholesterol or a derivative thereof comprising from about 35 mol % to about 45 mol % of the total lipid present in the particle; and (d) a PEG-lipid conjugate comprising from about 5 mol % to about 10 mol % of the total lipid present in the particle.

[0247] In certain embodiments, the non-cationic lipid mixture in the formulation comprises: (i) a phospholipid of from about 5 mol % to about 10 mol % of the total lipid present in the particle; and (ii) cholesterol or a derivative thereof of from about 25 mol % to about 35 mol % of the total lipid present in the particle. In one particular embodiment, the formulation is a four-component system which comprises about 7 mol % PEG-lipid conjugate (e.g., PEG750-C-DMA), about 54 mol % ionizable cationic lipid (e.g., DLin-K-C2-DMA) or a salt thereof, about 7 mol % DPPC (or DSPC), and about 32 mol % cholesterol (or derivative thereof).

[0248] In another embodiment, the nucleic acid-lipid particle comprises: (a) an mRNA encoding the engineered CasX protein and a gRNA of any of the embodiments described herein; (b) a ionizable cationic lipid or a salt thereof comprising from about 55 mol % to about 65 mol % of the total lipid present in the particle; (c) cholesterol or a derivative thereof comprising from about 30 mol % to about 40 mol % of the total lipid present in the particle; and (d) a PEG-lipid conjugate comprising from about 5 mol % to about 10 mol % of the total lipid present in the particle. In one particular embodiment, the formulation is a three-component system which is phospholipid-free and comprises about 7 mol % PEG-lipid conjugate (e.g., PEG750)—C-DMA), about 58 mol % ionizable cationic lipid (e.g., DLin-K-C2-DMA) or a salt thereof, and about 35 mol % cholesterol (or derivative thereof).

[0249] In another embodiment, the nucleic acid-lipid particle comprises: (a) an mRNA encoding the engineered CasX protein and a gRNA of any of the embodiments described herein; (b) a ionizable cationic lipid or a salt thereof comprising from about 48 mol % to about 62 mol % of the total lipid present in the particle; (c) a mixture of a phospholipid and cholesterol or a derivative thereof, wherein the phospholipid comprises about 7 mol % to about 17 mol % of the total lipid present in the particle, and wherein the cholesterol or derivative thereof comprises about 25 mol % to about 40 mol % of the total lipid present in the particle; and (d) a PEG-lipid conjugate comprising from about 0.5 mol % to about 3.0 mol % of the total lipid present in the particle.

### VII. Systems and Methods for Modification of LPA Target Nucleic Acids

[0250] The systems encoding or comprising engineered CasX proteins and gRNA of the disclosure have utility in the modification or editing of an LPA target nucleic acid in a population of cells, when used with a guide ribonucleic acid having a targeting sequence complementary to the target nucleic acid to be modified or edited. Such systems are useful for various applications, including as therapeutics, diagnostics, and for research. To effect the methods of the disclosure, resulting in modification of the LPA gene, provided herein are programmable CasX:gRNA systems. The programmable nature of the systems provided herein allows for the precise targeting to achieve the desired effect (nicking, cleaving, modifying, etc.) at one or more regions of predetermined interest in the LPA gene target nucleic acid in a eukaryotic cell. In some embodiments, it may be desirable to knock-down or knock-out expression of the LPA gene in the subject.

[0251] A variety of strategies and methods can be employed to modify the target nucleic acid sequence in a cell using the systems provided herein. As used herein “modifying” includes, but is not limited to, cleaving, nicking, editing, deleting, knocking out, knocking down, mutating, exon-skipping and the like. Depending on the system components utilized, the editing event may be a cleavage event followed by introducing random insertions or deletions (indels) or other mutations (e.g., a substitution, duplication, or inversion of one or more nucleotides), for example by utilizing the imprecise non-homologous DNA end joining (NHEJ) repair pathway, which may generate, for example, a frame shift mutation. In some embodiments of the method, the modification comprises introducing an in-frame mutation in the target nucleic acid. In some embodiments of the method, the modification comprises introducing a frame-shifting mutation in the target nucleic acid. In some embodiments of the method, the modification comprises introducing a premature stop codon in the coding sequence in the target nucleic acid. In some embodiments of the method, the modification results in expression of a non-functional protein in the modified cells of the population. As a result of a gene knock-down, the apo (a) protein activity or function may be attenuated or the protein levels may be reduced or eliminated.

[0252] In some embodiments, the disclosure provides systems specifically designed for use in the methods to modify the target nucleic acid of an LPA gene in eukaryotic cells; either in vitro, ex vivo, or in vivo in a subject. Generally, any portion of the gene can be targeted using the programmable systems and methods provided herein. In one embodiment, the disclosure provides for a method of modifying a target nucleic acid sequence of a LPA gene in a population of cells, the method comprising introducing into each cell of the population: i) a CasX:gRNA system comprising a CasX and a gRNA of any of the embodiments described herein; ii) a nucleic acid encoding the CasX and gRNA of any of the embodiments described herein; iii) a vector selected from the group consisting of a retroviral vector, a lentiviral vector, an adenoviral vector, an adeno-associated viral (AAV) vector, and a herpes simplex virus (HSV) vector, and comprising the nucleic acid of (iv), above; v) an LNP or a synthetic nanoparticle comprising a gRNA and a mRNA encoding the engineered CasX protein; or vi) combinations of two or more of (i) to (v), wherein the target nucleic acid sequence of the cells targeted by the gRNA is modified by the CasX protein. In some embodiments of the method, the LPA target nucleic acid of at least about 1%, at least about 2%, at least about 3%, at least about 4%, at least about 5%, at least about 6%, at least about 7%, at least about 8%, at least about 9%, or at least about 10%, at least about 20%, at least about 30%, at least about 40%, at least about 50%, at least about 60% at least about 70%, at least about 80%, or at least about 90% or more of the cells of the population is modified. In some embodiments of the method, the LPA gene in the cells of the population is modified such that expression of the apolipoprotein A is decreased by at least about 10%, at least about 20%, at least about 30%, at least about 40%, at least about 50%, at least about 60%, at least about 70%, at least about 80%, or at least about 90% in comparison to a cell where the LPA gene has not been modified. In some embodiments of the method, the LPA gene of the cells of the population is modified such that at least about 10%, at least about 20%, at least about 30%, at least about 40%, at least about 50%, at least about 60%, at least about 70%, at least about 80%, or at least about 90% of the modified cells do not express a detectable level of apolipoprotein (a). In some embodiments of the method, the LPA gene of the cells of the population is modified such that in the cells of the population such that at least about 10%, at least about 20%, at least about 30%, at least about 40%, at least about 50%, at least about 60%, at least about 70%, at least about 80%, or at least about 90% of the modified cells do not express a detectable level of apolipoprotein (a).

[0253] In some embodiments of the method, the modifying of the cell occurs in vitro. In some embodiments of the method, the modifying of the cell occurs ex vivo, wherein the modified cells can be administered to a subject. In some embodiments of the method, the modifying of the cell occurs in vivo. In some embodiments of the method, the cell is a eukaryotic cell. In some embodiments of the method, the eukaryotic cell is selected from the group consisting of a rodent cell, a mouse cell, a rat cell, a primate cell, and a non-human primate cell. In some embodiments of the method, the eukaryotic cell is a human cell. In some embodiments of the method, the cell may be a hepatocyte and/or LSEC (liver sinusoidal endothelial cells).

[0254] In some embodiments, the systems provided herein for modification of the target nucleic acid comprise an mRNA encoding an engineered CasX protein comprising a sequence selected from the group consisting of SEQ ID NOS: 19699-19702 and 19830-19837, or a sequence at least 60% identical, at least 70% identical, at least 80% identical, at least 81% identical, at least 82% identical, at least 83% identical, at least 84% identical, at least 85% identical, at least 86% identical, at least 86% identical, at least 87% identical, at least 88% identical, at least 89% identical, at least 89% identical, at least 90% identical, at least 91% identical, at least 92% identical, at least 93% identical, at least 94% identical, at least 95% identical, at least 96% identical, at least 97% identical, at least 98% identical, at least 99% identical, or at least 99.5% identical thereto. In some embodiments, the systems provided herein for modification of the target nucleic acid comprise an mRNA encoding an engineered CasX protein comprising a sequence selected from the group consisting of SEQ ID NOS: 19699-19702. In a particular embodiment, the systems are formulated in LNP that encapsulate the mRNA encoding the engineered CasX protein comprising a sequence selected from the group consisting of SEQ ID NOS: 19699-19702 and a gRNA selected from the group consisting of SEQ ID NOS: 19855-19862. In other embodiments, the mRNAs are encoded by DNA that are incorporated into vectors, such as a recombinant Adeno-Associated Viral (AAV) vector, for delivery of the CasX of the disclosure.

[0255] In some embodiments of the method, the system is introduced into the cells using LNP comprising mRNA encoding the engineered CasX protein and gRNA of any of the embodiments disclosed herein. LNP components and formulations for use in the system are described herein, below. In some embodiments, the LNP comprises an mRNA encoding the engineered CasX 515 (SEQ ID NO: 5), or a sequence having at least about 70%, at least about 80%, at least about 85%, at least about 90%, at least about 95%, at least about 96%, at least about 97%, at least about 98%, or having at least about 99% sequence identity thereto.

[0256] In another embodiment, the LNP comprises an mRNA encoding the engineered CasX 812 (SEQ ID NO: 7), or a sequence having at least about 70%, at least about 80%, at least about 85%, at least about 90%, at least about 95%, at least about 96%, at least about 97%, at least about 98%, or having at least about 99% sequence identity thereto. In another embodiment, the LNP comprises an mRNA encoding the engineered CasX 491 (SEQ ID NO: 4), or a sequence having at least about 70%, at least about 80%, at least about 85%, at least about 90%, at least about 95%, at least about 96%, at least about 97%, at least about 98%, or having at least about 99% sequence identity thereto. In another embodiment, the LNP comprises an mRNA encoding the engineered CasX 676 (SEQ ID NO: 6), or a sequence having at least about 70%, at least about 80%, at least about 85%, at least about 90%, at least about 95%, at least about 96%, at least about 97%, at least about 98%, or having at least about 99% sequence identity thereto. In some embodiments of the foregoing, the LNP further encompass a gRNA variant of the disclosure having a targeting sequence complementary to the target nucleic acid. In some embodiments, the LNP comprises gRNA comprising a sequence of scaffold variant 174 (SEQ ID NO: 464) and a linked targeting sequence complementary to the LPA gene. In some embodiments, the LNP comprises a gRNA comprising a sequence of scaffold variant 235 (SEQ ID NO: 465) and a linked targeting sequence complementary to the LPA gene including a sequence of an exon, an intron, an exon-intron junction, or a cCRE of the human LPA gene, including Exon 2, Exon 18, Exon 18, Exon 19, Exon 20, Exon 21, Exon 22, Exon 23, Exon 24, Exon 25, Exon 26, Exon 27, Exon 28, Exon 29, Exon 31, Exon 32, Exon 33. Exon 34, Exon 35, Exon 26, Exon 27, Exon 38, Exon 39, Intron 1, Intron 7, Intron 17, intron 18, Intron 19, Intron 24, Intron 26, Intron 28, Intron 33, Intron 37, or Intron 38.Exon2-Intron 1, Exon17-Intron 17, Exon 19-Intron 18, Exon20-Intron 19. Exon34-Intron 33, or Exon 39-Intron 38. In some embodiments, the LNP comprises gRNA comprising a sequence of scaffold variant 316 (SEQ ID NO: 466) and a linked targeting sequence complementary to the LPA gene. In some embodiments, the LNP comprises gRNA variant 316 with chemical modifications, including the scaffold portion of the sequences of SEQ ID NOS: 19724-19732 (i.e., the portion without the 20 3′ terminal nucleotides), with a linked targeting sequence complementary to the LPA gene that is also chemically-modified, as described herein. In a particular embodiment, the LNP comprises an mRNA of SEQ ID NO: 19835 encoding the engineered CasX 515 (SEQ ID NO: 5) and gRNA variant 316 with chemical modifications selected from the group consisting of SEQ ID NOS: 19855-19862. In some embodiments of the method, the cells to be modified are selected from the group consisting of rodent cells, mouse cells, rat cells, and non-human primate cells. In other embodiments of the method, the cells to be modified are human cells. In some embodiments of the method, the modification of the population of cells occurs in vivo in a subject, wherein the subject is selected from the group consisting of a rodent, a mouse, a rat, a non-human primate, and a human. In some embodiments of the methods, the modified cell is a hepatocyte, or a cell of the intestine, the kidney, the central nervous system, a smooth muscle cell, a macrophage, a cell of the retina, or a cell of arterial walls such as the endothelium.

[0257] The LNP can be administered by a route of administration selected from the group consisting of intravenous, intraarterial, intraportal vein injection, intraperitoneal, intramuscular, intracerebroventricular, intracisternal, intrathecal, intracranial, intralumbar, intraocular, subcutaneous, and oral routes.

[0258] The systems and methods described herein can be used to engineer a variety of cells in which expression of the LPA gene is reduced, e.g. knocked-down or knocked-out.

[0259] In another aspect, the present disclosure provides particle compositions for delivery of the CasX:gRNA systems described herein, to cells or to subjects for the modification of an LPA gene. Particles envisaged as within the scope of the instant disclosure include, but are not limited to, nanoparticles such as synthetic nanoparticles, polymeric nanoparticles, lipid nanoparticles as described supra, viral particles and virus-like particles. Particles of the disclosure may encapsulate payloads such as gRNA variants, as described herein, optionally in combination with mRNA encoding the CasX proteins of any of the embodiments described herein. Alternatively, or in addition, particles of the disclosure may encapsulate payloads of gRNA and engineered CasX proteins, for example when associated as a ribonucleoprotein (RNP) complex. In some embodiments, the particles are synthetic nanoparticles that encapsulate payloads of gRNA variants and mRNA encoding engineered CasX proteins of any of the embodiments described herein. In some embodiments, the synthetic nanoparticles comprise biodegradable polymeric nanoparticles (PNP). In some embodiments, materials for the creation of biodegradable polymeric nanoparticles (PNP) include polylactide, poly (lactic-co-glycolic acid) (PLGA), poly (ethyl cyanoacrylate), poly(butyl cyanoacrylate), poly (isobutyl cyanoacrylate), and poly (isohexyl cyanoacrylate), polyglutamic acid (PGA), poly (ε-caprolactone) (PCL), cyclodextrin, and natural polymers for instance chitosan, albumin, gelatin, and alginate, which are the most utilized polymers for the synthesis of PNP (Production and clinical development of nanoparticles for gene delivery. Molecular Therapy-Methods & Clinical Development 3:16023; doi: 10.1038 (2016)). In other embodiments, the particles are lipid nanoparticles that encapsulate gRNA variants and mRNA encoding the engineered CasX protein of any of the embodiments described herein, described more fully, below:

a. Lipid Nanoparticle (LNP) Compositions

[0260] The present disclosure provides lipid nanoparticles (LNP) for delivery of the CasX:gRNA systems described herein to cells or to subjects for the modification of an LPA gene. In some embodiments, the LNPs of the disclosure are tissue-specific, have excellent biocompatibility, and can deliver the CasX:gRNA systems with high efficiency, and thus can be used for the modification of the targeted gene.

[0261] The disclosure further provides LNP compositions and pharmaceutical compositions comprising a plurality of the LNP described herein.

[0262] In their native forms, nucleic acid polymers are unstable in biological fluids and cannot penetrate into the cytoplasm of target cells, thus requiring delivery systems. Lipid nanoparticles (LNP) have proven useful for both the protection and delivery of nucleic acids to tissues and cells. Furthermore, the use of mRNA in LNPs to encode the CasX eliminates the possibility of undesirable genome integration, as compared to DNA vectors. Moreover, mRNA efficiently transfects both mitotic and non-mitotic cells, as it does not require entry into the nucleus since it exerts its function in the cytoplasmic compartment. LNPs as a delivery platform thus offer the additional advantage of being able to co-formulate both the mRNA encoding the engineered CasX protein and the gRNA into single LNP particles.

[0263] Accordingly, in various embodiments, the disclosure provides lipid nanoparticles and compositions that may be used for a variety of purposes, including the delivery of encapsulated or associated (e.g., complexed) therapeutic agents such as nucleic acids to cells, both in vitro and in vivo. In certain embodiments, the disclosure provides methods of treating or preventing diseases or disorders in a subject in need thereof by contacting the subject with a lipid nanoparticle that encapsulates or is associated with a suitable therapeutic agent complexed through various physical, chemical or electrostatic interactions between one or more of the lipid components used in the compositions to make LNPs. In some embodiments, the suitable therapeutic agent comprises a CasX:gRNA system as described herein.

[0264] In certain embodiments, the lipid nanoparticles are useful for the delivery of nucleic acids, including, e.g., the mRNA encoding the engineered CasX proteins of the disclosure, including the sequences of SEQ ID NOS: 19830-19837, and the gRNA variants of the disclosure, including the scaffold sequences of SEQ ID NOS: 464-541, with a linked targeting sequence of the disclosure. In some embodiments, the present disclosure provides LNP in which the gRNA and mRNA encoding the CasX are incorporated into single LNP particles. In other embodiments, the present disclosure provides LNP in which the gRNA and mRNA encoding the engineered CasX protein are incorporated into separate populations of LNPs, which can be formulated together in varying ratios for administration. In some embodiments, the mRNA for incorporation into the LNP comprises a sequence of SEQ ID NOS: 19830-19837. In some embodiments, the gRNA for use in the LNP comprises a scaffold sequence of SEQ ID NOS: 464-541, and the scaffold of SEQ ID NOS: 19703-19732, with a linked targeting sequence of the disclosure. In some embodiments, the gRNA for use in the LNP comprises a sequence of SEQ ID NOS: 19704-19712:19714-19722; or 19724-19732 with a linked targeting sequence of the disclosure. In some embodiments, the gRNA for use in the LNP are chemically-modified. In some embodiments, a chemically-modified gRNA for use in the LNP comprises a sequence selected from the group consisting of SEQ ID NOS: 19855-19862.

[0265] The lipid nanoparticles and lipid nanoparticle compositions of certain embodiments of the disclosure may be used to modify expression of a desired protein both in vitro and in vivo by contacting cells with a lipid nanoparticle comprising one or more ionizable lipids described herein, wherein the lipid nanoparticle encapsulates or is associated with a nucleic acid that is expressed to produce the desired protein (e.g., a messenger RNA encoding the CasX protein). In some embodiments, the lipid nanoparticles and compositions may be used to modify the expression of a target gene both in vitro and in vivo by contacting cells with a lipid nanoparticle comprising one or more novel cationic lipids described herein, wherein the lipid nanoparticle encapsulates or is associated with one or more nucleic acids of the CasX:gRNA systems of the disclosure that modify the targeted gene. The lipid nanoparticles and compositions of embodiments of the disclosure may also be used for co-delivery of different nucleic acids (e.g., mRNA and plasmid DNA) separately or in combination, such as may be useful to provide an effect requiring colocalization of different nucleic acids (e.g., mRNA encoding for a suitable gene modifying factor or enzyme and gRNA for targeting of the gene).

[0266] In some embodiments, LNPs and LNP compositions described herein include at least one cationic lipid, at least one conjugated lipid, at least one steroid or derivative thereof, at least one additional lipid, or any combination thereof. Alternatively, the lipid compositions of the disclosure can include an ionizable lipid, such as an ionizable cationic lipid, a helper lipid (usually a phospholipid), cholesterol, and a polyethylene glycol-lipid conjugate (PEG-lipid) to improve the colloidal stability in biological environments by, for example, reducing a specific absorption of plasma proteins and forming a hydration layer over the nanoparticles. Such lipid compositions can be formulated at typical mole ratios of 50:10:37-39:1.5-2.5 or 20-50:8-65:25-40:1-2.5, with variations made to adjust individual properties.

[0267] The LNPs and LNP compositions of the present disclosure are configured to protect and deliver an encapsulated payload of the systems of the disclosure to tissues and cells, both in vitro and in vivo. Various embodiments of the LNPs and LNP compositions of the present disclosure are described in further detail herein.

### Cationic Lipid

[0268] In some aspects, the LNPs and LNP compositions of the present disclosure include at least one cationic lipid. The term “cationic lipid,” refers to a lipid species that has a net positive charge. In some embodiments, the cationic lipid is an ionizable cationic lipid that has a net positive charge at a selected pH, such as physiological pH. In some embodiments, the ionizable cationic lipid has a pKa less than 7 such that the LNPs and LNP compositions achieve efficient encapsulation of the payload at a relatively low pH. In some embodiments, the cationic lipid has a pKa of 5 to 8, 5.5 to 7.5, 6 to 7, or 6.5 to 7. In some embodiments, the cationic lipid may be protonated at a pH below the pKa of the cationic lipid, and it may be substantially neutral at a pH over the pKa. The LNPs and LNP compositions may be safely delivered to a target organ (for example, the liver, lung, heart, spleen, as well as to tumors) and/or cell (hepatocyte, LSEC, cardiac cell, cancer cell, etc.) in vivo, and after endocytosis, exhibit a positive charge to release the encapsulated payload through electrostatic interaction with an anionic protein of the endosome membrane.

[0269] Early formulations of LNP utilizing permanently cationic lipids resulted in LNPs with positive surface charge that proved toxic in vivo, plus were rapidly cleared by phagocytic cells. By changing to ionizable cationic lipids bearing tertiary amines, especially those with pKa <7, results in LNP achieving efficient encapsulation of nucleic acid polymers at low pH by interacting electrostatically with the negative charges of the phosphate backbone of mRNA, that also result in largely neutral systems at physiological pH values, thus alleviating problems associated with permanently-charged cationic lipids.

[0270] As used herein, “ionizable lipid” means an amine-containing lipid which can be easily protonated, and, for example, it may be a lipid of which charge state changes depending on the surrounding pH. The ionizable lipid may be protonated (positively charged) at a pH below the pKa of a cationic lipid, and it may be substantially neutral at a pH over the pKa. In one example, the LNP may comprise a protonated ionizable lipid and/or an ionizable lipid showing neutrality. In some embodiments, the LNP has a pKa of 5 to 8, 5.5 to 7.5, 6 to 7, or 6.5 to 7. The pKa of the LNP is important for in vivo stability and release of the nucleic acid payload of the LNP in the target cell or organ. In some embodiments, the LNP having the foregoing pKa ranges may be safely delivered to a target organ (for example, the liver, lung, heart, spleen, as well as to tumors) and/or target cell (hepatocyte, LSEC, cardiac cell, cancer cell, etc.) in vivo, and after endocytosis, exhibit a positive charge to release the encapsulated payload through electrostatic interaction with an anionic protein of the endosome membrane.

[0271] The ionizable lipid is an ionizable compound having characteristics similar to lipids generally, and when the pH of the formulation buffer is kept below its pKa, the ionizable lipid through electrostatic interaction with a nucleic acid (for example, an mRNA of the disclosure), may play a role of encapsulating the nucleic acid payloads within the LNP with high efficiency.

[0272] According to the type of the amine and the tail group comprised in the ionizable lipid, (i) the nucleic acid encapsulation efficiency, (ii) PDI (polydispersity index), and/or (iii) the nucleic acid delivery efficiency to tissue and/or cells constituting an organ (for example, hepatocytes or liver sinusoidal endothelial cells in the liver) of the LNP may be different. In certain embodiments, the ionizable lipid is an ionizable cationic lipid, and comprises from about 46 mol % to about 66 mol % of the total lipid present in the particle.

[0273] The LNP comprising an ionizable lipid comprising an amine may have one or more kinds of the following characteristics: (1) the ability to encapsulate a nucleic acid with high efficiency; (2) uniform size of prepared particles (or having a low PDI value); and/or (3) excellent nucleic acid delivery efficiency to organs such as liver, lung, heart, spleen, bone marrow, as well as to tumors, and/or cells constituting such organs (for example, hepatocytes, LSEC, cardiac cells, cancer cells, etc.).

[0274] In particular embodiments, the cationic lipid form plays a crucial role both in nucleic acid encapsulation through electrostatic interactions and intracellular release by disrupting endosomal membranes. The nucleic acid payloads are encapsulated within the LNP by the ionic interactions they form with the positively charged cationic lipid. Non-limiting examples of cationic lipid components utilized in the LNP of the disclosure are selected from DLin-MC3-DMA (heptatriaconta-6,9,28,31-tetraen-19-v14-(dimethylamino) butanoate), DLin-KC2-DMA (2,2-dilinoleyl-4-(2-dimethylaminoethyl)-[1,3]-dioxolane), and TNT (1,3,5-triazinane-2,4,6-trione) and TT (N1,N3,N5-tris(2-aminoethyl)benzene-1,3,5-tricarboxamide). Non-limiting examples of helper lipids utilized in the LNP of the disclosure are selected from DSPC (1,2-distearoyl-sn-glycero-3-phosphocholine), POPC (2-Oleoyl-1-palmitoyl-sn-glycero-3-phosphocholine) and DOPE (1,2-Dioleoyl-sn-glycero-3-phosphoethanolamine), 1,2-dioleoyl-sn-glycero-3-phospho-(1′-rac-glycerol) DOPG, 1,2-Dimyristoyl-sn-glycero-3-phosphoethanolamine (DMPE), 1,2-dilauroyl-sn-glycero-3-phosphocholine (DLPC), sphingolipid, and ceramide. Cholesterol and PEG-DMG ((R)-2,3-bis (octadecy loxy) propyl-1-(methoxy polyethylene glycol 2000) carbamate), PEG-DSG (1,2-Distearoyl-rac-glycero-3-methylpolyoxyethylene glycol 2000), or DSPE-PEG2k (1,2-distearoyl-sn-glycero-3-phosphoethanolamine-N-[amino (polyethylene glycol)-2000]), are components utilized in the LNP of the disclosure for the stability, circulation, and size of the LNP.

[0275] In some embodiments, the cationic lipid in the LNP of the disclosure comprises a tertiary amine. In some embodiments, the tertiary amine includes alkyl chains connected to N of the tertiary amine with ether linkages. In some embodiments, the alkyl chains comprise C12-C30 alkyl chains having 0 to 3 double bonds. In some embodiments, the alkyl chains comprise C16-C22 alkyl chains. In some embodiments, the alkyl chains comprise C18 alkyl chains. A number of cationic lipids and related analogs have been described in U.S. Patent Publication Nos. 20060083780, 20060240554, 20110117125, 20190336608, 20190381180 and 20200121809; U.S. Pat. Nos. 5,208,036; 5,264,618:5,279,833:5,283,185:5,753,613:5, 785,992:9,738,593:10,106,490; 10,166,298:10,221,127; and 11,219,634; and PCT Publication No. WO 96/10390, the disclosures of which are herein incorporated by reference in their entirety.

[0276] In some embodiments, the cationic lipid in the LNP of the disclosure may comprise, for example, one or more ionizable cationic lipids wherein the ionizable cationic lipid is a dialkyl lipid. In other embodiments, the ionizable cationic lipid is a trialkyl lipid.

[0277] In some embodiments, the cationic lipid in the LNP of the disclosure is selected from 1,2-dilinoleyloxy-N,N-dimethylaminopropane (DLinDMA), 1,2-dilinolenyloxy-N,N-dimethylaminopropane (DLenDMA), 2,2-dilinoleyl-4-(2-dimethylaminoethyl)-[1,3]-dioxolane (DLin-K-C2-DMA), 2,2-dilinoleyl-4-(3-dimethylaminopropyl)-[1,3]-dioxolane (DLin-K-C3-DMA), 2,2-dilinoleyl-4-(4-dimethylaminobutyl)-[1,3]-dioxolane (DLin-K-C4-DMA), 2,2-dilinoleyl-5-dimethylaminomethyl-[1,3]-dioxane (DLin-K6-DMA), 2,2-dilinoleyl-4-N-methylpepiazino-[1,3]-dioxolane (DLin-K-MPZ), 2,2-dilinoleyl-4-dimethylaminomethyl-[1,3]-dioxolane (DLin-K-DMA), 1,2-dilinoleylcarbamoyloxy-3-dimethylaminopropane (DLin-C-DAP), 1,2-dilinoleyoxy-3-(dimethylamino) acetoxypropane (DLin-DAC), 1,2-dilinoleyoxy-3-morpholinopropane (DLin-MA), 1,2-dilinoleoyl-3-dimethylaminopropane (DLinDAP), 1,2-dilinoleylthio-3-dimethylaminopropane (DLin-S-DMA), 1-linoleoyl-2-linoleyloxy-3-dimethylaminopropane (DLin-2-DMAP), 1,2-dilinoleyloxy-3-trimethylaminopropane chloride salt (DLin-TMA.Cl), 1,2-dilinoleoyl-3-trimethylaminopropane chloride salt (DLin-TAP.Cl), 1,2-dilinoleyloxy-3-(N-methylpiperazino) propane (DLin-MPZ), 3-(N,N-dilinoleylamino)-1,2-propanediol (DLinAP), 3-(N,N-dioleylamino)-1,2-propanedio (DOAP), 1,2-dilinoleyloxo-3-(2-N,N-dimethylamino) ethoxypropane (DLin-EG-DMA), N,N-dioleyl-N,N-dimethylammonium chloride (DODAC), 1,2-dioleyloxy-N,N-dimethylaminopropane (DODMA), 1,2-distearyloxy-N,N-dimethylaminopropane (DSDMA), N-(1-(2,3-dioleyloxy) propyl)-N,N,N-trimethylammonium chloride (DOTMA), N,N-distearyl-N,N-dimethylammonium bromide (DDAB), N-(1-(2,3-dioleoyloxy) propyl)-N,N,N-trimethylammonium chloride (DOTAP), 3-(N—(N′,N′-dimethylaminoethane)-carbamoyl) cholesterol (DC-Chol), N-(1,2-dimyristyloxyprop-3-yl)-N,N-dimethyl-N-hydroxyethyl ammonium bromide (DMRIE), 2,3-dioleyloxy-N-[2 (spermine-carboxamido)ethyl]-N,N-dimethyl-1-propanaminiumtrifluoroacetate (DOSPA), dioctadecylamidoglycyl spermine (DOGS), 3-dimethylamino-2-(cholest-5-en-3-beta-oxy butan-4-oxy)-1-(cis,cis-9,12-octadecadienoxy) propane (CLinDMA), 2-[5′-(cholest-5-en-3-beta-oxy)-3′-oxapentoxy)-3-dimethyl-1-(cis,cis-9′,1-2′-octadecadienoxy) propane (CpLinDMA), N,N-dimethyl-3,4-dioleyloxybenzyllamine (DMOBA), 1,2-N,N′-dioleylcarbamyl-3-dimethylaminopropane (DOcarbDAP), 1,2-N,N′-dilinoleylcarbamyl-3-dimethylaminopropane (DLincarbDAP), and any combination of the forgoing.

[0278] In some embodiments, the cationic lipid in the LNP of the disclosure is selected from heptatriaconta-6,9,28,31-tetraen-19-yl4-(dimethylamino) butanoate (DLin-MC3-DMA), 2,2-dilinoleyl-4-(2-dimethylaminoethyl)-[1,3]-dioxolane (DLin-KC2-DMA), (1,3,5-triazinane-2,4,6-trione) (TNT), N1,N3,N5-tris(2-aminoethyl)benzene-1,3,5-tricarboxamide (TT), and any combination of the forgoing.

[0279] In some embodiments, the N/P ratio (nitrogen from the cationic/ionizable lipid and phosphate from the nucleic acid) in the LNP of the disclosure is in the range of is about 3:1 to 7:1, or about 4:1 to 6:1, or is 3:1, or is 4:1, or is 5:1, or is 6:1, or is 7:1.

### Conjugated Lipid

[0280] In some embodiments, the LNPs and LNP compositions of the present disclosure include at least one conjugated lipid. In some embodiments, the conjugated lipid may be selected from a polyethyleneglycol (PEG)-lipid conjugate, a polyamide (ATTA)-lipid conjugate, a cationic-polymer-lipid conjugate (CPL), and any combination of the foregoing. In some cases, conjugated lipids can inhibit aggregation of the LNPs of the disclosure.

[0281] In some embodiments, the conjugated lipid of the LNP of the disclosure comprises a pegylated lipid. The terms “polyethyleneglycol (PEG)-lipid conjugate,” “pegylated lipid” “lipid-PEG conjugate”, “lipid-PEG”, “PEG-lipid”, “PEG-lipid”, or “lipid-PEG” are used interchangeably herein and refer to a lipid attached to a polyethylene glycol (PEG) polymer which is a hydrophilic polymer. The pegylated lipid contributes to the stability of the LNPs and LNP compositions and reduces aggregation of the LNPs.

[0282] As the PEG-lipid can form the surface lipid, the size of the LNP can be readily varied by varying the proportion of surface (PEG) lipid to the core (ionizable cationic) lipids. In some embodiments, the PEG-lipid of the LNP of the disclosure can be varied from ˜1 to 5 mol % to modify particle properties such as size, stability, and circulation time.

[0283] The lipid-PEG conjugate contributes to the particle stability in serum of the nanoparticle within the LNP and plays a role of preventing aggregation between nanoparticles. In addition, the lipid-PEG conjugate may protect nucleic acids, such as mRNAs encoding the CasX proteins of the disclosure, or gRNAs of the disclosure, from degrading enzymes during in vivo delivery of the nucleic acids and enhance the stability of the nucleic acids in vivo and increase the half-life of the delivered nucleic acids encapsulated in the nanoparticle. Examples of PEG-lipid conjugates include, but are not limited to, PEG-DAG conjugates, PEG-DAA conjugates, and mixtures thereof. In certain embodiments, the PEG-lipid conjugate is selected from the group consisting of a PEG-diacylglycerol (PEG-DAG) conjugate, a PEG-dialkyloxypropyl (PEG-DAA) conjugate, a PEG-phospholipid conjugate, a PEG-ceramide (PEG-Cer) conjugate, and a mixture thereof.

[0284] In some embodiments, the pegylated lipid of the LNP of the disclosure is selected from a PEG-ceramide, a PEG-diacylglycerol, a PEG-dialkyloxypropyl, a PEG-dialkoxypropylcarbamate, a PEG-phosphatidylethanoloamine, a PEG-phospholipid, a PEG-succinate diacylglycerol, and any combination of the foregoing.

[0285] In some embodiments, the pegylated lipid of the LNP of the disclosure is a PEG-dialkyloxypropyl. In some embodiments, the pegylated lipid is selected from PEG-didecy loxypropyl (C10), PEG-dilauryloxypropyl (C12), PEG-dimyristyloxypropyl (C14), PEG-dipalmityloxypropyl (C16), PEG-distearyloxypropyl (C18), and any combination of the foregoing.

[0286] In other embodiments, the lipid-PEG conjugate of the LNP of the disclosure may be PEG bound to phospholipid such as phosphatidylethanolamine (PEG-PE), PEG conjugated to ceramide (PEG-CER, ceramide-PEG conjugate, ceramide-PEG, cholesterol or PEG conjugated to derivative thereof, PEG-c-DOMG, PEG-DMG, PEG-DLPE, PEG-DMPE, PEG-DPPC, PEG-DSPE (DSPE-PEG), and a mixture thereof, and for example, may be C16-PEG2000 ceramide (N-palmitoyl-sphingosine-1-{succinyl [methoxy (polyethylene glycol) 2000]}), DMG-PEG 2000, 14:0 PEG2000 PE.

[0287] In some embodiments, the pegylated lipid of the LNP of the disclosure is selected from 1-(monomethoxy-polyethyleneglycol)-2,3-dimyristoylglycerol, 4-O-(2′,3′-di(tetradecanoyloxy) propyl-1-O-(ω-methoxy (polyethoxy)ethyl) butanedioate (PEG-S-DMG), ω-methoxy (polyethoxy)ethyl-N-(2,3-di(tetradecanoxy) propyl) carbamate, 2,3-di (tetradecanoxy) propyl-N-(ω-methoxy (polyethoxy)ethyl) carbamate, and any combination of the foregoing.

[0288] In some embodiments, the pegylated lipid of the LNP of the disclosure is selected from mPEG2000-1,2-di-O-alkyl-sn3-carbomoylglyceride (PEG-C-DOMG), 1-[8′-(1,2-dimyristoyl-3-propanoxy)-carboxamido-3′,6′-dioxaoctanyl]carbamoyl-w-methyl-poly (ethylene glycol) (2 KPEG-DMG), and any combination of the foregoing.

[0289] In some embodiments, the PEG is directly attached to the lipid of the pegylated lipid. In other embodiments, the PEG is attached to the lipid of the pegylated lipid by a linker moiety selected from an ester-free linker moiety or an ester-containing linker moiety. Non-limiting examples of the ester-free linker moiety include amido (—C(O) NH—), amino (—NR—), carbonyl (—C(O)—), carbamate (—NHC (O)O—), urea (—NHC (O) NH—), disulfide (—S—S—), ether (—O—), succinyl (—(O) CCH2CH2C(O)—), succinamidyl (—NHC (O) CH2CH2C (O) NH—), ether, disulfide and combinations thereof. For example, the linker may contain a carbamate linker moiety and an amido linker moiety. Non-limiting examples of the ester-containing linker moiety include carbonate (—OC (O)O—), succinoyl, phosphate ester (—O—(O) POH—O—), sulfonate ester, and combinations thereof.

[0290] The PEG moiety of the pegylated lipid of the LNP of the disclosure described herein may have an average molecular weight ranging from about 550 daltons to about 10,000 daltons. In certain embodiments, the PEG moiety has an average molecular weight of from about 750 daltons to about 5,000 daltons, about 1,000 daltons to about 4,000 daltons, about 1,500 daltons to about 3,000 daltons, about 750 daltons to about 3,000 daltons, or about 1750 daltons to about 2,000 daltons.

[0291] In some embodiments, the conjugated lipid (e.g., pegylated lipid) comprises from about 1 mol % to about 60 mol %, from about 2 mol % to about 50 mol %, from about 5 mol % to about 40) mol %, or from about 5 mol % to about 20 mol % of the total lipid present in the LNPs and/or LNP compositions. In certain embodiments, the conjugated lipid comprises from about 0).5 mol % to about 3 mol % of the total lipid present in the particle.

[0292] In additional embodiments, the conjugated lipid (e.g., pegylated lipid) of the LNP of the disclosure comprises at least about 1, 2, 5, 10, 15, 20, 25, 30, 35, 40, 45, 50, 55, or 60 mol %, or an intermediate range of any of the foregoing, of the total lipid present in the LNPs and/or LNP compositions.

[0293] For the lipid in the lipid-PEG conjugate of the LNP of the disclosure, any lipid capable of binding to polyethyleneglycol may be used without limitation, and the phospholipid and/or cholesterol which are other elements of the LNP may be also used. In some embodiments, the lipid in the lipid-PEG conjugate may be ceramide, dimyristoylglycerol (DMG), succinoyl-diacylglycerol (s-DAG), distearoylphosphatidylcholine (DSPC), distearoylphosphatidylethanolamine (DSPE), or cholesterol, but not limited thereto.

[0294] In the lipid-PEG conjugate of the LNP of the disclosure, the PEG may be directly conjugated to the lipid or linked to the lipid via a linker moiety. Any linker moiety suitable for binding PEG to the lipid may be used, and for example, includes an ester-free linker moiety and an ester-containing linker moiety. The ester-free linker moiety includes not only amido (—C(O) NH—), amino (—NR—), carbonyl (—C(O)—), carbamate (—NHC (O)O—), urea (—NHC (O) NH—), disulfide (—S—S—), ether (—O—), succinyl (—(O) CCH2CH2C(O)—), succinamidyl (—NHC (O) CH2CH2C (O) NH—), ether, disulfide but also combinations thereof (for example, a linker containing both a carbamate linker moiety and an amido linker moiety), but not limited thereto. The ester-containing linker moiety includes for example, carbonate (—OC (O)O—), succinoyl, phosphate ester (—O—(O) POH—O—), sulfonate ester, and combinations thereof, but not limited thereto.

### Steroids

[0295] In some embodiments, the LNPs and LNP compositions of the present disclosure include at least one steroid or derivative thereof. In some embodiments, the steroid comprises cholesterol. In some embodiments, the LNPs and LNP compositions comprise a cholesterol derivative selected from cholestanol, cholestanone, cholestenone, coprostanol, cholesteryl-2′-hydroxyethyl ether, cholesteryl-4′-hydroxybutyl ether, and any combination of the foregoing.

[0296] In some embodiments, the steroid (e.g., cholesterol) of the LNP of the disclosure comprises from about 1 mol % to about 60 mol %, from about 2 mol % to about 50 mol %, from about 5 mol % to about 40 mol %, or from about 5 mol % to about 20 mol % of the total lipid present in the LNPs and/or LNP compositions. In other embodiments, the steroid (e.g., cholesterol) of the LNP of the disclosure comprises at least about 1, 2, 5, 10, 15, 20, 25, 30, 35, 40, 45, 50, 55, or 60 mol %, or an intermediate range of any of the foregoing, of the total lipid present in the LNPs and/or LNP compositions.

### Additional Lipid

[0297] In some embodiments, the LNPs and LNP compositions of the present disclosure include at least one additional lipid. In some embodiments, the additional lipid is non-cationic lipid selected from an anionic lipid, a neutral lipid, or both. In some embodiments, the additional lipid comprises at least one phospholipid. In some embodiments, the phospholipid is selected from an anionic phospholipid, a neutral phospholipid, or both. The phospholipid of the elements of the LNPs and LNP compositions can play a role in covering and protecting a core of the LNP formed by interaction of the cationic lipid and nucleic acid in the LNP and may facilitate cell membrane permeation and endosomal escape during intracellular delivery of the nucleic acid by binding to the phospholipid bilayer of a target cell. A phospholipid which can promote fusion of the LNP to a cell may include without limitation, any of the phospholipids selected from the group described below.

[0298] In some embodiments, the LNPs and LNP compositions comprise at least one phospholipid selected from, but not limited to, dipalmitoyl-phosphatidylcholine (DPPC), distearoyl-phosphatidylcholine (DSPC), dioleoyl-phosphatidylethanolamine (DOPE), dioleoyl-phosphatidylcholine (DOPC), dioleoyl-phosphatidylglycerol (DOPG), palmitoyloleovl-phosphatidylcholine (POPC), palmitoyloleoyl-phosphatidylethanolamine (POPE), palmitoyloleyol-phosphatidylglycerol (POPG), dipalmitoyl-phosphatidylethanolamine (DPPE), dipalmitoyl-phosphatidylglycerol (DPPG), dimyristoyl-phosphatidylethanolamine (DMPE), distearoyl-phosphatidylethanolamine (DSPE), monomethyl-phosphatidylethanolamine, dimethyl-phosphatidylethanolamine, dielaidoyl-phosphatidylethanolamine (DEPE), stearoyloleovl-phosphatidylethanolamine (SOPE), egg phosphatidylcholine (EPC), phosphatidylethanolamine (PE), 1,2-dioleoyl-sn-glycero-3-phosphoethanolamine, 1-palmitoyl-2-oleoyl-sn-glycero-3-phosphocholine (POPC), 1,2-dioleoyl-sn-glycero-3-[phospho-L-serine] (DOPS), 1,2-dioleoyl-sn-glycero-3-[phospho-L-serine], and any combination of the foregoing. In one example, the LNP comprising DOPE may be effective in mRNA delivery (excellent drug delivery efficacy).

[0299] In some embodiments, the additional lipid (e.g., phospholipid) of the LNP of the disclosure comprises from about 1 mol % to about 60) mol %, from about 2 mol % to about 50) mol %, from about 5 mol % to about 40) mol %, or from about 5 mol % to about 20 mol % of the total lipid present in the LNPs and/or LNP compositions. In other embodiments, the additional lipid (e.g., phospholipid) of the LNP of the disclosure comprises at least about 1, 2, 5, 10, 15, 20, 25, 30, 35, 40, 45, 50, 55, or 60 mol %, or an intermediate range of any of the foregoing, of the total lipid present in the LNPs and/or LNP compositions.

[0300] It will be appreciated that the total lipid present in the LNPs and/or LNP compositions comprises the combination of the cationic lipid or ionizable cationic lipid, the conjugated lipid, (e.g., pegylated lipid), the steroid (e.g., cholesterol), and the additional lipid (e.g., phospholipid).

[0301] The LNPs and/or LNP compositions may be prepared by dissolving the total lipids (or a portion thereof) in an organic solvent (e.g., ethanol) followed by mixing through a micromixer with the payload (e.g., nucleic acids of the systems) dissolved in an acidic buffer (e.g., pH 4). At this pH the cationic lipid is positively charged and interacts with the negatively-charged nucleic acid polymers. The resulting nanostructures containing the nucleic acids are then converted to neutral LNPs when dialyzed against a neutral buffer which may then be followed by removal of the organic solvent (e.g., ethanol) and exchange the LNPs into physiologically relevant buffer. The LNPs and/or LNP compositions thus formed have a distinct electron-dense nanostructured core where the cationic lipids are organized into inverted micelles around the encapsulated payload, as opposed to traditional bilayer liposomal structures. In another embodiment, the LNP may form a bleb-like structure with nucleic acids in aqueous pockets along the non-electron dense lipid core.

b. Lipid Nanoparticle Properties

[0302] In some embodiments, the LNPs and/or LNP compositions comprise from about 50 mol % to about 85 mol % of the cationic lipid or ionizable cationic lipid, from about 0.5 mol % to about 10 mol % of the conjugated lipid, (e.g., pegylated lipid), from about 0.5 mol % to about 10 mol % of the steroid (e.g., cholesterol) and from about 5 mol % to about 50 mol % of the additional lipid (e.g., phospholipid). In some embodiments, the LNPs and/or LNP compositions comprise from about 50 mol % to about 85 mol % of the cationic lipid or ionizable cationic lipid, from about 0.5 mol % to about 5 mol % of the conjugated lipid, (e.g., pegylated lipid), from about 0.5 mol % to about 5 mol % of the steroid (e.g., cholesterol) and from about 5 mol % to about 20 mol % of the additional lipid (e.g., phospholipid).

[0303] In some embodiments, the LNPs and/or LNP compositions of the disclosure comprise cationic lipid; additional lipid (e.g., phospholipid):steroid (e.g., cholesterol):conjugated lipid, (e.g., pegylated lipid) at a molar ratio of 20 to 50:10 to 30:30 to 60:0.5 to 5, at a molar ratio of 25 to 45:10 to 25:40 to 50:0.5 to 3, at a molar ratio of 25 to 45:10 to 20:40 to 55:0.5 to 3, or at a molar ratio of 25 to 45:10 to 20:40 to 55:1.0 to 1.5.

[0304] In some embodiments, the LNPs and/or LNP compositions of the disclosure have a total lipid: payload ratio (mass/mass) of from about 1 to about 100. In some embodiments, the total lipid: payload ratio is about 1 to about 50, from about 2 to about 25, from about 3 to about 20, from about 4 to about 15, or from about 5 to about 10. In some embodiments, the total lipid: payload ratio is about 5 to about 15, e.g., about 5, 6, 7, 8, 9, 10, 11, 12, 13, 14, 15, or an intermediate range of any of the foregoing.

[0305] In certain embodiments, the LNPs of the disclosure comprise a total lipid:nucleic acid mass ratio of from about 5:1 to about 15:1. In some embodiments, the weight ratio of the cationic lipid and nucleic acid comprised in the LNP may be 1 to 20:1, 1 to 15:1, 1 to 10:1, 5 to 20:1, 5 to 15:1, 5 to 10:1, 7.5 to 20:1, 7.5 to 15:1, or 7.5 to 10:1.

[0306] In some embodiments, the LNP of the disclosure may comprise the cationic lipid of 20 to 50 parts by weight, the phospholipid of 10 to 30 parts by weight, cholesterol of 20 to 60 parts by weight (or 20 to 60 parts by weight), and lipid-PEG conjugate of 0.1 to 10 parts by weight (or 0.25 to 10 parts by weight, 0.5 to 5 parts by weight). Alternatively, the LNP may comprise the cationic lipid of 20 to 50% by weight, phospholipid of 10 to 30% by weight, cholesterol of 20 to 60% by weight (or 30 to 60% by weight), and lipid-PEG conjugate of 0.1 to 10% by weight (or 0.25 to 10% by weight, 0.5 to 5% by weight) based on the total nanoparticle weight. As a further alternative, the LNP may comprise the cationic lipid of 25 to 50% by weight, phospholipid of 10 to 20% by weight, cholesterol of 35 to 55% by weight, and lipid-PEG conjugate of 0.1 to 10% by weight (or 0.25 to 10% by weight, 0.5 to 5% by weight), based on the total nanoparticle weight.

[0307] In some embodiments, the LNPs of the present disclosure have a mean diameter of from about 20 to 200 nm, 20 to 180 nm, 20 to 170 nm, 20 to 150 nm, 20 to 120 nm, 20 to 100 nm, 20 to 90 nm, 30 to 200 nm, 30 to 180 nm, 30 to 170 nm, 30 to 150 nm, 30 to 120 nm, 30 to 100 nm, 30 to 90 nm, 40 to 200 nm, 40 to 180 nm, 40 to 170 nm, 40 to 150 nm, 40 to 120 nm, 40 to 100 nm, 40 to 90 nm, 40 to 80 nm, 40 to 70 nm, 50 to 200 nm, 50 to 180 nm, 50 to 170 nm, 50 to 150 nm, 50 to 120 nm, 50 to 100 nm, 50 to 90 nm, 60 to 200 nm, 60 to 180 nm, 60 to 170 nm, 60 to 150 nm, 60 to 120 nm, 60 to 100 nm, 60 to 90 nm, 70 to 200 nm, 70 to 180 nm, 70 to 170 nm, 70 to 150 nm, 70 to 120 nm, 70 to 100 nm, 70 to 90 nm, 80 to 200 nm, 80 to 180 nm, 80 to 170 nm, 80 to 150 nm, 80 to 120 nm, 80 to 100 nm, 80 to 90 nm, 90 to 200 nm, 90 to 180 nm, 90 to 170 nm, 90 to 150 nm, 90 to 120 nm, or 90 to 100 nm, or an intermediate range of any of the foregoing.

[0308] In some embodiments, the LNPs and/or LNP compositions of the disclosure have a positive charge at acidic pH and may encapsulate the payload (e.g., therapeutic agent) through electrostatic charges produced by negative charges of the payload (e.g., therapeutic agent). The term “encapsulation,” refers to the mixture of lipids surrounding and embedding the payload (e.g., therapeutic agent) at physiological conditions, forming the LNPs. The term “encapsulation efficiency,” as used herein is the amount of payload (e.g., therapeutic agent) encapsulated by the LNPs divided by the total amount of payload (e.g., therapeutic agent) used to load the payload (e.g., therapeutic agent) into the LNPs. The encapsulation efficiency of the LNPs and/or LNP compositions may be 70% or more, 75% or more, 80% or more, 85% or more, 90% or more, 91% or more, 92% or more, 94% or more, or 95% or more. In other embodiments, the encapsulation efficiency of the LNPs and/or LNP compositions is about 80% to 99%, about 85% to 98%, about 88% to 95%, about 90% to 95%, or the payload (e.g., nucleic acids of the systems) may be fully encapsulated within the lipid portion of the LNPs compositions, and thereby protected from enzymatic degradation. In some embodiments, the payload (e.g., therapeutic agent) is not substantially degraded after exposure of the LNPs and/or LNP compositions to a nuclease at 37° C. for at least about 20, 30, 45, or 60 minutes or at least about 2, 3, 4, 5, 6, 7, 8, 9, 10, 12, 14, 16, 18, 20, 22, 24, 26, 28, 30, 32, 34, or 36 hours. In some embodiments, the payload (e.g., nucleic acids of the systems) is complexed with the lipid portion of the LNPs and/or LNP compositions. The LNPs and/or LNP compositions of the present disclosure are non-toxic to mammals such as humans.

[0309] The term “fully encapsulated” indicates that the payload (e.g., the nucleic acids of the system) in the LNPs and/or LNP compositions is not significantly degraded after exposure to conditions that significantly degrade free DNA, RNA, or protein. In a fully encapsulated system, less than about 25%, more preferably less than about 10%, and most preferably less than about 5% of the payload (e.g., nucleic acids of the system) in the LNPs and/or LNP compositions is degraded by conditions that would degrade 100% of a non-encapsulated payload. “Fully encapsulated” also indicates that the LNPs and/or LNP compositions are serum-stable, and do not decompose into their component parts upon in vivo administration.

[0310] In some embodiments, the amount of the LNPs and/or LNP compositions having the payload (e.g., therapeutic agent), encapsulated therein is from about 30% to about 100%, from about 40% to about 100%, from about 50% to about 100%, from about 60% to about 100%, from about 70% to about 100%, from about 80% to about 100%, from about 90% to about 100%, from about 30% to about 95%, from about 40% to about 95%, from about 50% to about 95%, from about 60% to about 95%, %, from about 70% to about 95%, from about 80% to about 95%, from about 85% to about 95%, from about 90% to about 95%, from about 30% to about 90%, from about 40% to about 90%, from about 50% to about 90%, from about 60% to about 90%, from about 70% to about 90%, from about 80% to about 90%, or at least about 30%, 35%, 40%, 45%, 50%, 55%, 60%, 65%, 70%, 75%, 80%, 85%, 90%, 91%, 92%, 93%, 94%, 95%, 96%, 97%, 98%, 99%, or an intermediate range of any of the foregoing.

[0311] In some embodiments, the amount of the payload (e.g., the nucleic acids), encapsulated within the LNPs and/or LNP compositions is from about 30% to about 100%, from about 40% to about 100%, from about 50% to about 100%, from about 60% to about 100%, from about 70% to about 100%, from about 80% to about 100%, from about 90% to about 100%, from about 30% to about 95%, from about 40% to about 95%, from about 50% to about 95%, from about 60% to about 95%, %, from about 70% to about 95%, from about 80% to about 95%, from about 85% to about 95%, from about 90% to about 95%, from about 30% to about 90%, from about 40% to about 90%, from about 50% to about 90%, from about 60% to about 90%, from about 70% to about 90%, from about 80% to about 90%, or at least about 30%, 35%, 40%, 45%, 50%, 55%, 60%, 65%, 70%, 75%, 80%, 85%, 90%, 91%, 92%, 93%, 94%, 95%, 96%, 97%, 98%, 99%, or an intermediate range of any of the foregoing.

[0312] In some embodiments, the nucleic acids of the disclosure, such as the mRNA encoding the CasX fusion protein, and/or the gRNA, may be provided in a solution to be mixed with a lipid solution such that the nucleic acids may be encapsulated in the lipid nanoparticles. A suitable nucleic acid solution may be any aqueous solution containing the nucleic acid to be encapsulated at various concentrations. For example, a suitable nucleic acid solution may contain the nucleic acid (or nucleic acids) at a concentration of or greater than about 0.01 mg/ml, 0.05 mg/ml, 0.06 mg/ml, 0.07 mg/ml, 0.08 mg/ml, 0.09 mg/ml, 0.1 mg/ml, 0.15 mg/ml, 0.2 mg/ml, 0.3 mg/ml, 0.4 mg/ml, 0.5 mg/ml, 0.6 mg/ml, 0.7 mg/ml, 0.8 mg/ml, 0.9 mg/ml, 1.0 mg/ml, 1.25 mg/ml, 1.5 mg/ml, 1.75 mg/ml, or 2.0 mg/ml. In some embodiments, the nucleic acid comprises an mRNA encoding an CasX, and a suitable mRNA solution may contain the mRNA at a concentration ranging from about 0.01-2.0 mg/ml, 0.01-1.5 mg/ml, 0.01-1.25 mg/ml, 0.01-1.0 mg/ml, 0.01-0.9 mg/ml, 0.01-0.8 mg/ml, 0.01-0.7 mg/ml, 0.01-0.6 mg/ml, 0.01-0.5 mg/ml, 0.01-0.4 mg/ml, 0.01-0.3 mg/ml, 0.01-0.2 mg/ml, 0.01-0.1 mg/ml, 0.05-1.0 mg/ml, 0.05-0.9 mg/ml, 0.05-0.8 mg/ml, 0.05-0.7 mg/ml, 0.05-0.6 mg/ml, 0.05-0.5 mg/ml, 0.05-0.4 mg/ml, 0.05-0.3 mg/ml, 0.05-0.2 mg/ml, 0.05-0.1 mg/ml, 0.1-1.0 mg/ml, 0.2-0.9 mg/ml, 0.3-0.8 mg/ml, 0.4-0.7 mg/ml, or 0.5-0.6 mg/ml. In some embodiments, a suitable mRNA solution may contain an mRNA at a concentration up to about 5.0 mg/ml, 4.0 mg/ml, 3.0 mg/ml, 2.0 mg/ml, 1.0 mg/ml, 0.9 mg/ml, 0.8 mg/ml, 0.7 mg/ml, 0.6 mg/ml, 0.5 mg/ml, 0.4 mg/ml, 0.3 mg/ml, 0.2 mg/ml, 0.1 mg/ml, 0.05 mg/ml, 0.04 mg/ml, 0.03 mg/ml, 0.02 mg/ml, 0.01 mg/ml, or 0.05 mg/ml. In some embodiments, a suitable gRNA solution may contain an gRNA at a concentration up to about 5.0 mg/ml, 4.0 mg/ml, 3.0 mg/ml, 2.0 mg/ml, 1.0 mg/ml, 0.9 mg/ml, 0.8 mg/ml, 0.7 mg/ml, 0.6 mg/ml, 0.5 mg/ml, 0.4 mg/ml, 0).3 mg/ml, 0.2 mg/ml, 0.1 mg/ml, 0.05 mg/ml, 0.04 mg/ml, 0.03 mg/ml, 0.02 mg/ml, 0.01 mg/ml, or 0.05 mg/ml.

[0313] In some embodiments, the LNP may have an average diameter of 20 nm to 200 nm, 20 to 180 nm, 20 nm to 170 nm, 20 nm to 150 nm, 20 nm to 120 nm, 20 nm to 100 nm, 20 nm to 90 nm, 30 nm to 200 nm, 30 to 180 nm, 30 nm to 170 nm, 30 nm to 150 nm, 30 nm to 120 nm, 30 nm to 100 nm, 30 nm to 90 nm, 40 nm to 200 nm, 40 to 180 nm, 40 nm to 170 nm, 40 nm to 150 nm, 40 nm to 120 nm, 40 nm to 100 nm, 40 nm to 90 nm, 40 nm to 80 nm, 40 nm to 70 nm, 50 nm to 200 nm, 50 to 180 nm, 50 nm to 170 nm, 50 nm to 150 nm, 50 nm to 120 nm, 50 nm to 100 nm, 50 nm to 90 nm, 60 nm to 200 nm, 60 to 180 nm, 60 nm to 170 nm, 60 nm to 150 nm, 60 nm to 120 nm, 60 nm to 100 nm, 60 nm to 90 nm, 70 nm to 200 nm, 70 to 180 nm, 70 nm to 170 nm, 70 nm to 150 nm, 70 nm to 120 nm, 70 nm to 100 nm, 70 nm to 90 nm, 80 nm to 200 nm, 80 to 180 nm, 80 nm to 170 nm, 80 nm to 150 nm, 80 nm to 120 nm, 80 nm to 100 nm, 80 nm to 90 nm, 90 nm to 200 nm, 90 to 180 nm, 90 nm to 170 nm, 90 nm to 150 nm, 90 nm to 120 nm, or 90 nm to 100 nm for easy introduction into liver tissue, hepatocytes and/or LSEC (liver sinusoidal endothelial cells). The LNP may be sized for easy introduction into organs or tissues, including but not limited to liver, lung, heart, spleen, as well as to tumors. When the size of the LNP is smaller than the above range, it can be difficult to maintain stability as the surface area of the LNP is excessively increased, and thus delivery to the target tissue and/or drug effect may be reduced. The LNP may specifically target liver tissue. Without wishing to be bound by theory, it is thought that one mechanism by which LNP may be used to deliver therapeutic agents is through the imitation of the metabolic behaviors of natural lipoproteins, and so LNP may be usefully delivered to a subject through the lipid metabolism processes carried out by the liver. During the delivery of therapeutic agents to hepatocytes or and/or LSEC (liver sinusoidal endothelial cells), the diameter of the fenestrae leading from the sinusoidal lumen to the hepatocytes and LSEC is about 140 nm in mammals and about 100 nm in humans, so the LNP composition for therapeutic agent delivery having LNPs with a diameter in the above ranges may have excellent delivery efficiency to hepatocytes and LSEC when compared to LNP having the diameter outside the above range.

[0314] According to one example, the LNPs of the LNP composition may comprise the cationic lipid: phospholipid: cholesterol: lipid-PEG conjugate in the range described above or at a molar ratio of 20 to 50:10 to 30:30 to 60:0.5 to 5, at a molar ratio of 25 to 45:10 to 25:40 to 50:0.5 to 3, at a molar ratio of 25 to 45:10 to 20:40 to 55:0.5 to 3, or at a molar ratio of 25 to 45:10 to 20:40 to 55:1.0 to 1.5. The LNP comprising components at a molar ratio in the above range may have excellent delivery efficiency of therapeutic agents specific to cells of target organs.

[0315] In certain aspects, the LNP exhibit a positive charge under the acidic pH condition by showing a pKa of 5 to 8, 5.5 to 7.5, 6 to 7, or 6.5 to 7, and may encapsulate a nucleic acid with high efficiency by easily forming a complex with a nucleic acid through electrostatic interaction with a therapeutic agent such as a nucleic acid showing a negative charge. In such cases, the LNP may be usefully used as a composition for intracellular or in vivo delivery of a therapeutic agent (for example, nucleic acid).

[0316] Herein, “encapsulate” or “encapsulation” refers to incorporation of a therapeutic agent efficient delivery, i.e., by surrounding it by the particle surface and/or embedding it within the particle interior. The encapsulation efficiency means the content of the therapeutic agent encapsulated in the LNP relative the total therapeutic agent content used for preparation of the LNP.

[0317] The encapsulation of the nucleic acids of the composition in the LNP may be 70% or more, 75% or more, 80% or more, 85% or more, 90% or more, 91% or more, 92% or more, 94% or more, or 95% or more of LNP in the composition encapsulate nucleic acids. In some embodiments, the encapsulation of the nucleic acids of the composition in the LNP is such that between 80% to 99%, between 80% to 97%, between 80% to 95%, between 85% to 95%, between 87% to 95%, between 90% to 95%, between 91% or more to 95% or less, 91% or more to 94% or less, over 91% to 95% or less, 92% to 99%, between 92% to 97%, or between 92% to 95% of the LNP in the composition encapsulate nucleic acids. In some embodiments, the mRNA encoding the CasX and a gRNA of any of the embodiments of the disclosure are fully encapsulated in the LNP.

[0318] The target organs to which a nucleic acid is delivered by the LNP include, but are not limited to the liver, lung, heart, spleen, as well as to tumors. The LNP according to one example is liver tissue-specific and has excellent biocompatibility and can deliver the nucleic acids of a composition with high efficiency, and thus it can be usefully used in related technical fields such as lipid nanoparticle-mediated gene therapy. In a particular embodiment, the target cell to which the nucleic acids are delivered by the LNP according to one example may be a hepatocyte and/or LSEC in vivo. In other embodiments, the disclosure provides LNP formulated for delivery of the nucleic acids of the embodiments to cells ex vivo.

[0319] The disclosure provides a pharmaceutical composition comprising a plurality of LNPs comprising nucleic acids, such as mRNA encoding an engineered CasX protein and/or a gRNA variant described herein, and a pharmaceutically acceptable carrier.

[0320] In certain embodiments, the LNP comprising the nucleic acid(s) has an electron dense core.

[0321] The disclosure provides LNP comprising one or more nucleic acids comprising: (a) an mRNA encoding the CasX, and/or a gRNA variant described herein; (b) one or more cationic lipids or ionizable cationic lipids or salts thereof comprising from about 50 mol % to about 85 mol % of the total lipid present in the LNP; (c) one or more non-cationic lipids comprising from about 13 mol % to about 49.5 mol % of the total lipid present in the LNP; and (d) one or more conjugated lipids that inhibit aggregation of LNPs comprising from about 0).5 mol % to about 2 mol % of the total lipid present in the particle. In another embodiment, the disclosure provides LNP comprising one or more nucleic acids comprising: (a) an mRNA encoding the engineered CasX protein, and/or a gRNA variant described herein; (b) one or more cationic lipids or ionizable cationic lipids or salts thereof comprising from about 22 mol % to about 85 mol % of the total lipid present in the LNP; (c) one or more non-cationic/phospholipids comprising from about 10 mol % to about 70 mol % of the total lipid present in the LNP; (d) 15 mol % to about 50 mol % sterol, and (d) 1 mol % to about 5 mol % lipid-PEG or lipid-PEG-peptide in the particle. In certain embodiments the CasX mRNA and gRNA may be present in the same nucleic acid-lipid particle, or they may be present in different nucleic acid-lipid particles.

[0322] The disclosure provides LNP comprising one or more nucleic acids comprising: (a) an mRNA encoding the engineered CasX protein described herein; (b) a cationic lipid or a salt thereof comprising from about 52 mol % to about 62 mol % of the total lipid present in the LNP; (c) a mixture of a phospholipid and cholesterol or a derivative thereof comprising from about 36 mol % to about 47 mol % of the total lipid present in the LNP; and (d) a PEG-lipid conjugate comprising from about 1 mol % to about 2 mol % of the total lipid present in the LNP. In particular embodiments, the formulation is a four-component system comprising about 1.4 mol % PEG-lipid conjugate (e.g., PEG2000-C-DMA), about 57.1 mol % cationic lipid (e.g., DLin-K-C2-DMA) or a salt thereof, about 7.1 mol % DPPC (or DSPC), and about 34.3 mol % cholesterol (or derivative thereof).

[0323] In other embodiments, the LNP comprising one or more nucleic acids comprises: (a) an mRNA encoding the engineered CasX protein and/or a gRNA of any of the embodiments described herein; (b) a cationic lipid or a salt thereof comprising from about 46.5 mol % to about 66.5 mol % of the total lipid present in the LNP; (c) cholesterol or a derivative thereof comprising from about 31.5 mol % to about 42.5 mol % of the total lipid present in the LNP; and (d) a PEG-lipid conjugate comprising from about 1 mol % to about 2 mol % of the total lipid present in the LNP. In particular embodiments, the formulation is a three-component system which is phospholipid-free and comprises about 1.5 mol % PEG-lipid conjugate (e.g., PEG2000-C-DMA), about 61.5 mol % cationic lipid (e.g., DLin-K-C2-DMA) or a salt thereof, and about 36.9 mol % cholesterol (or derivative thereof).

[0324] Additional formulations are described in PCT Publication No. WO 09/127060 and US patent publication numbers US 2011/0071208 A1 and US 2011/0076335 A1, the disclosures of which are herein incorporated by reference in their entirety.

[0325] In other embodiments, the LNP comprising one or more nucleic acids comprises: (a) an mRNA encoding the engineered CasX protein and/or a gRNA of any of the embodiments described herein; (b) one or more cationic lipid or ionizable cationic lipids or salts thereof comprising from about 2 mol % to about 50 mol % of the total lipid present in the LNP; (c) one or more non-cationic lipid or ionizable cationic lipids comprising from about 5 mol % to about 90 mol % of the total lipid present in the LNP; and (d) one or more conjugated lipids that inhibit aggregation of particles comprising from about 0.5 mol % to about 20 mol % of the total lipid present in the LNP.

[0326] In other embodiments, the LNP comprising one or more nucleic acids comprises: (a) an mRNA encoding the engineered CasX protein and a gRNA of any of the embodiments described herein; (b) a cationic lipid or a salt thereof comprising from about 30 mol % to about 50 mol % of the total lipid present in the LNP; (c) a mixture of a phospholipid and cholesterol or a derivative thereof comprising from about 47 mol % to about 69 mol % of the total lipid present in the LNP; and (d) a PEG-lipid conjugate comprising from about 1 mol % to about 3 mol % of the total lipid present in the LNP. In particular embodiments, the formulation is a four-component system which comprises about 2 mol % PEG-lipid conjugate (e.g., PEG2000-C-DMA), about 40 mol % cationic lipid (e.g., DLin-K-C2-DMA) or a salt thereof, about 10 mol % DPPC (or DSPC), and about 48 mol % cholesterol (or derivative thereof).

[0327] In other embodiments, the LNP comprising one or more nucleic acids comprises: (a) an mRNA encoding the engineered CasX protein and a gRNA of any of the embodiments described herein; (b) one or more cationic lipid or ionizable cationic lipids or salts thereof comprising from about 50 mol % to about 65 mol % of the total lipid present in the LNP; (c) one or more non-cationic lipid or ionizable cationic lipids comprising from about 25 mol % to about 45 mol % of the total lipid present in the LNP; and (d) one or more conjugated lipids that inhibit aggregation of particles comprising from about 5 mol % to about 10 mol % of the total lipid present in the LNP.

[0328] In other embodiments, the LNP comprising one or more nucleic acids comprises: (a) an mRNA encoding the engineered CasX protein and a gRNA of any of the embodiments described herein; (b) a cationic lipid or a salt thereof comprising from about 50 mol % to about 60 mol % of the total lipid present in the LNP; (c) a mixture of a phospholipid and cholesterol or a derivative thereof comprising from about 35 mol % to about 45 mol % of the total lipid present in the LNP; and (d) a PEG-lipid conjugate comprising from about 5 mol % to about 10 mol % of the total lipid present in the LNP.

[0329] In certain embodiments, the non-cationic lipid mixture in the formulation comprises: (i) a phospholipid of from about 10 mol % to about 70 mol % of the total lipid present in the LNP; (ii) cholesterol or a derivative thereof of from about 15 mol % to about 50 mol % of the total lipid present in the LNP; and 1-5% lipid-PEG or lipid-PEG-peptide. In particular embodiments, the formulation is a four-component system which comprises about 7 mol % PEG-lipid conjugate (e.g., PEG750-C-DMA), about 54 mol % cationic lipid (e.g., DLin-K-C2-DMA) or a salt thereof, about 7 mol % DPPC (or DSPC), and about 32 mol % cholesterol (or derivative thereof).

[0330] In other embodiments, the LNP comprising one or more nucleic acids comprises: (a) an mRNA encoding the engineered CasX protein and/or a gRNA of any of the embodiments described herein; (b) a cationic lipid or a salt thereof comprising from about 55 mol % to about 65 mol % of the total lipid present in the LNP; (c) cholesterol or a derivative thereof comprising from about 30 mol % to about 40 mol % of the total lipid present in the LNP; and (d) a PEG-lipid conjugate comprising from about 5 mol % to about 10 mol % of the total lipid present in the LNP. In particular embodiments, the formulation is a three-component system which is phospholipid-free and comprises about 7 mol % PEG-lipid conjugate (e.g., PEG750)—C-DMA), about 58 mol % cationic lipid (e.g., DLin-K-C2-DMA) or a salt thereof, and about 35 mol % cholesterol (or derivative thereof).

[0331] In other embodiments, the LNP comprising one or more nucleic acids comprises: (a) an mRNA encoding the engineered CasX protein and/or a gRNA of any of the embodiments described herein; (b) a cationic lipid or a salt thereof comprising from about 48 mol % to about 62 mol % of the total lipid present in the LNP; (c) a mixture of a phospholipid and cholesterol or a derivative thereof, wherein the phospholipid comprises about 7 mol % to about 17 mol % of the total lipid present in the LNP, and wherein the cholesterol or derivative thereof comprises about 25 mol % to about 40 mol % of the total lipid present in the LNP; and (d) a PEG-lipid conjugate comprising from about 0.5 mol % to about 3.0 mol % of the total lipid present in the LNP.

[0332] In some embodiments, the CasX:gRNA systems provided herein for a method of modification of an LPA target nucleic acid in a population of cells comprise a sequence encoding a an engineered CasX protein comprising SEQ ID NOS: 19834-19837, or a variant sequence at least 70% identical, at least 80% identical, at least 81% identical, at least 82% identical, at least 83% identical, at least 84% identical, at least 85% identical, at least 86% identical, at least 86% identical, at least 87% identical, at least 88% identical, at least 89% identical, at least 89% identical, at least 90% identical, at least 91% identical, at least 92% identical, at least 93% identical, at least 94% identical, at least 95% identical, at least 96% identical, at least 97% identical, at least 98% identical, at least 99% identical, or at least 99.5% identical thereto, the gRNA scaffold comprises SEQ ID NOS: 464-541 or a sequence at least 70% identical, at least 75% identical, at least 80% identical, at least 81% identical, at least 82% identical, at least 83% identical, at least 84% identical, at least 85% identical, at least 86% identical, at least 86% identical, at least 87% identical, at least 88% identical, at least 89% identical, at least 89% identical, at least 90% identical, at least 91% identical, at least 92% identical, at least 93% identical, at least 94% identical, at least 95% identical, at least 96% identical, at least 97% identical, at least 98% identical, at least 99% identical, at least 99.5% identical thereto, and the gRNA comprises a targeting sequence complementary to an LPA target nucleic acid. In a particular embodiment, wherein the systems are formulated in LNP, the CasX is encoded by an mRNA sequence selected from the group consisting of SEQ ID NOS: 19834-19837, and the gRNA scaffold comprises a sequence of SEQ ID NOS: 464-541, and comprises a targeting sequence complementary to an LPA target nucleic acid. In some embodiments of the method, the cells to be modified are selected from the group consisting of rodent cells, mouse cells, rat cells, and non-human primate cells. In other embodiments of the method, the cells to be modified are human cells. In some embodiments of the method, the modification of the population of cells occurs in vivo in a subject, wherein the subject is selected from the group consisting of a rodent, a mouse, a rat, a non-human primate, and a human.

[0333] In some LNP-mediated delivery embodiments, the method of treating an LPA-related disease or disorder in a subject comprises pretreating the subject with a therapeutic agent that increases hepatic LDL receptor (LDLR) expression. In some embodiments, the therapeutic agent is a PCSK9 inhibitor, such as a monoclonal antibody, nucleic acid-based agent, or a small molecule. Exemplary therapeutic agents include, but are not limited to, evolocumab, inclisiran, alirocumab, and MK-0616. Without wishing to be bound by theory or mechanism, it is believed that the pretreatment with an inhibitor of PCSK9, may lead to an increase in hepatic LDL receptor (LDLR) expression that, in turn, may facilitate the uptake of an LNP comprising the CasX:gRNA composition that is subsequently administered to the subject. By increasing the hepatic cell uptake of the LNP, it is expected that editing of the LPA gene will be enhanced such that an improvement in the LPA-related disorder would be attained.

### VIII. Compositions, Pharmaceutical Compositions, Kits, and Articles of Manufacture for Medicaments

[0334] In some embodiments, the disclosure provides compositions comprising: i) an engineered CasX protein and a gRNA of any of the embodiments of the disclosure comprising a targeting sequence specific for an LPA gene; ii) one or more nucleic acids encoding the engineered CasX protein and the gRNA of (i); iii) an LNP or synthetic nanoparticle comprising a gRNA and an mRNA encoding the engineered CasX protein.

[0335] In some embodiments, the disclosure provides pharmaceutical compositions comprising: i) an engineered CasX protein and a gRNA of any of the embodiments of the disclosure comprising a targeting sequence specific for an LPA gene; ii) one or more nucleic acids encoding the engineered CasX protein and the gRNA of (i); iii) an LNP or synthetic nanoparticle comprising a gRNA and an mRNA encoding an engineered CasX protein, together with one or more pharmaceutically suitable excipients. In some embodiments, the pharmaceutical composition is formulated for a route of administration selected from the group consisting of intravenous, intraportal vein injection, intraperitoneal, intramuscular, subcutaneous, intraocular, and oral routes. In one embodiment, the pharmaceutical composition is in a liquid form or a frozen form. In another embodiment, the pharmaceutical composition is in a pre-filled syringe for a single injection. In another embodiment, the pharmaceutical composition is in solid form, for example the pharmaceutical composition is lyophilized.

[0336] Excipients can include a salt, an isotonic agent, a serum protein, a buffer or other pH-controlling agent, an anti-oxidant, a thickener, an uncharged polymer, a preservative or a cryoprotectant. Excipients used in compositions of the disclosure may further include an isotonic agent and a buffer or other pH-controlling agent. These excipients may be added for the attainment of preferred ranges of pH (about 6.0-8.0) and osmolarity (about 50-400 mmol/L). Examples of suitable buffers are acetate, borate, carbonate, citrate, phosphate and sulfonated organic molecule buffer. Such buffers may be present in a composition in concentrations from 0.01 to 1.0% (w/v). An isotonic agent may be selected from any of those known in the art, e.g. mannitol, dextrose, glucose and sodium chloride, or other electrolytes. In some embodiments the isotonic agent may be glucose or sodium chloride. The isotonic agents may be used in amounts that impart to the composition the same or a similar osmotic pressure as that of the biological environment into which it is introduced. The concentration of isotonic agent in the composition will depend upon the nature of the particular isotonic agent used and may range from about 0.1 to 10%. When glucose is used, it is preferably used in a concentration of from 1 to 5% w/v, more particularly 5% w/v. When the isotonic agent is sodium chloride, it is preferably employed in amounts of up to 1% w/v, in particular 0.9% w/v. The compositions of the invention may further contain a preservative. Examples of preservatives include polyhexamethylene-biguanidine, benzalkonium chloride, stabilized oxychloro complexes (such as those known as Purite R), phenylmercuric acetate, chlorobutanol, sorbic acid, chlorhexidine, benzyl alcohol, parabens, and thimerosal. Typically, such preservatives are present at concentrations from about 0.001 to 1.0%. Furthermore, the compositions of the invention may also contain a cryopreservative agent. Preferred cryopreservatives are glucose, sucrose, mannitol, lactose, trehalose, sorbitol, colloidal silicon dioxide, dextran of molecular weight preferable below 100,000 g/mol, glycerol, and polyethylene glycols of molecular weights below 100,000 g/mol or mixtures thereof. Most preferred are glucose, trehalose and polyethylene glycol. Typically, such cryopreservatives are present at concentrations from about 0.01 to 10%.

[0337] Typically, a pharmaceutical formulation is formulated to be compatible with its intended route of administration. For example, for oral administration, a composition can be incorporated with excipients and used in the form of tablets, troches, capsules, e.g., gelatin capsules, or coatings, e.g., enteric coatings (Eudragit® or Sureteric®). Pharmaceutically compatible binding agents, and/or adjuvant materials can be included in oral formulations. The tablets, pills, capsules, troches and the like can contain any of the following ingredients, or compounds of a similar nature: a binder such as microcrystalline cellulose, gum tragacanth or gelatin; an excipient such as starch or lactose, a disintegrating agent such as alginic acid, Primogel, or corn starch; a lubricant such as magnesium stearate or other stearates; a glidant such as colloidal silicon dioxide; a sweetening agent such as sucrose or saccharin; or a flavoring agent such as peppermint, methyl salicylate, or flavoring. Additional pharmaceutical formulations appropriate for administration are applicable in the methods and compositions disclosed herein (see. e.g., Remington's Pharmaceutical Sciences (1990) 18th ed., Mack Publishing Co., Easton, Pa.; Remington's Pharmaceutical Sciences (2023) 23rd ed., Elsevier Publishing; The Merck Index (1996) 12th ed., Merck Publishing Group, Whitehouse, N.J.; and Pharmaceutical Principles of Solid Dosage Forms, Technonic Publishing Co., Inc., Lancaster, Pa., (1993).

[0338] In other embodiments, provided herein are kits comprising an engineered CasX protein and one or a plurality of the gRNAs of any of the embodiments of the disclosure. The gRNAs comprise a targeting sequence specific for an LPA gene target nucleic acid sequence. In some embodiments, the kits comprise a suitable container (for example a tube, vial or plate). In exemplary embodiments, the engineered CasX protein comprises a sequence of any one of SEQ ID NOS: 19699-19702 or 19830-19837. In exemplary embodiments, the gRNA comprises a sequence of any one of SEQ ID NOS: 464-466, or chemically-modified versions of such gRNA, including a sequence selected from the group consisting of SEQ ID NOS: 19855-19862.

[0339] In other embodiments, provided herein are kits comprising an LNP formulation encapsulating an mRNA encoding an engineered CasX protein and one or a plurality of gRNA of any of the embodiments of the disclosure. In some embodiments, the kits comprise suitable container (for example a tube, vial or plate). In an exemplary embodiment, the kit comprises the engineered CasX protein comprising a sequence of any one of SEQ ID NOS: 19699-19702 or 19830-19837, and the gRNA comprises a scaffold of any one of SEQ ID NOS: 464-541. In some embodiments of the kit, the gRNA comprises a sequence selected from the group consisting of SEQ ID NOS: 19855-19862. In some embodiments, the kit comprises a first LNP formulation encapsulating the mRNA, and a second LNP formulation encapsulating the gRNA. In some embodiments of the kit, the mRNA and gRNA are encapsulated in a single LNP formulation.

[0340] In some embodiments, the kit comprises a gRNA or a vector encoding a gRNA, wherein the gRNA comprises a scaffold sequence selected from the group consisting of SEQ ID NOS: 464-541, and a targeting sequence complementary to an LPA gene target nucleic acid to be modified.

[0341] In certain embodiments, provided herein are kits comprising an engineered CasX protein and gRNA, the kit comprising an engineered CasX protein comprising a sequence of SEQ ID NOS: 19699-19702 or 19830-19837, and the gRNA comprising a scaffold comprising a sequence of SEQ ID NOS: 464-541 and a targeting sequence complementary to an LPA target nucleic acid to be modified. In some embodiments, the gRNA is a chemically-modified comprises a sequence selected from the group consisting of SEQ ID NOS: 19855-19862.

[0342] In some embodiments, the kit further comprises a buffer, a nuclease inhibitor, a protease inhibitor, a liposome, a therapeutic agent, a label, a label visualization reagent, or any combination of the foregoing. In some embodiments, the kit further comprises a pharmaceutically acceptable carrier, diluent or excipient.

[0343] In some embodiments, the kit comprises appropriate control compositions for gene modification applications, and instructions for use.

[0344] In some embodiments, the kit comprises a vector comprising a sequence encoding an engineered CasX protein of the disclosure and a CasX gRNA of the disclosure.

[0345] In some embodiments, the disclosure provides compositions for use in the treatment a subject having an LPA-related disease. In some embodiments, the disclosure provides compositions for use in the manufacture of a medicament for the treatment a subject having an LPA-related disease. In some embodiments, the composition comprises an engineered CasX protein of any of the embodiments disclosed herein. In some embodiments, the composition comprises a gRNA of any of the embodiments disclosed herein. In some embodiments, the composition comprises a nucleic acid encoding an engineered CasX protein of any of the embodiments disclosed herein. In some embodiments, the composition comprises an mRNA encoding an engineered CasX protein of any of the embodiments disclosed herein. In some embodiments, the composition comprises a gene editing pair of an engineered CasX protein and a gRNA. In some embodiments, the composition comprises a vector of any of the embodiments disclosed herein. In some embodiments, the composition comprises an LNP of any of the embodiments disclosed herein. In some embodiments, the composition comprises a combination of the foregoing.

### IX. Therapeutic Methods

[0346] In another aspect, the present disclosure relates to methods of treating a LPA-related disease or disorder in a subject in need thereof, using the systems of the disclosure.

[0347] The present disclosure provides methods of treating an LPA-related disorder in a subject in need thereof, including but not limited to cardiovascular disease, metabolic disease, hyperglycemia, prediabetes, diabetes (type I and type II), obesity, insulin resistance, metabolic syndrome and diabetic dyslipidemia, or inflammatory disease. In certain embodiments, the subject has Lp (a) levels ≥70 nmol/L, ≥80 nmol/L, ≥90 nmol/L, ≥100 nmol/L, ≥110 nmol/L, ≥120 nmol/L, ≥130 nmol/L, ≥140 nmol/L, ≥150 nmol/L, ≥160) nmol/L, ≥170) nmol/L, ≥175 nmol/L, ≥180 nmol/L, ≥190 nmol/L, ≥200 nmol/L. ≥250) nmol/L. ≥300) nmol/L. ≥350) nmol/L, or ≥400 nmol/L. In some embodiments of the method of treatment, the subject is selected from the group consisting of a rodent, a mouse, a rat, and a non-human primate. In other embodiments of the method of treatment, the subject is a human.

[0348] In certain embodiments, the methods of the disclosure are utilized in the treatment of cardiovascular diseases, disorders or conditions (CVD) including, but not limited to one or more of coronary artery disease, coronary heart disease (CHD), acute myocardial infarction (AMI), chronic CHD, cardiovascular events, arterial hypertension (HT), aortic stenosis (e.g., calcific aortic valve stenosis), aneurysm (e.g., abdominal aortic aneurysm), angina, arrhythmia, atherosclerosis, cerebrovascular disease, cerebrovascular stroke dyslipidemia, hypercholesterolemia, hyperlipidemia, hypertension, hypertriglyceridemia, myocardial infarction, peripheral vascular disease (e.g., peripheral artery disease), stroke, ischemia, elevated lipoprotein (a) levels, elevated apoprotein (a) levels, or combinations thereof.

[0349] In certain embodiments, the methods of the disclosure are utilized in the treatment of inflammatory diseases, disorders or conditions including, but not limited to, elevated Lp (a) associated CVD risk, recurrent cardiovascular events with elevated Lp (a), aortic stenosis (e.g., calcific aortic valve stenosis associated with high Lp (a)), coronary artery disease (CAD), Alzheimer's Disease and thromboembolic diseases such as, but not limited to, stroke, thrombosis, myocardial infarction and peripheral vascular disease.

[0350] A number of therapeutic strategies have been used to design the compositions for use in the methods of treatment of a subject with an LPA-related disease. Additionally, the methods can be used to treat a subject in advance of any symptom of disease. As described herein, the methods of treatment can prevent, treat and/or ameliorate an LPA-related disease of a subject. In some embodiments, the disclosure provides a method of treating an LPA-related disease in a subject in need thereof, comprising administering a therapeutically effective dose of i) a composition comprising an engineered CasX protein and a gRNA of any of the embodiments described herein; ii) an LNP comprising a gRNA and an mRNA encoding a CasX of any of the embodiments described herein; iii) one or more nucleic acids encoding or comprising the compositions of (i) or (ii); iv) a vector selected from the group consisting of a retroviral vector, a lentiviral vector, an adenoviral vector, an adeno-associated viral (AAV) vector, a herpes simplex virus (HSV) vector and comprising the nucleic acids of (iii); or v) combinations of two or more of (i)-(iv), wherein the LPA gene of the cells is modified by the CasX protein. In some embodiments, the disclosure provides a method of treating an LPA-related disease in a subject in need thereof, comprising administering a therapeutically effective dose of an LNP comprising a gRNA and an mRNA encoding a CasX to the subject, wherein the LPA gene of the cells is modified by the CasX protein. In some embodiments of the method of treatment, the modification comprises introducing a single-stranded break in the LPA target nucleic acid sequence. In some embodiments of the method of treatment, the modification comprises introducing a double-stranded break in the LPA target nucleic acid sequence. In some embodiments of the method of treatment, expression of the LPA gene is reduced or eliminated in the modified cells of the subject.

[0351] In some embodiments of the method of treatment, the method comprises administering to the subject one or more therapeutically effective doses of a system of the disclosure, wherein the contacting of the cells of the subject with the engineered CasX and the gRNA results in modification of the target nucleic acid of the cells by the components of the CasX:gRNA system.

[0352] In some embodiments of the method of treatment, the method comprises administering to the subject one or more therapeutically effective doses of an mRNA comprising a sequence encoding the engineered CasX of the disclosure, including the sequences of SEQ ID NOS: 4-7 as set forth in Table 1. In some embodiments of the method of treatment, the method comprises administering to the subject one or more therapeutically effective doses of an mRNA comprising a sequence selected from the group consisting of 19830-19841, or a sequence having at least about 70%, at least about 80%, at least about 90%, at least about 95%, at least about 96%, at least about 97%, at least about 98%, at least about 99% sequence identity thereto. In some embodiments of the method of treatment, the method comprises administering to the subject one or more therapeutically effective doses of an mRNA comprising a sequence selected from the group consisting of 19830-19841.

[0353] In some embodiments of the method of treatment, the method comprises administering to the subject one or more therapeutically effective doses of a gRNA embodiment of the disclosure, including the sequences of SEQ ID NOS: 464-466 of Table 13, with a linked targeting sequence complementary to a target nucleic acid of the LPA gene. In some embodiments of the method, the targeting sequence of the gRNA is selected from the group consisting of SEQ ID NOS: 749-903 and 13210-19698. In some embodiments of the method, the targeting sequence of the gRNA comprises a sequence selected from the group consisting of SEQ ID NO: 817, SEQ ID NO: 826, SEQ ID NO: 898, and SEQ ID NO: 901. In some embodiments of the method, a targeting sequence for linkage to a gRNA scaffold of the disclosure, e.g., gRNA 174, 235, or 316, or a chemically-modified version thereof, may comprise the sequence of SEQ ID NO: 901. In some embodiments of the method, the method comprises administering to the subject one or more therapeutically effective doses of a chemically modified gRNA with a targeting sequence comprising a sequence selected from the group consisting of SEQ ID NOS: 19855-19862, or a sequence having at least about 70%, at least about 80%, at least about 90%, at least about 95%, at least about 96%, at least about 97%, at least about 98%, at least about 99% sequence identity thereto. In some embodiments, the chemically-modified gRNA targeting an LPA target sequence comprises a sequence selected from the group consisting of SEQ ID NOS: 19855-19862. In some embodiments, the chemically-modified gRNA targeting an LPA target sequence comprises a sequence of SEQ ID NO: 19855. In some embodiments, the chemically-modified gRNA targeting an LPA target sequence comprises a sequence of SEQ ID NO: 19856. In some embodiments, the chemically-modified gRNA targeting an LPA target sequence comprises a sequence of SEQ ID NO: 19857. In some embodiments, the chemically-modified gRNA targeting an LPA target sequence comprises a sequence of SEQ ID NO: 19858. In some embodiments, the chemically-modified gRNA targeting an LPA target sequence comprises a sequence of SEQ ID NO: 19859. In some embodiments, the chemically-modified gRNA targeting an LPA target sequence comprises a sequence of SEQ ID NO: 19860. In some embodiments, the chemically-modified gRNA targeting an LPA target sequence comprises a sequence of SEQ ID NO: 19861. In some embodiments, the chemically-modified gRNA targeting an LPA target sequence for comprises a sequence of SEQ ID NO: 19862.

[0354] In some embodiments of the method of treatment, the method comprises administering to the subject one or more therapeutically effective doses of an mRNA comprising a sequence selected from the group consisting of 19830-19841, or a sequence having at least about 70%, at least about 80%, at least about 90%, at least about 95%, at least about 96%, at least about 97%, at least about 98%, at least about 99% sequence identity thereto and a chemically modified gRNA with a targeting sequence comprising a sequence selected from the group consisting of SEQ ID NOS: 19855-19862, or a sequence having at least about 70%, at least about 80%, at least about 90%, at least about 95%, at least about 96%, at least about 97%, at least about 98%, at least about 99% sequence identity thereto. In some embodiments of the method of treatment, the method comprises administering to the subject one or more therapeutically effective doses of an mRNA comprising a sequence selected from the group consisting of 19830-19841 and a chemically modified gRNA with a targeting sequence comprising a sequence selected from the group consisting of SEQ ID NOS: 19855-19862.

[0355] In some embodiments of the method of treatment, the method comprises administering to the subject one or more therapeutically effective doses of an LNP comprising a gRNA and an mRNA encoding the engineered CasX protein according to a treatment regimen, wherein the contacting of the cells of the subject with the LNP results in modification of the target nucleic acid of the cells by the components of the CasX:gRNA system. In the foregoing embodiment, the gRNA scaffold is selected from the group consisting of variant 174 (SEQ ID NO: 464), 235 (SEQ ID NO: 465), and 316 (SEQ ID NO: 464), or chemically modified versions thereof, the mRNA encodes an engineered CasX protein selected from the group consisting of 491 (SEQ ID NO: 4), 515 (SEQ ID NO: 5), 676 (SEQ ID NO: 6), and 812 (SEQ ID NO: 7), the targeting sequence of the gRNA is selected from the group consisting of SEQ ID NOS: 749-903 and 13210-19698. The CasX:gRNA components are encapsidated either singly or in combination in an LNP formulation of an embodiment described herein. In some embodiments, the engineered CasX is encoded by an mRNA comprising a sequence selected from the group consisting of SEQ ID NOS: 19830-19837, or a sequence having at least about 70%, at least about 80%, at least about 90%, at least about 95%, at least about 96%, at least about 97%, at least about 98%, at least about 99% sequence identity thereto. In some embodiments, the engineered CasX is encoded by an mRNA comprising a sequence selected from the group consisting of SEQ ID NOS: 19830-19837. In some embodiments, the engineered CasX is encoded by an mRNA comprising a sequence of SEQ ID NO: 19830. In some embodiments, the engineered CasX is encoded by an mRNA comprising a sequence of SEQ ID NO: 19831. In some embodiments, the engineered CasX is encoded by an mRNA comprising a sequence of SEQ ID NO: 19832. In some embodiments, the engineered CasX is encoded by an mRNA comprising a sequence of SEQ ID NO: 19833. In some embodiments, the engineered CasX is encoded by an mRNA comprising a sequence of SEQ ID NO: 19834. In some embodiments, the engineered CasX is encoded by an mRNA comprising a sequence of SEQ ID NO: 19835. In some embodiments, the engineered CasX is encoded by an mRNA comprising a sequence of SEQ ID NO: 19836. In some embodiments, the engineered CasX is encoded by an mRNA comprising a sequence of SEQ ID NO: 19837. In some embodiments, the chemically-modified gRNA targeting LPA for use in the systems of the disclosure comprises a sequence selected from the group consisting of SEQ ID NOS: 19855-19862, or a sequence having at least about 70%, at least about 80%, at least about 90%, at least about 95%, at least about 96%, at least about 97%, at least about 98%, at least about 99% sequence identity thereto. In some embodiments, the chemically-modified gRNA targeting LPA for use in the systems of the disclosure comprises a sequence selected from the group consisting of SEQ ID NOS: 19855-19862. In some embodiments, the chemically-modified gRNA comprises the sequence of SEQ ID NO: 19855. In some embodiments, the chemically-modified gRNA comprises the sequence of SEQ ID NO: 19856. In some embodiments, the chemically-modified gRNA comprises the sequence of SEQ ID NO: 19857. In some embodiments, the chemically-modified gRNA comprises the sequence of SEQ ID NO: 19858. In some embodiments, the chemically-modified gRNA comprises the sequence of SEQ ID NO: 19859. In some embodiments, the chemically-modified gRNA comprises the sequence of SEQ ID NO: 19860. In some embodiments, the chemically-modified gRNA comprises the sequence of SEQ ID NO: 19861. In some embodiments, the chemically-modified gRNA comprises the sequence of SEQ ID NO: 19862.

[0356] In some embodiments of the method of treatment, the subject is selected from the group consisting of a rodent, a mouse, a rat, and a non-human primate. In some embodiments of the method, the subject is a human. In some embodiments of the method of treatment, the cell of the subject for modification is a hepatocyte, or a cell of the intestine, the kidney, the central nervous system, a smooth muscle cell, a macrophage, a cell of the retina, or a cell of arterial walls such as the endothelium.

[0357] In some embodiments, the method of treatment of the subject results in improvements in quantifiable markers or clinically-relevant endpoints of the disease. Methods of obtaining samples from treated subjects for analysis to determine the effectiveness of the treatment, such as body fluids or tissues, and methods of preparation of the samples to allow for analysis are well known to those skilled in the art. Methods for analysis of RNA and protein levels are discussed above and are well known to those skilled in the art. For example, glucose levels or insulin resistance can be measured and quantified by standard tests known in the art. Other metabolic markers include, but are not limited to cytokine levels associated with inflammatory disease, Lp (a), triglycerides, apo (a), apo (b), very low-density lipoproteins (VLDL), VLDL-remnants, intermediate-density lipoproteins (IDL), low-density lipoproteins (LDL) or cholesterol levels. For such markers, in certain embodiments, the method of treatment results in a decrease in one or more markers by at least about 5%, at least about 10%, at least about 15%, at least about 20%, at least about 25%, at least about 30%, at least about 35%, at least about 40%, at least about 45%, at least about 50%, at least about 55%, at least about 60%, at least about 65%, at least about 70%, at least about 75%, at least about 80%, at least about 85%, at least about 90%, at least about 95%, or at least about 99%, or a range defined by any two of these values. In a particular embodiment, the method of treatment results in reduction of Lp (a) expression by at least about 15%, at least about 20%, at least about 25%, at least about 30%, at least about 35%, at least about 40%, at least about 45%, at least about 50%, at least about 55%, at least about 60%, at least about 65%, at least about 70%, at least about 75%, at least about 80%, at least about 85%, at least about 90%, at least about 95%, or at least about 99%, or a range defined by any two of these values. In certain embodiments, Lp (a) expression is reduced to at least about ≥400 nmol/L, at least about ≥3800 nmol/L, at least about ≥360 nmol/L, at least about ≥350 nmol/L, at least about ≥340 nmol/L, at least about ≥320 nmol/L, at least about ≥300 nmol/L, at least about ≥280 nmol/L, at least about ≥260 nmol/L, at least about ≥240 nmol/L, at least about ≥220) nmol/L, at least about ≥200 nmol/L, at least about ≥180 nmol/L, at least about ≥160 nmol/L, at least about ≥140 nmol/L, at least about ≥120 nmol/L, at least about ≥110 nmol/L, at least about ≥100 nmol/L, at least about ≥90 nmol/L, at least about ≥80 nmol/L, at least about ≥70 nmol/L, or at least about ≥60 nmol/L.

[0358] In some embodiments, the method of treatment results in improvement in at least one clinical endpoint selected from the group consisting of change from baseline in LDL-cholesterol, decrease in plaque atheroma volume, reduction in in coronary plaque, reduction in atherosclerotic cardiovascular disease (ASCVD), cardiovascular death, nonfatal myocardial infarction, ischemic stroke, nonfatal stroke, coronary revascularization, unstable angina, visual acuity, peripheral arterial disease, oxidized phospholipid levels, reduction in aortic valve stenosis, and reduction of thrombosis.

[0359] In some embodiments, the method of treatment results in improvement in at least two clinically-relevant endpoints selected from the group consisting of change from baseline in LDL-cholesterol, decrease in plaque atheroma volume, reduction in in coronary plaque, reduction in atherosclerotic cardiovascular disease (ASCVD), cardiovascular death, nonfatal myocardial infarction, ischemic stroke, nonfatal stroke, coronary revascularization, unstable angina, visual acuity, peripheral arterial disease, oxidized phospholipid levels, reduction in aortic valve stenosis, reduction of thrombosis.

[0360] In some embodiments, the method results in improvement in at least two clinically-relevant endpoints selected from the group consisting of change from baseline in LDL-cholesterol, decrease in plaque atheroma volume, reduction in in coronary plaque, reduction in atherosclerotic cardiovascular disease (ASCVD), cardiovascular death, nonfatal myocardial infarction, ischemic stroke, nonfatal stroke, coronary revascularization, unstable angina, visual acuity, peripheral arterial disease, oxidized phospholipid levels, reduction in aortic valve stenosis, or reduction of thrombosis.

[0361] The following Examples are merely illustrative and are not meant to limit any aspects of the present disclosure in any way.

### EXAMPLES

### Example 1: Identification of CasX Spacers Targeting the Human LPA Locus

[0362] This example describes the methods and criteria used to identify spacers for targeting the human LPA locus using CasX. Briefly, a pipeline algorithm was designed and used to determine all possible spacer sequences (also referred to herein as “targeting sequences”) with NTC PAMs throughout the human LPA locus, which were then computationally filtered to define an initial group of TTC spacers for experimental screening and assessment.

### Materials and Methods

[0363] To identify potential spacers throughout the human LPA locus, the reference transcript NM_005577.4 (Ensembl ID ENST00000316300.10) was aligned with the human reference genome build hg38 (GRCh38) to extract the full sequence of the human LPA locus. The target search region used to determine all potential spacers was defined as starting at 10 KB upstream of the transcription start site (TSS) through 5 KB downstream of the transcription stop site. Spacers were determined based on the availability of NTC PAMs; consequently, a total of 19,155 NTC spacers (RNA sequences provided in SEQ ID NO: 544-19698), which are 20 base pairs in length, were identified throughout the target LPA locus. These spacers were then functionally annotated by overlaying key genomic features based on their positioning, i.e., determining whether the putative spacer targeted an exon, an intron, or a candidate cis-regulatory element (cCRE), was proximal to the transcriptional start site (“TSS-proximal”), and/or overlapped with a common site of genetic variation (e.g., SNPs). Furthermore, a sequence conservation analysis was performed, such that each nucleotide within an edit window for each spacer sequence was evaluated and scored to determine the extent of evolutionary conservation at the individual bases across 100 model organisms (Pollard K S et al., Detection of nonneutral substitution rates on mammalian phylogenies. Genome Res. 20 (1): 110-121 (2010); Kent W J et al., The human genome browser at UCSC. Genome Res. 12 (6): 996-1006 (2002)). The edit window of a spacer was defined as the region of the target DNA that would be subjected to indel formation following CasX-gRNA cleavage. The resulting PhyloP score, which was determined by calculating the mean of conservation scores for each base within the edit window, is believed to provide an indication of the likelihood of the spacer to perturb the target gene function.

[0364] To narrow down and determine an initial group of spacers for experimental screening and assessment, the extracted spacers were subjected to a set of filtering criteria. Firstly, non-specific spacers were excluded by performing a computational prediction analysis of off-target sites for each gRNA spacer. Briefly, off-target sites with NTC PAMs were identified and categorized based on the number of mismatched bases from the on-target sequence, and spacers with one or more off-target sites within one mismatch of the on-target sequence were excluded. Next, to select spacers that are expected to achieve a functional knockdown of the LPA mRNA and secreted Lp (a) levels, spacers that met one or more of the following inclusion criteria were selected for inclusion: spacers that were functionally annotated to target an exon or a cCRE of the human LPA locus, spacers that were evolutionarily conserved with a mean PhyloP score >0.8, and any additional spacers that were TSS-proximal. This resulted in a filtered set of 360 NTC spacers (sequences listed in Table 14). Lastly, among the filtered set of 360 NTC spacers, TTC spacers that did not overlap with a SNP having a minor allele frequency (MAF) of >0.05 were selected for experimental screening and evaluation. As a result, a total of 142 TTC spacers were identified, and the sequences and predicted edit windows of these spacers are listed in Table 15. In experiments involving use of lentivirus (Examples 2, 3 and 4), the DNA versions of the listed spacers of Table 15 were created by substituting thymine for uracil in the sequences.

TABLE 14
RNA sequences of 360 NTC spacers
targeting the human LPA locus

| | | SEQ |
|---|---|---|
| | | ID |
| PAM | Spacer sequence (RNA) | NO: |
| ATC | AGAUUUAGCACAAUGGCAAA | 544 |
| ATC | UCAAGAUUUAGCACAAUGGC | 545 |
| ATC | UCAUUUGUAUCCGUAGUCUG | 546 |
| ATC | AAUGGCCAGAAGGUCAUAUG | 547 |
| ATC | AUGGACUGAUCCUGCCGCUG | 548 |
| ATC | UGCCGCUGGACUUACCCUGC | 549 |
| ATC | GGGAGGGCUUCAAUCCUCUU | 550 |
| ATC | UCUUGUCACCUGUGGCCUAC | 551 |
| ATC | CUGAGGGCAGGUAGGCCACA | 552 |
| ATC | AGUGGCCGACAUAGAGAUGU | 553 |
| ATC | CUAUGUCGGCCACUGGAUGG | 554 |
| ATC | ACUUUCCUGGCAACUUGCGG | 555 |
| ATC | UGAUAAUGGUGAAAACCUAC | 556 |
| ATC | GCUAUUUGAGCAAGGCAAAC | 557 |
| ATC | CCUGGACUACAUAGUUGUGU | 558 |
| ATC | GGCAGAGGGUGCAUCACCUG | 559 |
| ATC | GGGCAGAGCUGCAUGAUGGA | 560 |
| ATC | UGCAGCUCUGCCCAGAUUGA | 561 |
| ATC | UUCCAGGAGGGGGUGGUGGC | 562 |
| ATC | AUCCUUCCAGGAGGGGGUGG | 563 |
| ATC | UAUACCAAACUGUGCCGAAA | 564 |
| ATC | CCACAUCCUAUACCAAACUG | 565 |
| ATC | UAAAAGUAGCUCAUAUUUGC | 566 |
| ATC | UUCCUGAUUAGUCUUGUUUC | 567 |
| ATC | GGAAAGAUGAAGGUCUAGGG | 568 |
| ATC | AUUGACAUUGCACUCUCAAA | 569 |
| ATC | UAGUUUCCAUGGGCUGAAAU | 570 |
| ATC | ACAUCCUAGUUUCCAUGGGC | 571 |
| ATC | UUCCAAUGUGUGCUGGAAUG | 572 |
| ATC | UCUAUUCACAAAUUGCUAAG | 573 |
| ATC | GCCAAUGCCUGUUCAAUAAU | 574 |
| ATC | AGUUUUCCAGCAUAGAGCAU | 575 |
| ATC | UCCUCCUUGCCCUGCCCUCA | 576 |
| ATC | AGUAGAAAGGCAGAUGAACA | 577 |
| ATC | GCCUUUCUACUGGAUACUUG | 578 |
| ATC | GCAUACAAACACAUGUUCUC | 579 |
| ATC | GCAUGUGGCCCCCACCACAC | 580 |
| ATC | UGGACCACAUGGCUUUGCUC | 581 |
| ATC | AUGACACCACAUCAACAUAA | 582 |
| ATC | ACAUAAUAGGACCACAGAAA | 583 |
| ATC | UGUGGCAGCCCCUUAUUGUU | 584 |
| ATC | GGGUAAUAGUUGGAGGCGCG | 585 |
| ATC | AGGCACAUACUUCAUUACUG | 586 |
| ATC | GGAUUUCGGCAGUAGUUCUU | 587 |
| ATC | AGAACUACUGCCGAAAUCCA | 588 |
| ATC | UGUGGCAGCCCCUUGGUGUU | 589 |
| ATC | GAGCAUCGUGUCAGGUUGCA | 590 |
| ATC | AGUGUCCUUGCAACUCUCAC | 591 |
| ATC | GGGACCACCGUGAGAGUUGC | 592 |
| ATC | AAGCACAGAGGCUUCUUCUG | 593 |
| ATC | UGGACCCCGGGGCUUUGCUC | 594 |
| ATC | GAGGACAACAGAAUAUUAUC | 595 |
| ATC | AGAUGCUGAGAUUAGUCCUU | 596 |
| ATC | AUGGUAUAACACCAAGGACU | 597 |
| ATC | AGUGUCCUUGCGACGUCCAC | 598 |
| ATC | CUGGACAUUGCGUCAGGUUG | 599 |
| ATC | ACUCUCCUCACAACUCCCAC | 600 |
| ATC | CCUCGGUAGCAGUCCUGGAC | 601 |
| ATC | AGGCACACUCUCCACCACUA | 602 |
| ATC | UCCGAUGCCAAUGUGGUGUC | 603 |
| ATC | GAGGAUCCCAUUAUACUAUC | 604 |
| ATC | CAUUAUACUAUCCAAAUGCG | 605 |
| ATC | AGUGUCCUCACAACUCCCAC | 606 |
| ATC | UGGACCACAGGGCUUUUCUC | 607 |
| ATC | AGGCAUAUCCUCCACCACUG | 608 |
| ATC | UCCACCACUGUCACAGGAAG | 609 |
| ATC | UAGAUGACCAAGAUUGACAG | 610 |
| ATC | UGGUCAUCUAUGAUACCACA | 611 |
| ATC | AUGAUACCACACUGGCAUCA | 612 |
| ATC | GAGUUGUCGGGGAAGUGGAG | 613 |
| ATC | GAGCUCUAGUGCUGUGUUGG | 614 |
| ATC | UCUGAAACCAGGACCCACUU | 615 |
| ATC | AUGCUAUUUAAGAUACUCAG | 616 |
| ATC | UAAAUAGCAUGGAUGGAGCU | 617 |
| ATC | CAUGUAAAUGAACUCAUACA | 618 |
| ATC | UUUACAUUUCCUCCAAAAGA | 619 |
| ATC | GUGCUACCCCCUUACCACUG | 620 |
| ATC | GGAUUCCUGCAGUAGUUCUC | 621 |
| ATC | GACACAAUGCUCAGAAACAG | 622 |
| ATC | GGUGUCCUAGAGACUCCCAC | 623 |
| ATC | GGCCACAGACUUCUUACCUG | 624 |
| ATC | AGGUUCCAAGCCUAGGGCCU | 625 |
| ATC | CACGCUAGACAAAGAAGGGU | 626 |
| ATC | UAGGAAAUCAAUGAAGGGUA | 627 |
| ATC | AUGAAGGGUAGUGCAGCUCU | 628 |
| ATC | UACGAGAAAGGCCAUCUGGG | 629 |
| ATC | AAUGUCAAUUCCCCUUCCCC | 630 |
| ATC | UCAUCUUUUCUAGGUCCUCA | 631 |
| ATC | CAUGUUCAGGAAAUAGAAGU | 632 |
| ATC | GCUUGUGUGGGCUCCAAGAA | 633 |
| ATC | CCAGACUACAUGGUCACCGC | 634 |
| ATC | AUGUAAGUCUCAUCUGCAAU | 635 |
| ATC | GCCCAGUGAUUGCAGAUGAG | 636 |
| ATC | GCAAUCACUGGGCUGAUCCC | 637 |
| ATC | CUGGGCUGAUCCCGUGGCCC | 638 |
| ATC | CGUGGCCCUGUCUCCAGGGC | 639 |
| ATC | UCAGGUUACCUGUGGCCCAC | 640 |
| ATC | CUACAUUGGCCACGAGAUGG | 641 |
| ATC | UGAUAAGAGGGAAAACCCAC | 642 |
| ATC | CCUGGACUGCACAGAUGUGU | 643 |
| ATC | GUGCAGUCCAGGUGAUGCAU | 644 |
| ATC | CAUGCCCAAUGCUCGGUAGU | 645 |
| ATC | UUGUCUUCGGUGUCAGAAAA | 646 |
| ATC | AAGUUUCCAAUGUUGCAAGC | 647 |
| ATC | CUAUAAGUAUAUUUGUGCUG | 648 |
| ATC | AUUGAUCUUUUCUUACCUGG | 649 |
| ATC | ACCUACUUAGAAGCUGAAAC | 650 |
| ATC | UUACCCACGUUUCAGCUUCU | 651 |
| CTC | AUGUCGGCCACUGGAUGGCA | 652 |
| CTC | CCCCUAGACCUUCAUCUUUC | 653 |
| CTC | UUCCCUCACCCCUAGACCUU | 654 |
| CTC | ACAUUGCCUUUAUGUCUCCU | 655 |
| CTC | GCUGCUCCACAUUGCCUUUA | 656 |
| CTC | AACUAUUACCCCGAUUCCAA | 657 |
| CTC | AGGCUUGGAAUCGGGGUAAU | 658 |
| CTC | CACCUGACACUGGGAUCUGU | 659 |
| CTC | GAUGCAGAAUGGACUGCCUU | 660 |
| CTC | GAAUGUUAUUCUGGCUCCAA | 661 |
| CTC | AGGCUUGGAGCCAGAAUAAC | 662 |
| CTC | GUCCAUAAUGGUAGUAGCAG | 663 |
| CTC | GUAACUCUGUCCAUAAUGGU | 664 |
| CTC | CGGUGGUCCCAGAUCCAAGC | 665 |
| CTC | AGGUUGUACCCAUUUGGAUA | 666 |
| CTC | UGGGAGAAAACUCAAAGACA | 667 |
| CTC | CCUCACAACUCCCACGGUGG | 668 |
| CTC | UCACAACUCCCACGGUGGUC | 669 |
| CTC | CAACUCCCACGGUGGUCCCA | 670 |
| CTC | GUAGCAGUCCUGGACCCCAG | 671 |
| CTC | GUCCAUCACCUCGGUAGCAG | 672 |
| CTC | AUAACUCUGUCCAUCACCUC | 673 |
| CTC | CCACCACUAUCACAGGAAGA | 674 |
| CTC | AUUCUGUCACUGGACAUCGU | 675 |
| CTC | CAACUCCCACAGUGGCCCCG | 676 |
| CTC | CACAGUGGCCCCGGUUCCAA | 677 |
| CTC | GAAACAGAAUCAGGUGUCCU | 678 |
| CTC | GCUUGAUUUUGUCUAUUUUC | 679 |
| CTC | CACCUGAUGCUGGGGUCCAU | 680 |
| CTC | GACACAGAAGGGACUGUGGU | 681 |
| CTC | CUGCUUGAAGAAGUACGUUU | 682 |
| CTC | AGGCCUUCAUCCUACAAGGU | 683 |
| CTC | AAUCUCAUGUUCAGGAAAUA | 684 |
| CTC | ACAUUGGCCACGAGAUGGCA | 685 |
| CTC | ACUGCUCUGUUCUUCUGGAA | 686 |
| CTC | AGGAAGCCCAGCUCCUUGUU | 687 |
| CTC | AUAACAAGGAGCUGGGCUUC | 688 |
| CTC | UUGUUAUUGAGAAUGAAGUG | 689 |
| CTC | GCACAAAUAUACUUAUAGUG | 690 |
| CTC | GCACUUAUUUUGAUUUGAAU | 691 |
| GTC | GCGAGUAGGUGCUGCCAUCC | 692 |
| GTC | AUGCCUCCAGCCAAAUGCCC | 693 |
| GTC | AGGGGUGAGGGAAGGAGUAA | 694 |
| GTC | AUAGAUGCUGGGAAGUGGUG | 695 |
| GTC | UAUAAAAUAUUUGAGAGUGC | 696 |
| GTC | UCACGGGGAAAUUAAACUUA | 697 |
| GTC | UUAGUAUCACUGCAAACCUC | 698 |
| GTC | UCUAUGACACCACAUCAACA | 699 |
| GTC | UAUUAUGUUGAUGUGGUGUC | 700 |
| GTC | CGCCUCCAACUAUUACCCCG | 701 |
| GTC | AUUCUGCAUCUGAGCAUCGU | 702 |
| GTC | CUCCGAAUGUUAUUCUGGCU | 703 |
| GTC | GGCACAACUUCUUACCUUGU | 704 |
| GTC | UCUGUUUUAAUUUCAGCACU | 705 |
| GTC | UGUACCCCGGGGGUUUCCUC | 706 |
| GTC | AUAAUGGUAGUAGCAGUCCU | 707 |
| GTC | GACUAUGCUGGUGUGGUGUC | 708 |
| GTC | CCAGGCAUUGUGUCAGGUUG | 709 |
| GTC | UUGCAACUCUCACGGUGGUC | 710 |
| GTC | CAGAUCCAAGCACAGAGGCU | 711 |
| GTC | GGCCAUAGACUUCCUACCUU | 712 |
| GTC | UUGAAGAAAACUCAAGGUUG | 713 |
| GTC | GUCUUUGAAGAAAACUCAAG | 714 |
| GTC | UUGGUGUUAUACCAUGGAUC | 715 |
| GTC | CAAGGACACUUGAUUCUGUC | 716 |
| GTC | UUGCGACGUCCACGGCUGUU | 717 |
| GTC | ACGGCUGUUUCUGAACAAGG | 718 |
| GTC | AGUGAUGGAAUCAACUCUCC | 719 |
| GTC | CAGUUCCAAGCACAGAGCUU | 720 |
| GTC | GACUGCAGGCUUCUUACCUU | 721 |
| GTC | UGGACCCCAGUGCUGUUUUC | 722 |
| GTC | AUCACCUCGGUAGCAGUCCU | 723 |
| GTC | AGGACUGCUACCGAGGUGAU | 724 |
| GTC | AUGACACCACAUUGGCAUCG | 725 |
| GTC | UCACAACUCCCACAGUGGCC | 726 |
| GTC | AUCUUGGUCAUCUAUGAUAC | 727 |
| GTC | CUAGGACACCUGAUUCUGUU | 728 |
| GTC | AUUUUCAGCACCAACUGAGC | 729 |
| GTC | UCCAGGUUCCAAGCCUAGGG | 730 |
| GTC | CUGGAAUGAACGUGCUGUGU | 731 |
| GTC | CUGGUGCUACACAAUGAAUC | 732 |
| GTC | GCACCCACUCUGGGGAUAUU | 733 |
| GTC | GUUUUCCCUUAAACGUACUU | 734 |
| GTC | GUGAUGACGGCAGGCCUGUA | 735 |
| GTC | GGGGAUGGCAGACAAGCUGG | 736 |
| GTC | GCCAUCCCCAGACUACAUGG | 737 |
| GTC | UGGCGGUGACCAUGUAGUCU | 738 |
| GTC | CCGCCAGGACUGAAUGUUAC | 739 |
| GTC | AUGAGUAUGUGCUGCCAUCU | 740 |
| GTC | GUGCCUCUGGCCAAAUGCUC | 741 |
| GTC | AUUAUUUCCAGCAUGCUAAA | 742 |
| GTC | UCGUUUGAUUGCUGUCUAUU | 743 |
| GTC | GACCUUAAAAGCUUAUACAC | 744 |
| GTC | GUCAGACCUUAAAAGCUUAU | 745 |
| GTC | GACUGACAAAUUCUGUAUUA | 746 |
| GTC | UAGCUAUGACACCUUAAUAC | 747 |
| GTC | UAGCUAUGACAUUUGUUAAA | 748 |
| TTC | CGGGGAAAUUAAACUUAUUU | 749 |
| TTC | CAGUGAUCUACAUCCUAGUU | 750 |
| TTC | GAAGGAAGCUCUGUGCUUGG | 751 |
| TTC | CCGUGAAGACUGUCACGGUG | 752 |
| TTC | AGCACACAUUGGAAAGAUAA | 753 |
| TTC | AAUGUGUGCUGGAAUGCCCG | 754 |
| TTC | AGGGUGAUGGGCUUCACAAC | 755 |
| TTC | AAGCACAGAGCUUCCUUCUG | 756 |
| TTC | CUCCACUUCCCCGACAACUC | 757 |
| TTC | CCGACAACUCAGAUGACUCA | 758 |
| TTC | UCAGAAGGAAGCUCUGUGCU | 759 |
| TTC | UACCUUCUUCAGAAGGAAGC | 760 |
| TTC | AUUUCCUGAACAUGAGAUUC | 761 |
| TTC | GACUACGGAUACAAAUGAAG | 762 |
| TTC | CAGGGCCAAGGCCUUGUACA | 763 |
| TTC | UAGUGGGGCAUGUUAGCAAA | 764 |
| TTC | ACAGCAAAACUAUUUUGCUA | 765 |
| TTC | AUCCUCUUGUCACCUGUGGC | 766 |
| TTC | CCAUUAUCAGGAUGUUUGCC | 767 |
| TTC | UUCUCAAUCACAGGGAGCUG | 768 |
| TTC | CUUAUGUUGUCAUUUCGGCA | 769 |
| TTC | UCUUUCCUGAUUAGUCUUGU | 770 |
| TTC | UAUCCCCUGCACUCCCUACA | 771 |
| TTC | GCCCAUGGAAACUAGGAUGU | 772 |
| TTC | CAAAUUGCUAAGUCUUUUAC | 773 |
| TTC | AUAAUCCAGUUUUCCAGCAU | 774 |
| TTC | UGCAAAGUCCUUGGCCACAG | 775 |
| TTC | UCUGCCUUUCUACUGGAUAC | 776 |
| TTC | GAACCUCCCCUGACCCUGUA | 777 |
| TTC | UUACUGUCACAGGAAGAACC | 778 |
| TTC | GCACUGACUGAGGAAACCCC | 779 |
| TTC | GAAACAGCCGUGGACGUCGC | 780 |
| TTC | GCACCAACUGAAAACAGCAC | 781 |
| TTC | GCACCACCUGAGAAAAGCCC | 782 |
| TTC | CCCCCACACCAUACAGAAGC | 783 |
| TTC | AGUGUACCAGUAGGUUGCAA | 784 |
| TTC | GCACUGAGUAUCUUAAAUAG | 785 |
| TTC | UUUACAUGAGAUCAUUUACA | 786 |
| TTC | GAAGGAGGCCCUAGGCUUGG | 787 |
| TTC | UUCCAGGGACAAAUAAAUGG | 788 |
| TTC | UUGUGUAGCACCAGGGACCA | 789 |
| TTC | UGCAUCCCACGCUAGACAAA | 790 |
| TTC | UCAUAAUGACUCUAAAUUUG | 791 |
| TTC | AGCAGUGAGCAGCAGUCAGC | 792 |
| TTC | GUCCUGGCGGUGACCAUGUA | 793 |
| TTC | UUCUCAAUAACAAGGAGCUG | 794 |
| TTC | CUCUGUCUCCCGUCCAAUUA | 795 |
| TTC | GCUUCUAAGUAGGUUGAUGC | 796 |
| TTC | AAUCAAAAUAAGUGCAGAGU | 797 |
| TTC | AACAAGGGUUCUUAACAAGA | 798 |
| TTC | UGGCAACUUGCGGUAGGUUU | 799 |
| TTC | AUCAUGCAGCUCUGCCCAGA | 800 |
| TTC | AGGAGGGGGUGGUGGCUCAU | 801 |
| TTC | UGAUUAGUCUUGUUUCCUCC | 802 |
| TTO | CCCCUCAGCUGCUCCACAUU | 803 |
| TTC | CAGCAUCUAUUGACAUUGCA | 804 |
| TTC | CAGUUCAAAAUCUUGUAUAU | 805 |
| TTC | AGCACCGUGACAGUCUUCAC | 806 |
| TTC | AGCAUAGAGCAUAUUAAAUU | 807 |
| TTC | UCAAUUUAAUAUGCUCUAUG | 808 |
| TTC | CUAGAAGUCUCGCUGCUUUC | 809 |
| TTC | AUGGAAUUAAGCAACAGGAC | 810 |
| TTC | AUGGAAGCUUGGCUAUCUUC | 811 |
| TTC | CCCAACAUGGCAGAACUCCG | 812 |
| TTC | GUGGUAGCACUCCUGCACCC | 813 |
| TTC | UGUGACAGUAAUGAAGUAUG | 814 |
| TTC | UACCUUCUUCAGAAGAAGCC | 815 |
| TTC | AUCACUGGACAUUGCGUCAG | 816 |
| TTC | UGUGAUAGUGGUGGAGAGUG | 817 |
| TTC | UUUUAUGGCUAACAUGAUAG | 818 |
| TTC | AAGCACAGAGGCUCCUUCUG | 819 |
| TTC | UGUGACAGUGGUGGAGGAUA | 820 |
| TTC | CCCCACCUGGAAACAGACUU | 821 |
| TTC | UCUUUUGGAGGAAAUGUAAA | 822 |
| TTC | UCCAAAAGAGGAAAAACUAA | 823 |
| TTC | UGCAGUAGUUCUCGGUCAGG | 824 |
| TTC | AAGCCUAGGGCCUCCUUCUG | 825 |
| TTC | AGGGACAAAUAAAUGGGCAG | 826 |
| TTC | AGACCUGCCCAUUUAUUUGU | 827 |
| TTC | UCAUUGCUCUGAGACUCUUA | 828 |
| TTC | CCUUCCCCUGAUCCAAGCCU | 829 |
| TTC | CUUAAACGUACUUCUUCAAG | 830 |
| TTC | UGAACAUGAGAUUCGAGGUU | 831 |
| TTC | UUACAGGCCUGCCGUCAUCA | 832 |
| TTC | CUCUUAUCAGGAUGUUUGCC | 833 |
| TTC | GCAGAGCUGCAUGGAGGAAG | 834 |
| TTC | UCCAUGCAGCUCUGCGGAAG | 835 |
| TTO | CCUACCUCUGUUUAGGGUGA | 836 |
| TTC | CUCAAUCCAAGUAACAAACC | 837 |
| TTC | CAGCUACCAGCUAUGCCAAA | 838 |
| TTC | GCACAGUUUGGUAUAGGAUG | 839 |
| TTC | GCAGUAGUUCUUGAUCAAGC | 840 |
| TTC | GAGGGACGAAGGCAGUCCAU | 841 |
| TTC | UCCCUCCGAAUGUUAUUCUG | 842 |
| TTC | GUGUCAGAAAACUGACACCG | 843 |
| TTC | GUGUCAGUUUUCUGACACCG | 844 |
| TTC | UUUGAUUGCUGUCUAUUAUU | 845 |
| TTC | GUCAUUUGAGUUAGCUCAGU | 846 |
| TTC | UAACAAGACUGAGCUAACUC | 847 |
| TTC | GGCCAUUUGAUUUAUUGGAG | 848 |
| TTC | UCUUUGGAGGUUUUCACAGG | 849 |
| TTC | UUGGAGGUUUUCACAGGGCC | 850 |
| TTC | CUAGAAUCUGCUAUUUGAGC | 851 |
| TTC | AGAGAACGGUGCUCCCUCAC | 852 |
| TTC | GACUACCAAGCAUCGGGCAG | 853 |
| TTC | GCCCAUUCAUUCCAGCACCG | 854 |
| TTC | AGCCUUUGGGUGUAGCCUGC | 855 |
| TTC | AUUCACAAAUUGCUAAGUCU | 856 |
| TTC | ACUGGAUACUUGUCAUCGGC | 857 |
| TTC | CUGCAGUGUGUCAUCUUUCA | 858 |
| TTC | AGGGAAUACAGGGUCAGGGG | 859 |
| TTC | CUCCUGCUGCCACCCCCACU | 860 |
| TTC | AGUCACUCUUUAACCCACUC | 861 |
| TTC | UCUGUUUUAAUUUUAGCAGC | 862 |
| TTC | GUUUUAAUUUUAGCAGCACC | 863 |
| TTC | GUGGUCCUAUUAUGUUGAUG | 864 |
| TTC | GCCAUGUUGGGGGAAGCCUC | 865 |
| TTC | GGUGCAACUUGGGUGGGCUU | 866 |
| TTC | AAAGACAAAGCCCACCCAAG | 867 |
| TTC | GGCCACAGGCUCCUUACCUU | 868 |
| TTC | UUUCUUUUCAUUUCAGCACC | 869 |
| TTC | UUUCAUUUCAGCACCAACUG | 870 |
| TTC | UCCUGUGACAGUAAUGAAGU | 871 |
| TTC | UUUGGAAUUUCCAGUGGCUU | 872 |
| TTC | GCAUCUGAGCAUCGUGUCAG | 873 |
| TTC | GGCUCCAAGCCUAGAGGCUU | 874 |
| TTC | GUUUUAAUUUCAGCACUGAC | 875 |
| TTC | GGGGUCCGACUAUGCUGGUG | 876 |
| TTC | GUCACCAGGCAUUGUGUCAG | 877 |
| TTC | UCAGAAGAAGCCUCUGUGCU | 878 |
| TTC | GUUGUCCUCUGAUGCCAGUG | 879 |
| TTC | UACCUUGUUCAGAAACAGCC | 880 |
| TTC | CUGAUGCCAGUGUGGUGUCA | 881 |
| TTC | GUGGUUCUCUGAUGCCAGUG | 882 |
| TTC | CUUGGGAGAAAACUCAAAGA | 883 |
| TTC | UCCUGUGAUAGUGGUGGAGA | 884 |
| TTC | GUAUGGUGUGGGGGUGAAGU | 885 |
| TTC | GAAACCAGGACCCACUUGAG | 886 |
| TTC | UAUUAUCUUCUGAAACCAGG | 887 |
| TTC | GUAUGAGUUCAUUUACAUGA | 888 |
| TTC | GUUGAAAGAAACCAAUGUAU | 889 |
| TTC | UGGAUUCAUUGUGUAGCACC | 890 |
| TTC | UUGUCUAGCGUGGGAUGCAU | 891 |
| TTC | CAGCUGCAGAAGAGGACAGU | 892 |
| TTC | UCUCAGCUGCAGAAGAGGAC | 893 |
| TTC | CGUAAGAUUACUACUCAUGA | 894 |
| TTC | UUUCCCACCUUGUGCCACAG | 895 |
| TTC | UUCUAGGUUUGGAAAGCACU | 896 |
| TTC | UCAAGCAGUGAGCAGCAGUC | 897 |
| TTC | UGGAGCCCACACAAGCAGAU | 898 |
| TTC | CAAAAUAUUUUGCUGAAAGU | 899 |
| TTC | GACACCGAAGACAAUGAUCU | 900 |
| TTC | CAAUAACAAGGAGCUGGGCU | 901 |
| TTC | AAGUAGGUUGAUGCUUCACU | 902 |
| TTC | GUAUUAAGGUGUCAUAGCUA | 903 |

TABLE 15
RNA sequences and edit window of 142 TTC spacers targeting the human
LPA locus

| | | | Edit window in human |
|---|---|---|---|
| | | SEQ | reference genome build |
| Spacer ID | Spacer sequence (RNA) | ID NO: | hg38 |
| TG-48-029 | GACUACGGAUACAAAUGAAG | 762 | cCRE |
| TG-48-038 | CAGGGCCAAGGCCUUGUACA | 763 | cCRE |
| TG-48-039 | UAGUGGGGCAUGUUAGCAAA | 764 | cCRE |
| TG-48-040 | ACAGCAAAACUAUUUUGCUA | 765 | cCRE |
| TG-48-018 | AUCCUCUUGUCACCUGUGGC | 766 | cCRE |
| TG-48-052 | CCAUUAUCAGGAUGUUUGCC | 767 | cCRE |
| TG-48-059 | UUCUCAAUCACAGGGAGCUG | 768 | — |
| TG-48-064 | CUUAUGUUGUCAUUUCGGCA | 769 | cCRE |
| TG-48-071 | UCUUUCCUGAUUAGUCUUGU | 770 | — |
| TG-48-009 | UAUCCCCUGCACUCCCUACA | 771 | Intron 1 |
| TG-48-008 | GCCCAUGGAAACUAGGAUGU | 772 | Intron 1 |
| TG-48-098 | CAAAUUGCUAAGUCUUUUAC | 773 | Intron 1 |
| TG-48-100 | AUAAUCCAGUUUUCCAGCAU | 774 | Intron 1 |
| TG-48-104 | UGCAAAGUCCUUGGCCACAG | 775 | Intron 1 |
| TG-48-107 | UCUGCCUUUCUACUGGAUAC | 776 | Intron 1 |
| TG-48-112 | GAACCUCCCCUGACCCUGUA | 777 | Intron 1 |
| TG-48-143 | UUACUGUCACAGGAAGAACC | 778 | Exon 18 |
| TG-48-163 | GCACUGACUGAGGAAACCCC | 779 | Exon 20 |
| TG-48-193 | GAAACAGCCGUGGACGUCGC | 780 | Exon 23 |
| TG-48-213 | GCACCAACUGAAAACAGCAC | 781 | Exon 26 |
| TG-48-236 | GCACCACCUGAGAAAAGCCC | 782 | Exon 28 |
| TG-48-250 | CCCCCACACCAUACAGAAGC | 783 | Intron 28 |
| TG-48-255 | AGUGUACCAGUAGGUUGCAA | 784 | Intron 28 |
| TG-48-256 | GCACUGAGUAUCUUAAAUAG | 785 | Intron 28 |
| TG-48-261 | UUUACAUGAGAUCAUUUACA | 786 | Intron 28 |
| TG-48-280 | GAAGGAGGCCCUAGGCUUGG | 787 | Exon 31 |
| TG-48-283 | UUCCAGGGACAAAUAAAUGG | 788 | Exon 32 |
| TG-48-286 | UUGUGUAGCACCAGGGACCA | 789 | Exon 33 |
| TG-48-290 | UGCAUCCCACGCUAGACAAA | 790 | Intron 33 |
| TG-48-292 | UCAUAAUGACUCUAAAUUUG | 791 | Intron 33 |
| TG-48-305 | AGCAGUGAGCAGCAGUCAGC | 792 | Exon 35 |
| TG-48-324 | GUCCUGGCGGUGACCAUGUA | 793 | Exon 37 |
| TG-48-352 | UUCUCAAUAACAAGGAGCUG | 794 | Exon 38 |
| TG-48-360 | CUCUGUCUCCCGUCCAAUUA | 795 | Exon 39, 3UTR |
| TG-48-362 | GCUUCUAAGUAGGUUGAUGC | 796 | Exon 39, 3UTR |
| TG-48-375 | AAUCAAAAUAAGUGCAGAGU | 797 | Exon 39, 3UTR |
| TG-48-033 | AACAAGGGUUCUUAACAAGA | 798 | cCRE |
| TG-48-017 | UGGCAACUUGCGGUAGGUUU | 799 | cCRE |
| TG-48-014 | AUCAUGCAGCUCUGCCCAGA | 800 | cCRE |
| TG-48-061 | AGGAGGGGGUGGUGGCUCAU | 801 | cCRE |
| TG-48-069 | UGAUUAGUCUUGUUUCCUCC | 802 | — |
| TG-48-078 | CCCCUCAGCUGCUCCACAUU | 803 | — |
| TG-48-080 | CAGCAUCUAUUGACAUUGCA | 804 | — |
| TG-48-083 | CAGUUCAAAAUCUUGUAUAU | 805 | Intron 1 |
| TG-48-087 | AGCACCGUGACAGUCUUCAC | 806 | Intron 1 |
| TG-48-102 | AGCAUAGAGCAUAUUAAAUU | 807 | Intron 1 |
| TG-48-103 | UCAAUUUAAUAUGCUCUAUG | 808 | Intron 1 |
| TG-48-007 | CUAGAAGUCUCGCUGCUUUC | 809 | Intron 1 |
| TG-48-006 | AUGGAAUUAAGCAACAGGAC | 810 | Intron 1 |
| TG-48-005 | AUGGAAGCUUGGCUAUCUUC | 811 | Intron 1 |
| TG-48-126 | CCCAACAUGGCAGAACUCCG | 812 | Intron 7 |
| TG-48-139 | GUGGUAGCACUCCUGCACCC | 813 | Exon 18 |
| TG-48-141 | UGUGACAGUAAUGAAGUAUG | 814 | Exon 18 |
| TG-48-179 | UACCUUCUUCAGAAGAAGCC | 815 | Exon 21 |
| TG-48-201 | AUCACUGGACAUUGCGUCAG | 816 | Exon 25 |
| TG-48-222 | UGUGAUAGUGGUGGAGAGUG | 817 | Exon 26 |
| TG-48-229 | UUUUAUGGCUAACAUGAUAG | 818 | Intron 26 |
| TG-48-235 | AAGCACAGAGGCUCCUUCUG | 819 | Exon 27 |
| TG-48-239 | UGUGACAGUGGUGGAGGAUA | 820 | Exon 28 |
| TG-48-245 | CCCCACCUGGAAACAGACUU | 821 | Intron 28 |
| TG-48-262 | UCUUUUGGAGGAAAUGUAAA | 822 | Intron 28 |
| TG-48-264 | UCCAAAAGAGGAAAAACUAA | 823 | Intron 28 |
| TG-48-267 | UGCAGUAGUUCUCGGUCAGG | 824 | Exon 29 |
| TG-48-281 | AAGCCUAGGGCCUCCUUCUG | 825 | Exon 31 |
| TG-48-284 | AGGGACAAAUAAAUGGGCAG | 826 | Exon 32 |
| TG-48-285 | AGACCUGCCCAUUUAUUUGU | 827 | Exon 32 |
| TG-48-299 | UCAUUGCUCUGAGACUCUUA | 828 | Intron 33 |
| TG-48-300 | CCUUCCCCUGAUCCAAGCCU | 829 | Intron 33 |
| TG-48-308 | CUUAAACGUACUUCUUCAAG | 830 | Exon 35 |
| TG-48-312 | UGAACAUGAGAUUCGAGGUU | 831 | Exon 36 |
| TG-48-318 | UUACAGGCCUGCCGUCAUCA | 832 | Exon 37 |
| TG-48-336 | CUCUUAUCAGGAUGUUUGCC | 833 | Intron 37 |
| TG-48-341 | GCAGAGCUGCAUGGAGGAAG | 834 | Intron 37 |
| TG-48-342 | UCCAUGCAGCUCUGCGGAAG | 835 | Intron 37 |
| TG-48-358 | CCUACCUCUGUUUAGGGUGA | 836 | Exon 39, Intron 38 |
| TG-48-359 | CUCAAUCCAAGUAACAAACC | 837 | Exon 39 |
| TG-48-368 | CAGCUACCAGCUAUGCCAAA | 838 | Exon 39, 3UTR |
| TG-48-066 | GCACAGUUUGGUAUAGGAUG | 839 | cCRE |
| TG-48-145 | GCAGUAGUUCUUGAUCAAGC | 840 | Exon 19 |
| TG-48-154 | GAGGGACGAAGGCAGUCCAU | 841 | Exon 19 |
| TG-48-155 | UCCCUCCGAAUGUUAUUCUG | 842 | Exon 19 |
| TG-48-343 | GUGUCAGAAAACUGACACCG | 843 | Intron 37 |
| TG-48-344 | GUGUCAGUUUUCUGACACCG | 844 | Intron 37 |
| TG-48-366 | UUUGAUUGCUGUCUAUUAUU | 845 | Exon 39, 3UTR |
| TG-48-031 | GUCAUUUGAGUUAGCUCAGU | 846 | cCRE |
| TG-48-032 | UAACAAGACUGAGCUAACUC | 847 | cCRE |
| TG-48-035 | GGCCAUUUGAUUUAUUGGAG | 848 | cCRE |
| TG-48-036 | UCUUUGGAGGUUUUCACAGG | 849 | cCRE |
| TG-48-037 | UUGGAGGUUUUCACAGGGCC | 850 | cCRE |
| TG-48-016 | CUAGAAUCUGCUAUUUGAGC | 851 | cCRE |
| TG-48-015 | AGAGAACGGUGCUCCCUCAC | 852 | cCRE |
| TG-48-056 | GACUACCAAGCAUCGGGCAG | 853 | cCRE |
| TG-48-088 | GCCCAUUCAUUCCAGCACCG | 854 | Intron 1 |
| TG-48-092 | AGCCUUUGGGUGUAGCCUGC | 855 | Intron 1 |
| TG-48-097 | AUUCACAAAUUGCUAAGUCU | 856 | Intron 1 |
| TG-48-109 | ACUGGAUACUUGUCAUCGGC | 857 | Intron 1 |
| TG-48-111 | CUGCAGUGUGUCAUCUUUCA | 858 | Intron 1 |
| TG-48-113 | AGGGAAUACAGGGUCAGGGG | 859 | Intron 1 |
| TG-48-114 | CUCCUGCUGCCACCCCCACU | 860 | Intron 1 |
| TG-48-115 | AGUCACUCUUUAACCCACUC | 861 | Intron 1 |
| TG-48-118 | UCUGUUUUAAUUUUAGCAGC | 862 | Exon 2, Intron 1 |
| TG-48-119 | GUUUUAAUUUUAGCAGCACC | 863 | Exon 2, Intron 1 |
| TG-48-124 | GUGGUCCUAUUAUGUUGAUG | 864 | Exon 2 |
| TG-48-127 | GCCAUGUUGGGGGAAGCCUC | 865 | Intron 7 |
| TG-48-128 | GGUGCAACUUGGGUGGGCUU | 866 | Intron 7 |
| TG-48-129 | AAAGACAAAGCCCACCCAAG | 867 | Intron 7 |
| TG-48-136 | GGCCACAGGCUCCUUACCUU | 868 | Exon 17, Intron 17 |
| TG-48-137 | UUUCUUUUCAUUUCAGCACC | 869 | Exon 18, Intron 17 |
| TG-48-138 | UUUCAUUUCAGCACCAACUG | 870 | Exon 18 |
| TG-48-142 | UCCUGUGACAGUAAUGAAGU | 871 | Exon 18 |
| TG-48-144 | UUUGGAAUUUCCAGUGGCUU | 872 | Exon 19, Intron 18 |
| TG-48-151 | GCAUCUGAGCAUCGUGUCAG | 873 | Exon 19 |
| TG-48-159 | GGCUCCAAGCCUAGAGGCUU | 874 | Exon 19 |
| TG-48-162 | GUUUUAAUUUCAGCACUGAC | 875 | Exon 20, Intron 19 |
| TG-48-169 | GGGGUCCGACUAUGCUGGUG | 876 | Exon 20 |
| TG-48-171 | GUCACCAGGCAUUGUGUCAG | 877 | Exon 21 |
| TG-48-178 | UCAGAAGAAGCCUCUGUGCU | 878 | Exon 21 |
| TG-48-182 | GUUGUCCUCUGAUGCCAGUG | 879 | Exon 22 |
| TG-48-195 | UACCUUGUUCAGAAACAGCC | 880 | Exon 23 |
| TG-48-196 | CUGAUGCCAGUGUGGUGUCA | 881 | Exon 24 |
| TG-48-197 | GUGGUUCUCUGAUGCCAGUG | 882 | Exon 24 |
| TG-48-199 | CUUGGGAGAAAACUCAAAGA | 883 | Intron 24 |
| TG-48-223 | UCCUGUGAUAGUGGUGGAGA | 884 | Exon 26 |
| TG-48-249 | GUAUGGUGUGGGGGUGAAGU | 885 | Intron 28 |
| TG-48-252 | GAAACCAGGACCCACUUGAG | 886 | Intron 28 |
| TG-48-254 | UAUUAUCUUCUGAAACCAGG | 887 | Intron 28 |
| TG-48-260 | GUAUGAGUUCAUUUACAUGA | 888 | Intron 28 |
| TG-48-265 | GUUGAAAGAAACCAAUGUAU | 889 | Intron 28 |
| TG-48-288 | UGGAUUCAUUGUGUAGCACC | 890 | Exon 33 |
| TG-48-291 | UUGUCUAGCGUGGGAUGCAU | 891 | Intron 33 |
| TG-48-293 | CAGCUGCAGAAGAGGACAGU | 892 | Intron 33 |
| TG-48-294 | UCUCAGCUGCAGAAGAGGAC | 893 | Intron 33 |
| TG-48-298 | CGUAAGAUUACUACUCAUGA | 894 | Intron 33 |
| TG-48-302 | UUUCCCACCUUGUGCCACAG | 895 | Exon 34, Intron 33 |
| TG-48-303 | UUCUAGGUUUGGAAAGCACU | 896 | Exon 35 |
| TG-48-306 | UCAAGCAGUGAGCAGCAGUC | 897 | Exon 35 |
| TG-48-317 | UGGAGCCCACACAAGCAGAU | 898 | Exon 36 |
| TG-48-337 | CAAAAUAUUUUGCUGAAAGU | 899 | Intron 37 |
| TG-48-346 | GACACCGAAGACAAUGAUCU | 900 | Intron 37 |
| TG-48-351 | CAAUAACAAGGAGCUGGGCU | 901 | Exon 38 |
| TG-48-361 | AAGUAGGUUGAUGCUUCACU | 902 | Exon 39, 3UTR |
| TG-48-373 | GUAUUAAGGUGUCAUAGCUA | 903 | Exon 39, 3UTR |

### Results

[0365] The 142 TTC spacers identified by the in silico filtering criteria (Table 15) were subjected to further experimental assessment in the examples that follow. FIG. 1 illustrates a schematic of the relative locations in the human LPA gene that these 142 spacers target. As depicted in FIG. 1, the majority of the 142 TTC spacers do not target the Kringle IV Type 2 (KIV-2) repeat region, demonstrating that the computational algorithm was able to exclude non-specific spacers with high off-target activity and identified unique spacers for targeting the human LPA locus. Notably, by applying the in silico filtering criteria as described above, these 142 spacers are unique targeting sequences that avoid any repetitive regions and would only induce a single edit within the human genome.

[0366] The identification of a highly specific spacer is believed to be particularly important for targeting the LPA locus for several reasons. First, the repetitive Kringle regions within the LPA coding sequence are believed to make the locus prone to chromosomal rearrangements. Specifically, it is possible that introducing a double stranded break within an LPA Kringle repeat would lead the DNA to undergo homology-dependent repair with another Kringle repeat, and thereby introduce a deleterious chromosomal rearrangement. Further, there is a high degree of similarity between LPA and the gene encoding plasminogen (PLG). The LPA and PLG genes are homologs that both contain Kringle repeat regions and share sequence homology in both the untranslated and coding regions (McLean, J., et al., Nature 1987; 330:132-137; Schmidt K., et al., J Lipid Res. 2016; 57 (8): 1339-1359). The human PLG and LPA genes are clustered together on chromosome 6, which also harbors the LPA-like pseudogene, LPAL2, which is yet another potential source of off-target editing. Therefore, the computational process described above is believed to be important for identifying CasX spacers capable of effectively editing the LPA locus in a highly specific manner, without excessive off-target effects.

### Example 2: Editing of Human LPA Locus in Human Liver Cell Line

[0367] Experiments were performed to test the ability of a CasX:gRNA system to edit the LPA locus in the HepG2 human liver cell line.

### Materials and Methods

### Lentiviral Plasmid Cloning, Lentivirus Production, and Lentivirus Transduction:

[0368] Lentiviral plasmid constructs with sequences coding for CasX protein 515, and guide scaffold variant 235 with LPA-targeting spacers were generated and cloned upstream of a P2A-mScarlet coding region on a lentiviral plasmid using standard molecular cloning techniques. The spacers utilized were a subset of the 142 spacers provided in Table 15 (but with thymine substituted for uracil in the sequences of Table 15), above, or a control spacer targeting the B2M locus. Cloned and sequence-validated constructs were midi-prepped and subjected to quality assessment prior to transfection into HEK293T cells for lentiviral production.

[0369] Lentiviral particles were produced by transfecting HEK293T at a confluency of 70%-90% using lipofectamine-based transfection of the CasX and gRNA plasmids, a lentiviral packaging plasmid, and VSV-G envelope plasmids. For particle production, media was changed 12 hours post-transfection, and virus was harvested 36-48 hours post-transfection. Viral supernatants were filtered using 0.45 μm membrane filters, diluted in media if appropriate, and added to HepG2 target cells cultured in HepG2 medium (EMEM with 10% FBS and 1% penicillin-streptomycin) at a multiplicity of infection (MOI) of about 1. Supplemental DEAE-Dextran was added at 8 μg/ml to enhance transduction efficiency, if necessary. Transduced cells were grown for three days in HepG2 medium in a 37° C. incubator with 5% CO₂. Cells were then harvested and genomic DNA was extracted.

### Assessment of Editing of IPA Gene by Next-Generation Sequencing (NGS):

[0370] Genomic DNA was amplified via PCR with primers specific to the target genomic location of interest to form a target amplicon. These primers contained additional sequence at the 5′ ends to introduce Illumina reads 1 and 2 sequences. Further, they contained a 16-nucleotide random sequence that functioned as a unique molecular identifier (UMI). The quality and quantification of the amplicon was assessed using a Fragment Analyzer DNA analyzer kit (Agilent, dsDNA 35-1500 bp). Amplicons were sequenced on the Illumina MiSeq™ according to the manufacturer's instructions. Raw fastq sequencing files were processed by trimming for quality and adapter sequences and merging read 1 and read 2 into a single insert sequence; insert sequences were then analyzed by the CRISPResso2 program. The percentage of reads modified in a window around the 3′ end of the spacer was determined. The editing activity of the CasX molecule was quantified as the total percent of reads that contained deletions anywhere within this window (Table 16). Each LPA spacer was assessed in 1-3 independent replicates. Table 16, below, provides the mean deletion rate, the standard deviation, and the number of replicates for the tested spacers.

### Results

[0371] The ability of CasX 515 and gRNA scaffold 235 to edit the LPA locus when delivered by lentivirus in HepG2 cells was assessed. Table 16, below, provides the level of editing (deletion rate) produced by constructs with each individual spacer, rounded to the nearest hundredth.

TABLE 16
Editing of LPA locus by CasX:gRNA

| | Deletion Rate | Standard | Number of |
|---|---|---|---|
| Spacer ID | (Mean) | Deviation | Replicates |
| B2M spacer (control) | 0.28 | 0.29 | 20 |
| TG-48-005 | 0.28 | 0 | 2 |
| TG-48-006 | 0.14 | 0.02 | 3 |
| TG-48-007 | 0.27 | 0.02 | 3 |
| TG-48-008 | 0.19 | 0.04 | 3 |
| TG-48-009 | 0.14 | 0.24 | 3 |
| TG-48-014 | 0.13 | 0.03 | 3 |
| TG-48-015 | 0.55 | 0.05 | 3 |
| TG-48-016 | 0.51 | 0.04 | 2 |
| TG-48-017 | 0.59 | 0.1 | 3 |
| TG-48-018 | 0.22 | 0.07 | 3 |
| TG-48-029 | 0.17 | 0.03 | 3 |
| TG-48-031 | 0.05 | 0 | 3 |
| TG-48-032 | 0.11 | 0 | 3 |
| TG-48-033 | 0.04 | 0.01 | 3 |
| TG-48-035 | 0 | 0 | 3 |
| TG-48-036 | 0.03 | 0.01 | 3 |
| TG-48-037 | 0.22 | 0.07 | 3 |
| TG-48-038 | 0.26 | 0.03 | 3 |
| TG-48-039 | 0.33 | 0.05 | 3 |
| TG-48-040 | 0.01 | 0 | 3 |
| TG-48-052 | 0.42 | 0.03 | 2 |
| TG-48-056 | 0.22 | 0.04 | 3 |
| TG-48-059 | 0.1 | 0.02 | 3 |
| TG-48-061 | 0.3 | 0.04 | 3 |
| TG-48-064 | 0.03 | 0 | 3 |
| TG-48-066 | 0.12 | 0.02 | 2 |
| TG-48-069 | 0.09 | 0.01 | 3 |
| TG-48-071 | 0.08 | 0.02 | 3 |
| TG-48-078 | 0 | 0 | 2 |
| TG-48-080 | 0.04 | 0.01 | 2 |
| TG-48-083 | 0.2 | 0.01 | 3 |
| TG-48-087 | 0.1 | 0.01 | 3 |
| TG-48-088 | 0.17 | 0.03 | 3 |
| TG-48-092 | 0.25 | 0.05 | 3 |
| TG-48-097 | 0.23 | 0.03 | 3 |
| TG-48-098 | 0.07 | 0.01 | 3 |
| TG-48-100 | 0.01 | 0 | 3 |
| TG-48-102 | 0.19 | 0.01 | 3 |
| TG-48-103 | 0.04 | 0.01 | 3 |
| TG-48-104 | 0.11 | 0.18 | 3 |
| TG-48-107 | 0.3 | 0.02 | 3 |
| TG-48-109 | 0.23 | 0.04 | 3 |
| TG-48-111 | 0.2 | 0.02 | 3 |
| TG-48-112 | 0.07 | 0.02 | 3 |
| TG-48-113 | 0.3 | 0.02 | 3 |
| TG-48-114 | 0.04 | 0.04 | 3 |
| TG-48-115 | 0.04 | 0.01 | 3 |
| TG-48-118 | 0 | 0 | 3 |
| TG-48-119 | 0 | 0 | 3 |
| TG-48-124 | 0.02 | 0.04 | 3 |
| TG-48-126 | 0.1 | 0.03 | 3 |
| TG-48-127 | 0.03 | 0.01 | 3 |
| TG-48-128 | 0.08 | 0.01 | 3 |
| TG-48-129 | 0.05 | 0.01 | 3 |
| TG-48-136 | 0.03 | 0.01 | 3 |
| TG-48-137 | 0 | 0 | 3 |
| TG-48-138 | 0.02 | 0 | 3 |
| TG-48-139 | 0.15 | 0.02 | 3 |
| TG-48-141 | 0.07 | 0.12 | 3 |
| TG-48-142 | 0.12 | 0.03 | 3 |
| TG-48-143 | 0.1 | 0.03 | 3 |
| TG-48-144 | 0.03 | 0.04 | 3 |
| TG-48-145 | 0.13 | 0.05 | 3 |
| TG-48-151 | 0.03 | 0.01 | 2 |
| TG-48-154 | 0.07 | 0.01 | 2 |
| TG-48-155 | 0.03 | 0.01 | 3 |
| TG-48-159 | 0.03 | 0 | 2 |
| TG-48-162 | 0 | 0 | 3 |
| TG-48-163 | 0.04 | 0 | 3 |
| TG-48-171 | 0.3 | 0.07 | 3 |
| TG-48-178 | 0.17 | 0.04 | 3 |
| TG-48-179 | 0.07 | 0.03 | 3 |
| TG-48-182 | 0.01 | 0.01 | 3 |
| TG-48-193 | 0.08 | 0.02 | 3 |
| TG-48-195 | 0.04 | 0.02 | 3 |
| TG-48-196 | 0.02 | 0.03 | 3 |
| TG-48-197 | 0.08 | 0.04 | 3 |
| TG-48-199 | 0.24 | 0.12 | 2 |
| TG-48-201 | 0.04 | NA | 1 |
| TG-48-213 | 0.05 | 0.03 | 3 |
| TG-48-222 | 0.44 | 0.08 | 3 |
| TG-48-223 | 0.07 | 0.08 | 3 |
| TG-48-229 | 0 | 0 | 3 |
| TG-48-235 | 0.05 | 0.09 | 3 |
| TG-48-236 | 0.04 | 0.01 | 3 |
| TG-48-239 | 0.22 | 0.08 | 3 |
| TG-48-249 | 0.2 | 0.01 | 3 |
| TG-48-250 | 0.18 | 0.02 | 3 |
| TG-48-252 | 0.04 | 0.01 | 3 |
| TG-48-254 | 0.01 | 0.01 | 2 |
| TG-48-255 | 0.08 | 0.03 | 3 |
| TG-48-256 | 0.07 | 0.01 | 3 |
| TG-48-260 | 0.06 | 0.08 | 3 |
| TG-48-261 | 0.01 | 0.01 | 3 |
| TG-48-262 | 0 | 0 | 3 |
| TG-48-264 | 0.02 | 0.03 | 3 |
| TG-48-265 | 0.18 | 0.01 | 3 |
| TG-48-267 | 0.14 | 0.03 | 3 |
| TG-48-280 | 0.48 | 0.24 | 3 |
| TG-48-281 | 0.36 | 0.05 | 2 |
| TG-48-283 | 0.14 | NA | 1 |
| TG-48-284 | 0.2 | 0.01 | 3 |
| TG-48-285 | 0.05 | 0.08 | 3 |
| TG-48-286 | 0.17 | 0.02 | 3 |
| TG-48-288 | 0.18 | 0.02 | 3 |
| TG-48-290 | 0.19 | 0.01 | 3 |
| TG-48-291 | 0.13 | 0 | 2 |
| TG-48-292 | 0.13 | 0.03 | 3 |
| TG-48-293 | 0.36 | 0.01 | 2 |
| TG-48-294 | 0.21 | 0.01 | 3 |
| TG-48-298 | 0.25 | 0.04 | 3 |
| TG-48-299 | 0.09 | 0.01 | 3 |
| TG-48-300 | 0.08 | 0.02 | 3 |
| TG-48-302 | 0.04 | 0.01 | 2 |
| TG-48-303 | 0.11 | 0.07 | 3 |
| TG-48-305 | 0.27 | 0.05 | 2 |
| TG-48-306 | 0.15 | 0.01 | 3 |
| TG-48-308 | 0.06 | 0.01 | 3 |
| TG-48-312 | 0.09 | 0.02 | 3 |
| TG-48-317 | 0.05 | 0.09 | 3 |
| TG-48-318 | 0.08 | 0.13 | 3 |
| TG-48-324 | 0.11 | 0.05 | 3 |
| TG-48-336 | 0.44 | 0.04 | 3 |
| TG-48-337 | 0 | 0 | 2 |
| TG-48-341 | 0.5 | 0.01 | 2 |
| TG-48-342 | 0.3 | 0.04 | 3 |
| TG-48-343 | 0.5 | 0.05 | 3 |
| TG-48-344 | 0.12 | 0.01 | 3 |
| TG-48-346 | 0.18 | 0 | 3 |
| TG-48-351 | 0.4 | 0.04 | 3 |
| TG-48-352 | 0.1 | 0.03 | 2 |
| TG-48-358 | 0.1 | 0.02 | 2 |
| TG-48-359 | 0.09 | 0.02 | 3 |
| TG-48-360 | 0.1 | 0.01 | 3 |
| TG-48-361 | 0.1 | 0.01 | 3 |
| TG-48-362 | 0.03 | 0 | 2 |
| TG-48-373 | 0.13 | 0.07 | 3 |
| TG-48-375 | 0.01 | 0 | 2 |

[0372] CasX 515 and gRNAs with many of the tested spacers successfully edited the LPA locus in HepG2 cells, with varying levels of activity. Nine of the tested spacers produced deletion rates greater than 40% (TG-48-017, TG-48-015, TG-48-016, TG-48-343, TG-48-341, TG-48-280, TG-48-336, TG-48-222, and TG-48-052). Spacer TG-48-017 produced the highest level of editing, with a deletion rate of approximately 59%.

[0373] Unexpectedly, three spacers complementary to LPA exon 2 (TG-48-124, TG-48-119, TG-48-118) showed very low levels of editing. Indeed, TG-48-119 and TG-48-118 showed the lowest levels of editing of the tested spacers. Surprisingly, spacers complementary to LPA exon 38 showed the high levels of editing.

[0374] The results demonstrate that CasX 515 was able to edit the LPA locus in HepG2 cells with gRNAs with a variety of spacer sequences.

### Example 3: Editing of Human LPA Locus in Primary Human Hepatocytes

[0375] Experiments were performed to test the ability of a CasX:gRNA system to edit the LPA locus in the primary human hepatocytes.

### Materials and Methods

[0376] Lentiviral plasmids were cloned and lentiviruses were produced as described in Example 2, above. The spacers used in the constructs were a subset of the spacers tested in Example 2 (with thymine substituted for uracil in the sequences of Table 15 that were utilized), chosen to represent a range of editing levels and positions in the LPA locus, or a control spacer targeting the B2M locus. Cells were transduced as described in Example 2, except that the primary human hepatocytes were transduced at a relatively high dose of lentivirus, with an MOI of approximately 6, and cells were grown for five days before they were harvested and genomic DNA was extracted.

[0377] Editing of the LPA gene was measured by NGS as described in Example 2. Each spacer was assessed once. Table 17, below, provides the deletion rate for each of the tested spacers.

### Results:

[0378] Table 17, below, provides the level of editing (deletion rate) produced by the constructs for each individual spacer, rounded to the nearest hundredth.

TABLE 17
Editing of LPA locus by CasX:gRNA

| Spacer ID | Deletion Rate |
|---|---|
| B2M spacer (control) | 0 |
| TG-48-222 | 0.24 |
| TG-48-351 | 0.56 |
| TG-48-280 | 0.72 |
| TG-48-080 | 0.17 |
| TG-48-171 | 0.26 |
| TG-48-305 | 0.38 |
| TG-48-239 | 0.23 |
| TG-48-284 | 0.47 |
| TG-48-178 | 0.31 |
| TG-48-118 | 0 |
| TG-48-119 | 0 |
| TG-48-124 | 0.05 |
| TG-48-139 | 0.06 |
| TG-48-145 | 0.14 |

[0379] CasX 515 and gRNAs with the tested spacers edited the LPA locus in primary human hepatocytes with varying levels of activity. Spacer TG-48-280 produced the highest level of editing, with a deletion rate of 72%, followed by spacer TG-48-351, with a deletion rate of 56%.

[0380] The spacers complementary to exon 2 (TG-48-124, TG-48-119, TG-48-118) produced low levels of editing, consistent with their performance in HepG2 cells as described in Example 2.

[0381] The results demonstrate that CasX 515 was able to edit the LPA locus in primary human hepatocytes with gRNAs with a variety of spacer sequences.

### Example 4: Functional Assessments of CasX: GRNA Systems Targeting the Human LPA Locus

[0382] Experiments were performed to test the ability of CasX:gRNA systems to edit the LPA locus, reduce levels of secreted apo (a), and reduce levels of LPA mRNA in cell-based assays. CasX protein 515 (SEQ ID NO: 5) and guide scaffold variant 235 (SEQ ID NO: 465) were used, along with the 142 LPA-targeting sequences provided in Table 15, above, with the encoded components delivered in a lentiviral-based system.

### Materials and Methods

[0383] LPA-targeting sequences were narrowed to 60 top hits with greatest activity by lentiviral screening in primary human hepatocytes (PHH) for secreted apo (a) knockdown, and in HepG2 cells for editing activity, using the methodology described in Example 2.

### Lentiviral Cloning and Transduction:

[0384] Lentiviral plasmids were cloned and lentiviruses were produced as described in Example 2, above. The LPA-targeting sequences used in the constructs were the 142 LPA-targeting sequences listed in Table 15 (but with thymine substituted for uracil in the sequences of Table 15), or a control targeting sequence targeting the B2M locus. Cells were transduced as described in Example 2, except that the primary human hepatocytes were transduced at a target MOI of at least 2, and cells were grown for six days before they were harvested. Briefly, 60,000 PHHs (Lonza lot #HUM183121) were plated onto collagen-coated 96-well plates and cultured in H+ media for the duration of the experiment. The day after plating, LV stocks were thawed and titers were normalized to a final volume of 50 uL. PHHs were then treated with LV and DEAE-Dextran (8 μg/mL) in order to maximize LV transduction efficiency. After 24 hours, a full media change was performed. The final media collection was performed 7 days after plating with the last full media change being performed 72 hours prior to collection. Five replicates were tested for each condition.

[0385] Assessment of apo (a) secretion by Western Blot using an automated capillary separation and detection system, Jess (Bio-Techne):

[0386] Briefly, primary human hepatocytes were transduced with lentivirus encoding for CasX 515 and an LPA-targeting gRNA. Six days after lentiviral transfection, and 72 hours after a media change, supernatant was harvested and the apo (a) secreted into the media was measured. Total protein was quantified and diluted to 2 μg/uL prior to Western blotting, and secreted apo (a) was detected using a monoclonal apo (a) antibody (Abcam: Ab208184). The amount of protein was determined using Compass software to calculate the area under the curve (AUC) for the apo (a) peak detected at ˜450 kDa. AUC values were compared to a standard curve of fixed apo (a) concentrations to quantify final protein concentrations. While a standard curve was not included for every Jess run, 2 or more calibrator samples were included across multiple Jess runs to 1) calculate protein concentrations based on a previous standard curve and 2) evaluate protein concentrations from multiple Jess runs.

### Results

[0387] The ability of CasX 515 and gRNA comprising scaffold 235 and an LPA-targeting sequence to reduce secretion of apo (a) was assessed. Table 18, below, provides the percent of apo (a) produced by primary human hepatocytes with each individual targeting sequence, rounded to the nearest hundredth, and mean deletion rate as determined in Example 2.

[0388] Table 19 provides a list of the 60 LPA-targeting sequences that were selected for further evaluation.

TABLE 18
Apo(a) levels relative to non-targeting
gRNA in primary human hepatocytes

| Targeting | | Deletion |
|---|---|---|
| sequence ID | % Apo(a) | Rate (Mean) |
| TG-48-193 | −69.60 | 0.07 |
| TG-48-223 | −64.04 | 0.07 |
| TG-48-239 | −63.83 | 0.22 |
| TG-48-284 | −52.99 | 0.20 |
| TG-48-171 | −50.80 | 0.25 |
| TG-48-169 | −50.60 | 0.38 |
| TG-48-351 | −48.88 | 0.40 |
| TG-48-151 | −46.89 | 0.03 |
| TG-48-358 | −45.83 | 0.10 |
| TG-48-360 | −45.73 | 0.10 |
| TG-48-229 | −44.73 | 0.00 |
| TG-48-087 | −44.62 | 0.10 |
| TG-48-141 | −43.92 | 0.21 |
| TG-48-178 | −42.74 | 0.13 |
| TG-48-107 | −40.99 | 0.30 |
| TG-48-299 | −40.83 | 0.09 |
| TG-48-088 | −40.06 | 0.17 |
| TG-48-127 | −39.30 | 0.04 |
| TG-48-142 | −39.04 | 0.12 |
| TG-48-336 | −38.54 | 0.44 |
| TG-48-009 | −37.70 | 0.42 |
| TG-48-056 | −37.37 | 0.22 |
| TG-48-245 | −35.97 | 0.19 |
| TG-48-317 | −31.65 | 0.15 |
| TG-48-235 | −31.23 | 0.15 |
| TG-48-179 | −30.14 | 0.04 |
| TG-48-196 | −28.93 | 0.06 |
| TG-48-305 | −28.67 | 0.27 |
| TG-48-300 | −27.91 | 0.08 |
| TG-48-288 | −27.16 | 0.18 |
| TG-48-145 | −27.14 | 0.13 |
| TG-48-104 | −26.98 | 0.31 |
| TG-48-083 | −22.55 | 0.20 |
| TG-48-109 | −22.26 | 0.23 |
| TG-48-303 | −21.77 | 0.11 |
| TG-48-324 | −21.61 | 0.11 |
| TG-48-102 | −21.37 | 0.19 |
| TG-48-197 | −19.46 | 0.21 |
| TG-48-236 | −19.40 | 0.04 |
| TG-48-375 | −18.17 | 0.01 |
| TG-48-318 | −17.96 | 0.23 |
| TG-48-071 | −17.82 | 0.08 |
| TG-48-222 | −17.68 | 0.44 |
| TG-48-124 | −17.38 | 0.02 |
| TG-48-312 | −17.28 | 0.09 |
| TG-48-285 | −17.07 | 0.14 |
| TG-48-035 | −17.01 | 0.00 |
| TG-48-280 | −16.73 | 0.34 |
| TG-48-361 | −16.21 | 0.10 |
| TG-48-199 | −15.25 | 0.11 |
| TG-48-252 | −15.15 | 0.03 |
| TG-48-283 | −14.79 | 0.13 |
| TG-48-114 | −14.37 | 0.04 |
| TG-48-112 | −12.97 | 0.07 |
| TG-48-352 | −11.91 | 0.11 |
| TG-48-155 | −11.54 | 0.03 |
| TG-48-136 | −11.27 | 0.03 |
| TG-48-111 | −10.58 | 0.20 |
| TG-48-015 | −10.06 | 0.55 |
| TG-48-286 | −9.36 | 0.17 |
| TG-48-302 | −9.31 | 0.03 |
| TG-48-017 | −8.68 | 0.50 |
| TG-48-159 | −7.55 | 0.03 |
| TG-48-119 | −7.40 | 0.00 |
| TG-48-359 | −5.40 | 0.09 |
| TG-48-143 | −5.25 | 0.10 |
| TG-48-342 | −4.84 | 0.30 |
| TG-48-144 | −4.05 | 0.03 |
| TG-48-341 | −4.00 | 0.49 |
| TG-48-126 | −3.29 | 0.10 |
| TG-48-033 | −2.70 | 0.04 |
| TG-48-346 | −2.13 | 0.18 |
| TG-48-291 | −1.90 | 0.13 |
| TG-48-298 | −1.40 | 0.25 |
| TG-48-007 | −0.30 | 0.27 |
| TG-48-213 | 0.48 | 0.04 |
| TG-48-005 | 0.52 | 0.28 |
| TG-48-306 | 2.37 | 0.15 |
| TG-48-016 | 2.89 | 0.51 |
| TG-48-254 | 3.11 | 0.06 |
| TG-48-267 | 3.44 | 0.14 |
| TG-48-201 | 3.51 | 0.04 |
| TG-48-100 | 3.54 | 0.01 |
| TG-48-290 | 3.92 | 0.19 |
| TG-48-080 | 5.04 | 0.04 |
| TG-48-097 | 7.94 | 0.23 |
| TG-48-182 | 9.22 | 0.04 |
| TG-48-195 | 10.96 | 0.02 |
| TG-48-250 | 11.49 | 0.14 |
| TG-48-139 | 12.28 | 0.15 |
| TG-48-162 | 12.38 | 0.00 |
| TG-48-103 | 13.38 | 0.04 |
| TG-48-113 | 13.58 | 0.30 |
| TG-48-292 | 14.49 | 0.13 |
| TG-48-118 | 14.87 | 0.00 |
| TG-48-129 | 15.33 | 0.05 |
| TG-48-308 | 16.64 | 0.06 |
| TG-48-343 | 18.22 | 0.50 |
| TG-48-294 | 18.83 | 0.21 |
| TG-48-255 | 19.53 | 0.06 |
| TG-48-008 | 21.55 | 0.19 |
| TG-48-154 | 21.70 | 0.07 |
| TG-48-337 | 24.99 | 0.00 |
| TG-48-163 | 25.84 | 0.04 |
| TG-48-115 | 26.45 | 0.04 |
| TG-48-293 | 27.17 | 0.35 |
| TG-48-059 | 27.55 | 0.10 |
| TG-48-032 | 28.34 | 0.11 |
| TG-48-260 | 31.49 | 0.06 |
| TG-48-368 | 33.06 | NA |
| TG-48-128 | 37.75 | 0.08 |
| TG-48-249 | 41.55 | 0.19 |
| TG-48-036 | 43.19 | 0.03 |
| TG-48-373 | 43.58 | 0.13 |
| TG-48-366 | 44.79 | NA |
| TG-48-078 | 46.22 | 0.00 |
| TG-48-256 | 46.40 | 0.07 |
| TG-48-092 | 47.31 | 0.25 |
| TG-48-098 | 52.34 | 0.07 |
| TG-48-037 | 52.56 | 0.22 |
| TG-48-039 | 52.91 | 0.33 |
| TG-48-362 | 57.62 | 0.04 |
| TG-48-344 | 59.46 | 0.12 |
| TG-48-006 | 59.83 | 0.14 |
| TG-48-264 | 63.13 | 0.02 |
| TG-48-014 | 64.08 | 0.13 |
| TG-48-052 | 64.10 | 0.43 |
| TG-48-262 | 64.24 | 0.00 |
| TG-48-261 | 64.54 | 0.01 |
| TG-48-038 | 66.49 | 0.26 |
| TG-48-138 | 75.17 | 0.02 |
| TG-48-029 | 75.22 | 0.17 |
| TG-48-281 | 77.11 | 0.37 |
| TG-48-031 | 79.35 | 0.05 |
| TG-48-137 | 85.10 | 0.01 |
| TG-48-061 | 89.25 | 0.31 |
| TG-48-040 | 92.16 | 0.01 |
| TG-48-066 | 98.11 | 0.12 |
| TG-48-064 | 121.58 | 0.03 |
| TG-48-018 | 188.77 | 0.23 |
| TG-48-265 | 198.86 | 0.19 |
| TG-48-069 | 207.22 | 0.09 |

TABLE 19
Top 60 LPA-targeting sequences

| Targeting sequence ID | SEQ ID NO. |
|---|---|
| TG-48-107 | 776 |
| TG-48-178 | 878 |
| TG-48-222 | 817 |
| TG-48-284 | 826 |
| TG-48-303 | 896 |
| TG-48-305 | 792 |
| TG-48-317 | 898 |
| TG-48-351 | 901 |
| TG-48-005 | 811 |
| TG-48-007 | 809 |
| TG-48-009 | 771 |
| TG-48-015 | 852 |
| TG-48-016 | 851 |
| TG-48-017 | 799 |
| TG-48-056 | 853 |
| TG-48-083 | 805 |
| TG-48-087 | 806 |
| TG-48-088 | 854 |
| TG-48-102 | 807 |
| TG-48-104 | 775 |
| TG-48-109 | 857 |
| TG-48-111 | 858 |
| TG-48-113 | 859 |
| TG-48-118 | 862 |
| TG-48-119 | 863 |
| TG-48-124 | 864 |
| TG-48-127 | 865 |
| TG-48-137 | 869 |
| TG-48-139 | 813 |
| TG-48-141 | 814 |
| TG-48-142 | 871 |
| TG-48-145 | 840 |
| TG-48-151 | 873 |
| TG-48-162 | 875 |
| TG-48-169 | 876 |
| TG-48-171 | 877 |
| TG-48-179 | 815 |
| TG-48-193 | 780 |
| TG-48-196 | 881 |
| TG-48-199 | 883 |
| TG-48-223 | 884 |
| TG-48-229 | 818 |
| TG-48-235 | 819 |
| TG-48-239 | 820 |
| TG-48-267 | 824 |
| TG-48-280 | 787 |
| TG-48-281 | 825 |
| TG-48-283 | 788 |
| TG-48-286 | 789 |
| TG-48-288 | 890 |
| TG-48-299 | 828 |
| TG-48-300 | 829 |
| TG-48-306 | 897 |
| TG-48-324 | 793 |
| TG-48-336 | 833 |
| TG-48-341 | 834 |
| TG-48-342 | 835 |
| TG-48-343 | 843 |
| TG-48-358 | 836 |
| TG-48-360 | 795 |

[0389] The results demonstrate that CasX 515 and an LPA-targeting gRNA were able to edit the LPA locus in primary human hepatocytes, thereby functionally reducing apo (a) secretion. The results of assays described herein were used to select LPA-targeting sequences that are highly effective for editing the LPA locus and achieving a marked decrease in secreted apo (a) levels.

### Example 5: Demonstration that Altering the UTR Sequences of the Engineered CasX mRNA can Affect CasX-Mediated Editing

[0390] 5′ and 3′ UTRs are essential and required for efficient translation of mRNA. Here, experiments were performed to demonstrate that altering the 5′ and 3′ UTR sequences of the engineered CasX mRNA affects CasX-mediated editing at a target locus when CasX mRNA and targeting gRNAs were delivered in vitro via transfection.

### Materials and Methods

In Vitro Transcription (IVT) of CasX mRNA:

[0391] CasX 676 mRNA was generated by IVT. Briefly, constructs encoding for a 5′UTR region, a codon-optimized CasX 676 with flanking c-MYC NLSes, and a 3′UTR region were cloned into a plasmid containing a T7 promoter and 80-nucleotide poly (A) tail. The resulting plasmid was linearized prior to use for IVT reactions, which were carried out with CleanCap® AG and NI-methyl-pseudouridine. For the 5′ cap, the CleanCap® AG contains a m7G (5′) ppp (5′) mAG structure, where “m7G” denotes N7-methylguanosine, “mA” denotes 2′O-methyladenosine, and (5′) ppp (5′) denotes a 5′ to 5′ triphosphate bridge. An extra guanine nucleotide was incorporated following the CleanCap® AG to enhance transcription initiation, resulting in the incorporation of m7G (5) ppp (5′) mAGG as the full 5′ cap structure. Meanwhile, the substitution of the uridine ribonucleoside to N1-methyl-pseudouridine improves mRNA performance and reduces mRNA immunogenicity.

[0392] IVT reactions were subsequently subjected to DNase digestion to remove template DNA and purification using an oligo-dT column. In this example, two mRNAs encoding CasX 676 with different pairs of 5′ and 3′ UTRs were generated for assessment in vitro. The encoding sequences of the two CasX mRNA configurations are detailed in Table 20. Full-length RNA sequences encoding the CasX mRNA with the chemical modifications are listed in Table 21.

TABLE 20
Encoding sequences of the two CasX mRNA molecules assessed in this
example*

| CasX | Component | | | SEQ ID |
|---|---|---|---|---|
| mRNA ID | (ID) | Description | DNA sequence | NO |
| CasX 676 | 5′UTR | Human | ACTCTTCTGGTCCCCACAGACTCAGAGAGAA | 19733 |
| mRNA #1 | | hemoglobin | CCCGCCACC | |
| | | alpha (HBA) | | |
| | START | | ATGGCCCCTGCTGCCAAGAGAGTGAAGCTGG | 19734 |
| | codon + c- | | ATAGCAGA | |
| | MYC NLS | | | |
| | CasX 676 | | CAGGAGATCAAGCGGATTAATAAAATTCGGA | 19735 |
| | | | GAAGACTGGTGAAGGATTCTAACACAAAGAA | |
| | | | GGCTGGCAAGACACGGGGCCCTATGAAGACA | |
| | | | CTGCTGGTGAGAGTGATGACACCCGACCTGA | |
| | | | GAGAAAGACTGGAAAACCTGAGAAAGAAGCC | |
| | | | TGAGAATATCCCCCAGCCCATCAGCAACACA | |
| | | | AGCCGGGCCAACCTGAATAAGCTGCTGACCG | |
| | | | ACTACACCGAAATGAAGAAGGCCATCCTGCA | |
| | | | CGTGTATTGGGAAGAGTTCCAGAAAGACCCA | |
| | | | GTCGGCCTGATGAGCAGAGTGGCTCAGCCTG | |
| | | | CCAGCAAGAAGATCGATCAGAACAAGCTGAA | |
| | | | GCCCGAAATGGACGAGAAGGGGAACCTGACA | |
| | | | ACCGCCGGCTTTGCCTGTAGCCAGTGCGGCC | |
| | | | AGCCCCTGTTTGTGTACAAACTGGAACAGGT | |
| | | | GAGCGAAAAGGGCAAGGCTTACACGAATTAC | |
| | | | TTCGGCAGATGCAACGTGGCCGAGCACGAGA | |
| | | | AGCTGATCAAGCTGGCCCAGCTGAAGCCTGA | |
| | | | GAAGGATAGCGATGAGGCAGTGACATATTCC | |
| | | | CTGGGCAAGTTCGGACAGCGGGCCCTGGATT | |
| | | | TTTATTCCATTCATGTGACCAAGGAATCCAC | |
| | | | CCACCCCGTCAAGCCTCTTGCCCAAATTGCC | |
| | | | GGCAACAGATACGCCTCCAGCCCCGTGGGCA | |
| | | | AGGCCCTGAGCGACGCCTGTATGGGCACCAT | |
| | | | CGCCAGCTTCCTGTCTAAGTACCAGGACATT | |
| | | | ATCATCGAGCACCAGAAGGTGGTGAAGGGCA | |
| | | | ACCAGAAGAGACTGGAGAGCCTGCGCGAGCT | |
| | | | GGCCGGCAAGGAAAACCTGGAGTATCCTAGC | |
| | | | GTGACCCTGCCTCCTCAGCCTCATACAAAGG | |
| | | | AGGGCGTGGATGCCTACAACGAAGTGATCGC | |
| | | | CCGGGTGCGGATGTGGGTGAACCTGAATCTG | |
| | | | TGGCAGAAGCTGAAGCTGTCTAGAGACGACG | |
| | | | CCAAGCCCCTGCTGAGACTGAAGGGCTTCCC | |
| | | | CAGCTTCCCTCTGGTGGAGAGACAGGCAAAT | |
| | | | GAAGTGGACTGGTGGGACATGGTGTGTAACG | |
| | | | TGAAGAAGCTGATCAATGAGAAGAAGGAGGA | |
| | | | CGGCAAAGTGTTCTGGCAGAATCTGGCCGGC | |
| | | | TACAAGCGTCAGGAGGCCCTGCGGCCCTACC | |
| | | | TGAGCAGCGAGGAAGACAGAAAGAAGGGCAA | |
| | | | GAAGTTCGCCCGGTATCAGCTGGGGGACCTG | |
| | | | CTGCTGCACCTCGAGAAGAAGCACGGCGAAG | |
| | | | ACTGGGGGAAGGTGTACGATGAGGCCTGGGA | |
| | | | GCGGATCGATAAGAAGGTGGAGGGCCTGAGC | |
| | | | AAGCACATCAAGCTGGAGGAGGAACGGAGAT | |
| | | | CTGAGGACGCCCAGAGCAAGGCCGCCCTGAC | |
| | | | CGACTGGCTGAGAGCCAAGGCCAGCTTCGTC | |
| | | | ATCGAGGGGCTGAAGGAGGCCGACAAGGACG | |
| | | | AGTTCTGCCGGTGCGAACTGAAGCTGCAGAA | |
| | | | GTGGTACGGAGATCTGAGAGGCAAACCTTTC | |
| | | | GCCATCGAGGCCGAGAACAGCATCCTGGACA | |
| | | | TCAGCGGCTTCAGCAAGCAGTACAACTGCGC | |
| | | | CTTTATTTGGCAGAAGGACGGAGTGAAGAAG | |
| | | | CTGAACCTGTACCTGATCATCAACTATTTCA | |
| | | | AGGGCGGCAAGCTGAGATTCAAGAAGATCAA | |
| | | | GCCTGAAGCCTTCGAGGCCAACAGATTCTAC | |
| | | | ACCGTGATTAACAAGAAAAGCGGAGAGATCG | |
| | | | TGCCAATGGAAGTGAACTTCAACTTCGACGA | |
| | | | CCCTAACCTGATCATCCTGCCCCTGGCATTT | |
| | | | GGCAAGCGGCAGGGCAGAGAGTTCATCTGGA | |
| | | | ACGACCTGCTGTCTCTGGAGACCGGCAGCCT | |
| | | | GAAGCTGGCCAACGGCAGAGTGATCGAGAAG | |
| | | | ACACTGTACAACAGACGAACCAGACAAGACG | |
| | | | AGCCCGCCCTGTTTGTGGCCCTGACCTTCGA | |
| | | | GAGAAGAGAGGTGCTGGACAGCAGCAATATC | |
| | | | AAGCCTATGAACCTGATCGGCGTGGACCGGG | |
| | | | GCGAGAACATCCCTGCCGTGATCGCCCTTAC | |
| | | | CGACCCCGAGGGATGCCCTCTGAGCCGGTTT | |
| | | | AAAGACAGCCTGGGCAACCCTACCCACATCC | |
| | | | TGAGAATTGGCGAGTCCTACAAGGAGAAGCA | |
| | | | GAGAACCATCCAGGCCAAGAAGGAGGTGGAG | |
| | | | CAGCGGCGGGCTGGCGGCTACTCCCGGAAGT | |
| | | | ACGCCAGCAAGGCCAAGAACCTGGCCGACGA | |
| | | | CATGGTTAGAAATACCGCCAGAGACCTCCTG | |
| | | | TACTACGCTGTGACCCAGGACGCCATGCTGA | |
| | | | TCTTCGAGAACCTGAGCAGAGGCTTCGGCAG | |
| | | | ACAGGGCAAGAGAACCTTCATGGCCGAGAGA | |
| | | | CAGTACACCCGGATGGAGGACTGGCTGACCG | |
| | | | CCAAGCTGGCCTACGAGGGCCTGCCCTCTAA | |
| | | | GACCTACCTGTCCAAGACCTTGGCACAGTAC | |
| | | | ACCAGCAAGACATGCTCTAACTGCGGCTTCA | |
| | | | CAATCACGAGCGCCGACTACGACCGGGTGCT | |
| | | | GGAGAAACTGAAGAAGACCGCCACAGGCTGG | |
| | | | ATGACCACCATTAACGGCAAGGAGCTGAAGG | |
| | | | TGGAGGGCCAGATCACCTACTACAACAGGTA | |
| | | | CAAACGGCAGAACGTGGTGAAGGACCTGAGC | |
| | | | GTGGAACTGGATAGACTGAGCGAGGAAAGCG | |
| | | | TAAACAATGACATCAGCAGCTGGACCAAGGG | |
| | | | CCGGAGCGGCGAGGCCCTGAGCCTGCTGAAG | |
| | | | AAGAGATTCTCCCACAGACCAGTGCAGGAGA | |
| | | | AGTTCGTGTGTCTGAACTGCGGCTTCGAGAC | |
| | | | CCACGCCGACGAGCAAGCCGCCCTGAACATC | |
| | | | GCCCGGTCTTGGCTTTTCCTGCGGAGCCAGG | |
| | | | AGTACAAGAAGTACCAGACAAACAAGACCAC | |
| | | | AGGCAACACAGACAAGAGAGCCTTCGTCGAG | |
| | | | ACCTGGCAGAGCTTCTACAGAAAGAAGCTGA | |
| | | | AGGAGGTGTGGAAGCCTGCCGTG | |
| | c-MYC NLS + | | GGAAGCCCCGCTGCCAAGAGAGTGAAGCTGG | 19736 |
| | STOP | | ACTAATAGATAA | |
| | codons | | | |
| | 3′UTR | Human HBA | GCTGGAGCCTCGGTGGCCATGCTTCTTGCCC | 19737 |
| | | | CTTGGGCCTCCCCCCAGCCCCTCCTCCCCTT | |
| | | | CCTGCACCCGTACCCCCGTGGTCTTTGAATA | |
| | | | AAGTCTGAGTGGGCGGCA | |
| | Poly(A) tail | | AAAAAAAAAAAAAAAAAAAAAAAAAAAAAAA | 19738 |
| | | | AAAAAAAAAAAAAAAAAAAAAAAAAAAAAAA | |
| | | | AAAAAAAAAAAAAAAAAA | |
| CasX 676 | 5′UTR + | Synthetic | AAATAAGAGAGAAAAGAAGAGTAAGAAGAAA | 19739 |
| mRNA #2 | Kozak | | TATAAGAGCCACC | |
| | sequence | | | |
| | (underlined) | | | |
| | START | | ATGGCCCCTGCTGCCAAGAGAGTGAAGCTGG | 19734 |
| | codon + c- | | ATAGCAGA | |
| | MYC NLS | | | |
| | CasX 676 | | CAGGAGATCAAGCGGATTAATAAAATTCGGA | 19735 |
| | | | GAAGACTGGTGAAGGATTCTAACACAAAGAA | |
| | | | GGCTGGCAAGACACGGGGCCCTATGAAGACA | |
| | | | CTGCTGGTGAGAGTGATGACACCCGACCTGA | |
| | | | GAGAAAGACTGGAAAACCTGAGAAAGAAGCC | |
| | | | TGAGAATATCCCCCAGCCCATCAGCAACACA | |
| | | | AGCCGGGCCAACCTGAATAAGCTGCTGACCG | |
| | | | ACTACACCGAAATGAAGAAGGCCATCCTGCA | |
| | | | CGTGTATTGGGAAGAGTTCCAGAAAGACCCA | |
| | | | GTCGGCCTGATGAGCAGAGTGGCTCAGCCTG | |
| | | | CCAGCAAGAAGATCGATCAGAACAAGCTGAA | |
| | | | GCCCGAAATGGACGAGAAGGGGAACCTGACA | |
| | | | ACCGCCGGCTTTGCCTGTAGCCAGTGCGGCC | |
| | | | AGCCCCTGTTTGTGTACAAACTGGAACAGGT | |
| | | | GAGCGAAAAGGGCAAGGCTTACACGAATTAC | |
| | | | TTCGGCAGATGCAACGTGGCCGAGCACGAGA | |
| | | | AGCTGATCAAGCTGGCCCAGCTGAAGCCTGA | |
| | | | GAAGGATAGCGATGAGGCAGTGACATATTCC | |
| | | | CTGGGCAAGTTCGGACAGCGGGCCCTGGATT | |
| | | | TTTATTCCATTCATGTGACCAAGGAATCCAC | |
| | | | CCACCCCGTCAAGCCTCTTGCCCAAATTGCC | |
| | | | GGCAACAGATACGCCTCCAGCCCCGTGGGCA | |
| | | | AGGCCCTGAGCGACGCCTGTATGGGCACCAT | |
| | | | CGCCAGCTTCCTGTCTAAGTACCAGGACATT | |
| | | | ATCATCGAGCACCAGAAGGTGGTGAAGGGCA | |
| | | | ACCAGAAGAGACTGGAGAGCCTGCGCGAGCT | |
| | | | GGCCGGCAAGGAAAACCTGGAGTATCCTAGC | |
| | | | GTGACCCTGCCTCCTCAGCCTCATACAAAGG | |
| | | | AGGGCGTGGATGCCTACAACGAAGTGATCGC | |
| | | | CCGGGTGCGGATGTGGGTGAACCTGAATCTG | |
| | | | TGGCAGAAGCTGAAGCTGTCTAGAGACGACG | |
| | | | CCAAGCCCCTGCTGAGACTGAAGGGCTTCCC | |
| | | | CAGCTTCCCTCTGGTGGAGAGACAGGCAAAT | |
| | | | GAAGTGGACTGGTGGGACATGGTGTGTAACG | |
| | | | TGAAGAAGCTGATCAATGAGAAGAAGGAGGA | |
| | | | CGGCAAAGTGTTCTGGCAGAATCTGGCCGGC | |
| | | | TACAAGCGTCAGGAGGCCCTGCGGCCCTACC | |
| | | | TGAGCAGCGAGGAAGACAGAAAGAAGGGCAA | |
| | | | GAAGTTCGCCCGGTATCAGCTGGGGGACCTG | |
| | | | CTGCTGCACCTCGAGAAGAAGCACGGCGAAG | |
| | | | ACTGGGGGAAGGTGTACGATGAGGCCTGGGA | |
| | | | GCGGATCGATAAGAAGGTGGAGGGCCTGAGC | |
| | | | AAGCACATCAAGCTGGAGGAGGAACGGAGAT | |
| | | | CTGAGGACGCCCAGAGCAAGGCCGCCCTGAC | |
| | | | CGACTGGCTGAGAGCCAAGGCCAGCTTCGTC | |
| | | | ATCGAGGGGCTGAAGGAGGCCGACAAGGACG | |
| | | | AGTTCTGCCGGTGCGAACTGAAGCTGCAGAA | |
| | | | GTGGTACGGAGATCTGAGAGGCAAACCTTTC | |
| | | | GCCATCGAGGCCGAGAACAGCATCCTGGACA | |
| | | | TCAGCGGCTTCAGCAAGCAGTACAACTGCGC | |
| | | | CTTTATTTGGCAGAAGGACGGAGTGAAGAAG | |
| | | | CTGAACCTGTACCTGATCATCAACTATTTCA | |
| | | | AGGGCGGCAAGCTGAGATTCAAGAAGATCAA | |
| | | | GCCTGAAGCCTTCGAGGCCAACAGATTCTAC | |
| | | | ACCGTGATTAACAAGAAAAGCGGAGAGATCG | |
| | | | TGCCAATGGAAGTGAACTTCAACTTCGACGA | |
| | | | CCCTAACCTGATCATCCTGCCCCTGGCATTT | |
| | | | GGCAAGCGGCAGGGCAGAGAGTTCATCTGGA | |
| | | | ACGACCTGCTGTCTCTGGAGACCGGCAGCCT | |
| | | | GAAGCTGGCCAACGGCAGAGTGATCGAGAAG | |
| | | | ACACTGTACAACAGACGAACCAGACAAGACG | |
| | | | AGCCCGCCCTGTTTGTGGCCCTGACCTTCGA | |
| | | | GAGAAGAGAGGTGCTGGACAGCAGCAATATC | |
| | | | AAGCCTATGAACCTGATCGGCGTGGACCGGG | |
| | | | GCGAGAACATCCCTGCCGTGATCGCCCTTAC | |
| | | | CGACCCCGAGGGATGCCCTCTGAGCCGGTTT | |
| | | | AAAGACAGCCTGGGCAACCCTACCCACATCC | |
| | | | TGAGAATTGGCGAGTCCTACAAGGAGAAGCA | |
| | | | GAGAACCATCCAGGCCAAGAAGGAGGTGGAG | |
| | | | CAGCGGCGGGCTGGCGGCTACTCCCGGAAGT | |
| | | | ACGCCAGCAAGGCCAAGAACCTGGCCGACGA | |
| | | | CATGGTTAGAAATACCGCCAGAGACCTCCTG | |
| | | | TACTACGCTGTGACCCAGGACGCCATGCTGA | |
| | | | TCTTCGAGAACCTGAGCAGAGGCTTCGGCAG | |
| | | | ACAGGGCAAGAGAACCTTCATGGCCGAGAGA | |
| | | | CAGTACACCCGGATGGAGGACTGGCTGACCG | |
| | | | CCAAGCTGGCCTACGAGGGCCTGCCCTCTAA | |
| | | | GACCTACCTGTCCAAGACCTTGGCACAGTAC | |
| | | | ACCAGCAAGACATGCTCTAACTGCGGCTTCA | |
| | | | CAATCACGAGCGCCGACTACGACCGGGTGCT | |
| | | | GGAGAAACTGAAGAAGACCGCCACAGGCTGG | |
| | | | ATGACCACCATTAACGGCAAGGAGCTGAAGG | |
| | | | TGGAGGGCCAGATCACCTACTACAACAGGTA | |
| | | | CAAACGGCAGAACGTGGTGAAGGACCTGAGC | |
| | | | GTGGAACTGGATAGACTGAGCGAGGAAAGCG | |
| | | | TAAACAATGACATCAGCAGCTGGACCAAGGG | |
| | | | CCGGAGCGGCGAGGCCCTGAGCCTGCTGAAG | |
| | | | AAGAGATTCTCCCACAGACCAGTGCAGGAGA | |
| | | | AGTTCGTGTGTCTGAACTGCGGCTTCGAGAC | |
| | | | CCACGCCGACGAGCAAGCCGCCCTGAACATC | |
| | | | GCCCGGTCTTGGCTTTTCCTGCGGAGCCAGG | |
| | | | AGTACAAGAAGTACCAGACAAACAAGACCAC | |
| | | | AGGCAACACAGACAAGAGAGCCTTCGTCGAG | |
| | | | ACCTGGCAGAGCTTCTACAGAAAGAAGCTGA | |
| | | | AGGAGGTGTGGAAGCCTGCCGTG | |
| | c-MYC NLS + | | GGAAGCCCCGCTGCCAAGAGAGTGAAGCTGG | 19736 |
| | STOP | | ACTAATAGATAA | |
| | codons | | | |
| | 3′UTR | Mouse HBA | GCTGCCTTCTGCGGGGCTTGCCTTCTGGCCA | 19740 |
| | | | TGCCCTTCTTCTCTCCCTTGCACCTGTACCT | |
| | | | CTTGGTCTTTGAATAAAGCCTGAGTAGGAAG | |
| | XbaI | | TCTAG | 19741 |
| | restriction | | | |
| | site (partial) | | | |
| | Poly(A) tail | | AAAAAAAAAAAAAAAAAAAAAAAAAAAAAAA | 19738 |
| | | | AAAAAAAAAAAAAAAAAAAAAAAAAAAAAAA | |
| | | | AAAAAAAAAAAAAAAAAA | |

*Components are listed in a 5′ to 3′ order within the constructs

TABLE 21
Full-length RNA sequences of CasX mRNA molecules assessed in this
example. The 5′ cap (m7G(5′)ppp(5′)mAG), discussed in the example herein, is not
shown in the table. Modification ‘mψ’ = N1-methyl-pseudouridine

| CasX | | SEQ ID |
|---|---|---|
| mRNA | RNA sequence | NO |
| CasX 676 | ACmψCmψmψCmψGGmψCCCCACAGACmψCAGAGAGAACCCGCCACCAmψGGCCCC | 19742 |
| mRNA #1 | mψGCmψGCCAAGAGAGmψGAAGCmψGGAmψAGCAGACAGGAGAmψCAAGCGGAmψ | |
| | mψAAmψAAAAmψmψCGGAGAAGACmψGGmψGAAGGAmψmψCmψAACACAAAGAAG | |
| | GCmψGGCAAGACACGGGGCCCmψAmψGAAGACACmψGCmψGGmψGAGAGmψGAmψ | |
| | GACACCCGACCmψGAGAGAAAGACmψGGAAAACCmψGAGAAAGAAGCCmψGAGAA | |
| | mψAmψCCCCCAGCCCAmψCAGCAACACAAGCCGGGCCAACCmψGAAmψAAGCmψG | |
| | CmψGACCGACmψACACCGAAAmψGAAGAAGGCCAmψCCmψGCACGmψGmψAmψmψ | |
| | GGGAAGAGmψmψCCAGAAAGACCCAGmψCGGCCmψGAmψGAGCAGAGmψGGCmψC | |
| | AGCCmψGCCAGCAAGAAGAmψCGAmψCAGAACAAGCmψGAAGCCCGAAAmψGGAC | |
| | GAGAAGGGGAACCmψGACAACCGCCGGCmψmψmψGCCmψGmψAGCCAGmψGCGGC | |
| | CAGCCCCmψGmψmψmψGmψGmψACAAACmψGGAACAGGmψGAGCGAAAAGGGCAA | |
| | GGCmψmψACACGAAmψmψACmψmψCGGCAGAmψGCAACGmψGGCCGAGCACGAGA | |
| | AGCmψGAmψCAAGCmψGGCCCAGCmψGAAGCCmψGAGAAGGAmψAGCGAmψGAGG | |
| | CAGmψGACAmψAmψmψCCCmψGGGCAAGmψmψCGGACAGCGGGCCCmψGGAmψmψ | |
| | mψmψmψAmψmψCCAmψmψCAmψGmψGACCAAGGAAmψCCACCCACCCCGmψCAAG | |
| | CCmψCmψmψGCCCAAAmψmψGCCGGCAACAGAmψACGCCmψCCAGCCCCGmψGGG | |
| | CAAGGCCCmψGAGCGACGCCmψGmψAmψGGGCACCAmψCGCCAGCmψmψCCmψGm | |
| | ψCmψAAGmψACCAGGACAmψmψAmψCAmψCGAGCACCAGAAGGmψGGmψGAAGGG | |
| | CAACCAGAAGAGACmψGGAGAGCCmψGCGCGAGCmψGGCCGGCAAGGAAAACCmψ | |
| | GGAGmψAmψCCmψAGCGmψGACCCmψGCCmψCCmψCAGCCmψCAmψACAAAGGAG | |
| | GGCGmψGGAmψGCCmψACAACGAAGmψGAmψCGCCCGGGmψGCGGAmψGmψGGGm | |
| | ψGAACCmψGAAmψCmψGmψGGCAGAAGCmψGAAGCmψGmψCmψAGAGACGACGCC | |
| | AAGCCCCmψGCmψGAGACmψGAAGGGCmψmψCCCCAGCmψmψCCCmψCmψGGmψG | |
| | GAGAGACAGGCAAAmψGAAGmψGGACmψGGmψGGGACAmψGGmψGmψGmψAACGm | |
| | ψGAAGAAGCmψGAmψCAAmψGAGAAGAAGGAGGACGGCAAAGmψGmψmψCmψGGC | |
| | AGAAmψCmψGGCCGGCmψACAAGCGmψCAGGAGGCCCmψGCGGCCCmψACCmψGA | |
| | GCAGCGAGGAAGACAGAAAGAAGGGCAAGAAGmψmψCGCCCGGmψAmψCAGCmψG | |
| | GGGGACCmψGCmψGCmψGCACCmψCGAGAAGAAGCACGGCGAAGACmψGGGGGAA | |
| | GGmψGmψACGAmψGAGGCCmψGGGAGCGGAmψCGAmψAAGAAGGmψGGAGGGCCm | |
| | ψGAGCAAGCACAmψCAAGCmψGGAGGAGGAACGGAGAmψCmψGAGGACGCCCAGA | |
| | GCAAGGCCGCCCmψGACCGACmψGGCmψGAGAGCCAAGGCCAGCmψmψCGmψCAm | |
| | ψCGAGGGGCmψGAAGGAGGCCGACAAGGACGAGmψmψCmψGCCGGmψGCGAACmψ | |
| | GAAGCmψGCAGAAGmψGGmψACGGAGAmψCmψGAGAGGCAAACCmψmψmψCGCCA | |
| | mψCGAGGCCGAGAACAGCAmψCCmψGGACAmψCAGCGGCmψmψCAGCAAGCAGmψ | |
| | ACAACmψGCGCCmψmψmψAmψmψmψGGCAGAAGGACGGAGmψGAAGAAGCmψGAA | |
| | CCmψGmψACCmψGAmψCAmψCAACmψAmψmψmψCAAGGGCGGCAAGCmψGAGAmψ | |
| | mψCAAGAAGAmψCAAGCCmψGAAGCCmψmψCGAGGCCAACAGAmψmψCmψACACC | |
| | GmψGAmψmψAACAAGAAAAGCGGAGAGAmψCGmψGCCAAmψGGAAGmψGAACmψm | |
| | ψCAACmψmψCGACGACCCmψAACCmψGAmψCAmψCCmψGCCCCmψGGCAmψmψmψ | |
| | GGCAAGCGGCAGGGCAGAGAGmψmψCAmψCmψGGAACGACCmψGCmψGmψCmψCm | |
| | ψGGAGACCGGCAGCCmψGAAGCmψGGCCAACGGCAGAGmψGAmψCGAGAAGACAC | |
| | mψGmψACAACAGACGAACCAGACAAGACGAGCCCGCCCmψGmψmψmψGmψGGCCC | |
| | mψGACCmψmψCGAGAGAAGAGAGGmψGCmψGGACAGCAGCAAmψAmψCAAGCCmψ | |
| | AmψGAACCmψGAmψCGGCGmψGGACCGGGGCGAGAACAmψCCCmψGCCGmψGAmψ | |
| | CGCCCmψmψACCGACCCCGAGGGAmψGCCCmψCmψGAGCCGGmψmψmψAAAGACA | |
| | GCCmψGGGCAACCCmψACCCACAmψCCmψGAGAAmψmψGGCGAGmψCCmψACAAG | |
| | GAGAAGCAGAGAACCAmψCCAGGCCAAGAAGGAGGmψGGAGCAGCGGCGGGCmψG | |
| | GCGGCmψACmψCCCGGAAGmψACGCCAGCAAGGCCAAGAACCmψGGCCGACGACA | |
| | mψGGmψmψAGAAAmψACCGCCAGAGACCmψCCmψGmψACmψACGCmψGmψGACCC | |
| | AGGACGCCAmψGCmψGAmψCmψmψCGAGAACCmyGAGCAGAGGCmψmψCGGCAGA | |
| | CAGGGCAAGAGAACCmψmψCAmψGGCCGAGAGACAGmψACACCCGGAmψGGAGGA | |
| | CmψGGCmψGACCGCCAAGCmψGGCCmψACGAGGGCCmψGCCCmψCmψAAGACCmψ | |
| | ACCmψGmψCCAAGACCmψmψGGCACAGmψACACCAGCAAGACAmψGCmψCmψAAC | |
| | mψGCGGCmψmψCACAAmψCACGAGCGCCGACmψACGACCGGGmψGCmψGGAGAAA | |
| | CmψGAAGAAGACCGCCACAGGCmψGGAmψGACCACCAmψmψAACGGCAAGGAGCm | |
| | ψGAAGGmψGGAGGGCCAGAmψCACCmψACmψACAACAGGmψACAAACGGCAGAAC | |
| | GmψGGmψGAAGGACCmψGAGCGmψGGAACmψGGAmψAGACmψGAGCGAGGAAAGC | |
| | GmψAAACAAmψGACAmψCAGCAGCmψGGACCAAGGGCCGGAGCGGCGAGGCCCmψ | |
| | GAGCCmψGCmψGAAGAAGAGAmψmψCmψCCCACAGACCAGmψGCAGGAGAAGmψm | |
| | ψCGmψGmψGmψCmψGAACmψGCGGCmψmψCGAGACCCACGCCGACGAGCAAGCCG | |
| | CCCmψGAACAmψCGCCCGGmψCmψmψGGCmψmψmψmψCCmψGCGGAGCCAGGAGm | |
| | ψACAAGAAGmψACCAGACAAACAAGACCACAGGCAACACAGACAAGAGAGCCmψm | |
| | ψCGmψCGAGACCmψGGCAGAGCmψmψCmψACAGAAAGAAGCmψGAAGGAGGmψGm | |
| | ψGGAAGCCmψGCCGmψGGGAAGCCCCGCmψGCCAAGAGAGmψGAAGCmψGGACmψ | |
| | AAmψAGAmψAAGCmψGGAGCCmψCGGmψGGCCAmψGCmψmψCmψmψGCCCCmψmψ | |
| | GGGCCmψCCCCCCAGCCCCmψCCmψCCCCmψmψCCmψGCACCCGmψACCCCCGmψ | |
| | GGmψCmψmψmψGAAmψAAAGmψCmψGAGmψGGGCGGCAAAAAAAAAAAAAAAAAA | |
| | AAAAAAAAAAAAAAAAAAAAAAAAAAAAAAAAAAAAAAAAAAAAAAAAAAAAAAA | |
| | AAAAAAA | |
| CasX 676 | AAAmψAAGAGAGAAAAGAAGAGmψAAGAAGAAAmψAmψAAGAGCCACCAmψGGCC | 19743 |
| mRNA #2 | CCmψGCmψGCCAAGAGAGmψGAAGCmψGGAmψAGCAGACAGGAGAmψCAAGCGGA | |
| | mψmψAAmψAAAAmψmψCGGAGAAGACmψGGmψGAAGGAmψmψCmψAACACAAAGA | |
| | AGGCmψGGCAAGACACGGGGCCCmψAmψGAAGACACmψGCmψGGmψGAGAGmψGA | |
| | mψGACACCCGACCmψGAGAGAAAGACmψGGAAAACCmψGAGAAAGAAGCCmψGAG | |
| | AAmψAmψCCCCCAGCCCAmψCAGCAACACAAGCCGGGCCAACCmψGAAmψAAGCm | |
| | ψGCmψGACCGACmψACACCGAAAmψGAAGAAGGCCAmψCCmψGCACGmψGmψAmψ | |
| | mψGGGAAGAGmψmψCCAGAAAGACCCAGmψCGGCCmψGAmψGAGCAGAGmψGGCm | |
| | ψCAGCCmψGCCAGCAAGAAGAmψCGAmψCAGAACAAGCmψGAAGCCCGAAAmψGG | |
| | ACGAGAAGGGGAACCmψGACAACCGCCGGCmψmψmψGCCmψGmψAGCCAGmψGCG | |
| | GCCAGCCCCmψGmψmψmψGmψGmψACAAACmψGGAACAGGmψGAGCGAAAAGGGC | |
| | AAGGCmψmψACACGAAmψmψACmψmψCGGCAGAmψGCAACGmψGGCCGAGCACGA | |
| | GAAGCmψGAmψCAAGCmψGGCCCAGCmψGAAGCCmψGAGAAGGAmψAGCGAmψGA | |
| | GGCAGmψGACAmψAmψmψCCCmψGGGCAAGmψmψCGGACAGCGGGCCCmψGGAmψ | |
| | mψmψmψmψAmψmψCCAmψmψCAmψGmψGACCAAGGAAmψCCACCCACCCCGmψCA | |
| | AGCCmψCmψmψGCCCAAAmψmψGCCGGCAACAGAmψACGCCmψCCAGCCCCGmψG | |
| | GGCAAGGCCCmψGAGCGACGCCmψGmψAmψGGGCACCAmψCGCCAGCmψmψCCmψ | |
| | GmψCmψAAGmψACCAGGACAmψmψAmψCAmψCGAGCACCAGAAGGmψGGmψGAAG | |
| | GGCAACCAGAAGAGACmψGGAGAGCCmψGCGCGAGCmψGGCCGGCAAGGAAAACC | |
| | mψGGAGmψAmψCCmψAGCGmψGACCCmψGCCmψCCmψCAGCCmψCAmψACAAAGG | |
| | AGGGCGmψGGAmwGCCmψACAACGAAGmψGAmψCGCCCGGGmψGCGGAmψGmψGG | |
| | GmψGAACCmψGAAmψCmψGmψGGCAGAAGCmψGAAGCmψGmψCmψAGAGACGACG | |
| | CCAAGCCCCmψGCmψGAGACmψGAAGGGCmψmψCCCCAGCmψmψCCCmψCmψGGm | |
| | ψGGAGAGACAGGCAAAmψGAAGmyGGACmψGGmψGGGACAmψGGmψGmψGmψAAC | |
| | GmψGAAGAAGCmψGAmψCAAmψGAGAAGAAGGAGGACGGCAAAGmψGmψmψCmψG | |
| | GCAGAAmψCmψGGCCGGCmψACAAGCGmψCAGGAGGCCCmψGCGGCCCmψACCmψ | |
| | GAGCAGCGAGGAAGACAGAAAGAAGGGCAAGAAGmψmψCGCCCGGmψAmψCAGCm | |
| | ψGGGGGACCmψGCmψGCmψGCACCmψCGAGAAGAAGCACGGCGAAGACmψGGGGG | |
| | AAGGmψGmψACGAmψGAGGCCmψGGGAGCGGAmψCGAmψAAGAAGGmψGGAGGGC | |
| | CmψGAGCAAGCACAmψCAAGCmψGGAGGAGGAACGGAGAmψCmψGAGGACGCCCA | |
| | GAGCAAGGCCGCCCmψGACCGACmψGGCmψGAGAGCCAAGGCCAGCmψmψCGmψC | |
| | AmψCGAGGGGCmψGAAGGAGGCCGACAAGGACGAGmψmψCmψGCCGGmψGCGAAC | |
| | mψGAAGCmψGCAGAAGmψGGmψACGGAGAmψCmψGAGAGGCAAACCmψmψmψCGC | |
| | CAmψCGAGGCCGAGAACAGCAmψCCmψGGACAmψCAGCGGCmψmψCAGCAAGCAG | |
| | mψACAACmψGCGCCmψmψmψAmψmψmψGGCAGAAGGACGGAGmψGAAGAAGCmψG | |
| | AACCmψGmψACCmψGAmψCAmψCAACmψAmψmψmψCAAGGGCGGCAAGCmψGAGA | |
| | mψmψCAAGAAGAmψCAAGCCmψGAAGCCmψmψCGAGGCCAACAGAmψmψCmψACA | |
| | CCGmψGAmψmψAACAAGAAAAGCGGAGAGAmψCGmψGCCAAmψGGAAGmψGAACm | |
| | ψmψCAACmψmψCGACGACCCmψAACCmψGAmψCAmψCCmψGCCCCmψGGCAmψmψ | |
| | mψGGCAAGCGGCAGGGCAGAGAGmψmψCAmψCmψGGAACGACCmψGCmψGmψCmψ | |
| | CmψGGAGACCGGCAGCCmψGAAGCmψGGCCAACGGCAGAGmψGAmψCGAGAAGAC | |
| | ACmψGmψACAACAGACGAACCAGACAAGACGAGCCCGCCCmψGmψmψmψGmψGGC | |
| | CCmψGACCmψmψCGAGAGAAGAGAGGmψGCmψGGACAGCAGCAAmψAmψCAAGCC | |
| | mψAmψGAACCmψGAmψCGGCGmψGGACCGGGGCGAGAACAmψCCCmψGCCGmψGA | |
| | mψCGCCCmψmψACCGACCCCGAGGGAmψGCCCmψCmψGAGCCGGmψmψmψAAAGA | |
| | CAGCCmψGGGCAACCCmψACCCACAmψCCmψGAGAAmψmψGGCGAGmψCCmψACA | |
| | AGGAGAAGCAGAGAACCAmψCCAGGCCAAGAAGGAGGmψGGAGCAGCGGCGGGCm | |
| | ψGGCGGCmψACmψCCCGGAAGmψACGCCAGCAAGGCCAAGAACCmψGGCCGACGA | |
| | CAmψGGmψmψAGAAAmψACCGCCAGAGACCmψCCmψGmψACmψACGCmψGmψGAC | |
| | CCAGGACGCCAmψGCmψGAmψCmψmψCGAGAACCmψGAGCAGAGGCmψmψCGGCA | |
| | GACAGGGCAAGAGAACCmψmψCAmψGGCCGAGAGACAGmψACACCCGGAmψGGAG | |
| | GACmψGGCmψGACCGCCAAGCmψGGCCmψACGAGGGCCmψGCCCmψCmψAAGACC | |
| | mψACCmψGmψCCAAGACCmψmψGGCACAGmψACACCAGCAAGACAmψGCmψCmψA | |
| | ACmψGCGGCmψmψCACAAmψCACGAGCGCCGACmψACGACCGGGmψGCmψGGAGA | |
| | AACmψGAAGAAGACCGCCACAGGCmψGGAmψGACCACCAmψmψAACGGCAAGGAG | |
| | CmψGAAGGmψGGAGGGCCAGAmψCACCmψACmψACAACAGGmψACAAACGGCAGA | |
| | ACGmψGGmwGAAGGACCmψGAGCGmψGGAACmψGGAmψAGACmψGAGCGAGGAAA | |
| | GCGmψAAACAAmψGACAmψCAGCAGCmψGGACCAAGGGCCGGAGCGGCGAGGCCC | |
| | mψGAGCCmψGCmψGAAGAAGAGAmψmψCmψCCCACAGACCAGmψGCAGGAGAAGm | |
| | ψmψCGmψGmψGmψCmψGAACmψGCGGCmψmψCGAGACCCACGCCGACGAGCAAGC | |
| | CGCCCmψGAACAmψCGCCCGGmψCmψmψGGCmψmψmψmψCCmψGCGGAGCCAGGA | |
| | GmψACAAGAAGmψACCAGACAAACAAGACCACAGGCAACACAGACAAGAGAGCCm | |
| | ψmψCGmψCGAGACCmψGGCAGAGCmψmψCmψACAGAAAGAAGCmψGAAGGAGGmψ | |
| | GmψGGAAGCCmψGCCGmψGGGAAGCCCCGCmψGCCAAGAGAGmψGAAGCmψGGAC | |
| | mψGAAmψAAAGCCmψGAGmyAGGAAGmψCmψAGAAAAAAAAAAAAAAAAAAAAAA | |
| | GCCCmψmψCmψmψCmψCmψCCCmψmψGCACCmψGmψACCmψCmψmψGGmψCmψmψ | |
| | mψGAAmψAAAGCCmψGAGmψAGGAAGmψCmψAGAAAAAAAAAAAAAAAAAAAAAA | |
| | AAAAAAAAAAAAAAAAAAAAAAAAAAAAAAAAAAAAAAAAAAAAAAAAAAAAAAA | |
| | AAA | |

Synthesis of gRNAs:

[0393] In this example, gRNAs targeting the mouse PCSK9 locus were designed using gRNA scaffold 174 with a v1 modification profile (see Example 5) and chemically synthesized. The sequences of the PCSK9-targeting spacers are listed in Table 22.

TABLE 22
Sequences of spacers targeting the mouse PCSK9 locus assayed in
this example

| Spacer ID | Target | RNA sequence | SEQ ID NO |
|---|---|---|---|
| 27.103 | mouse PCSK9 | UAAUCUCCAUCCUCGUCCUG | 19744 |
| 27.105 | mouse PCSK9 | CCAAGAAGCCAGGGAAGAGG | 19745 |
| 27.106 | mouse PCSK9 | ACAUAUCUUUUAUGACCUCU | 19746 |
| 27.107 | mouse PCSK9 | CUGGCUUCUUGGUGAAGAUG | 19747 |
| 27.108 | mouse PCSK9 | UGGUGAAGAUGAGCAGUGAC | 19748 |
| 27.116 | mouse PCSK9 | GCCGUUGCUCCAAGGUAUGG | 19749 |
| 27.117 | mouse PCSK9 | UUCUUGGGGAUCAGGAGGCC | 19750 |

Transfection of CasX mRNA and gRNA into Mouse Hepal-6 Cells In Vitro:

[0394] Editing at the mouse PCSK9 locus was assessed by delivering in vitro transcribed CasX mRNA (CasX mRNA #1 or CasX mRNA #2; see Table 20) and synthesized gRNAs targeting PCSK9 into Hepal-6 cells via transfection. Briefly, each well of 20,000 Hepal-6 cells were lipofected with in vitro transcribed mRNA coding for CasX 676 and a PCSK9-targeting gRNA. After a media change, transfected cells were harvested at 20 hours post-transfection for editing assessment at the PCSK9 locus by next-generation sequencing (NGS). As experimental controls, individual transfections of CasX mRNA #1 and CasX mRNA #2 without gRNAs were performed.

### NGS Processing and Analysis:

[0395] Genomic DNA (gDNA) from harvested cells were extracted using the Zymo Quick-DNA Miniprep Plus kit following the manufacturer's instructions. Target amplicons were formed by amplifying regions of interest from 50-100 ng of extracted gDNA with a set of primers targeting the human PCSK9 locus. These gene-specific primers contained an additional sequence at the 5′ ends to introduce Illumina reads 1 and 2 sequences. Further, they contained a 16-nucleotide random sequence that functioned as a unique molecular identifier (UMI). The quality and quantification of the amplicon was assessed using a Fragment Analyzer DNA analyzer kit (Agilent, dsDNA 35-1500 bp). Amplicons were sequenced on the Illumina MiSeq™ according to the manufacturer's instructions. Raw fastq sequencing files were processed by trimming for quality and adapter sequences and merging read 1 and read 2 into a single insert sequence; insert sequences were then analyzed by the CRISPResso2 (v 2.0.29) program. The percentage of reads modified in a window around the 3′ end of the spacer was determined. The activity of the CasX molecule was quantified as the total percent of reads that contain insertions, substitutions, and/or deletions anywhere within this window for each.

### Results

[0396] CasX-mediated editing at the mouse PCSK9 locus was used to evaluate the effects of incorporating different 5′ and 3′ UTRs into the engineered CasX mRNA. The plot in FIG. 2 shows the quantification of percent editing measured as indel rate at the PCSK9 locus in mouse Hepal-6 cells transfected with CasX 676 mRNA #1 or CasX 676 mRNA #2 with the indicated PCSK9-targeting gRNAs. The data demonstrate that for all targeting spacers tested in this experiment, CasX mRNA #2, the mRNA with a synthetic 5′ UTR and a mouse HBA 3′ UTR, consistently exhibited higher editing levels at the mouse PCSK9 locus compared to editing levels achieved by CasX mRNA #1, the mRNA with human HBA 5′ and 3′ UTRs. Specifically, the highest level of editing rate achieved was with spacer 27.116, where use of CasX mRNA #2 resulted in ˜35% editing efficiency compared to ˜20% editing level by CasX mRNA #1 (FIG. 2).

[0397] The results demonstrate that altering the 5′UTR and 3′UTR sequences of the CasX mRNA can affect the editing activity of CasX at a target locus in a cell-based assay, and that the combination of a synthetic 5′ UTR and mouse HBA 3′ UTR was particularly effective for generating an mRNA encoding CasX that produced a high level of editing.

### Example 6: CasX mRNA and PCSK9-Targeting gRNA can be Delivered Via LNPs to Achieve Editing at the Human PCSK9 Locus In Vitro

[0398] Experiments were performed to demonstrate that delivery of LNPs encapsulating CasX mRNA and a PCSK9-targeting gRNA can induce editing at the endogenous human PCSK9 locus in primary human hepatocytes. Here, CasX 515 was selected for assessment given its improvement in specificity while maintaining activity compared to the earlier prototype CasX 491, and CasX 812 was selected given its increased specificity. Materials and Methods:

[0399] Generation of CasX mRNAs encoding for CasX 515 and CasX 812 was performed by IVT, following similar methods described earlier in Example 5. Briefly, constructs encoding for a synthetic 5′UTR, a codon-optimized CasX 515 or CasX 812 with flanking c-MYC NLSes, and a 3′UTR derived from the mouse hemoglobin alpha (mHBA) were cloned into a plasmid containing a T7 promoter and 79-nucleotide poly (A) tail. The resulting plasmid was linearized prior to use for IVT reactions, which were carried out with CleanCap® AG and NI-methyl-pseudouridine (as described in Example 5). The DNA sequences encoding the CasX 515 or CasX 812 mRNA molecules are listed in Table 23, with the corresponding mRNA sequences with the chemical modifications listed in Table 24. The protein sequences for CasX 515 and CasX 812 resulting from expression of the IVT mRNA molecules are listed in Table 25.

TABLE 23
Encoding sequences of the two CasX mRNA molecules assessed in this
example*.

| CasX | Component | | | SEQ ID |
|---|---|---|---|---|
| mRNA ID | (ID) | Description | DNA sequence | NO |
| CasX 515 | 5′UTR + | Synthetic | AAATAAGAGAGAAAAGAAGAGTAAGAAGAAATATAA | 19739 |
| & | Kozak | | GAGCCACC | |
| CasX 812 | sequence | | | |
| mRNA | (underlined) | | | |
| | START | | ATGGCCCCTGCTGCCAAGAGAGTGAAGCTGGATAGC | 19734 |
| | codon + c- | | AGA | |
| | MYC NLS | | | |
| CasX 515 | CasX 515 | | CAGGAGATCAAGCGGATTAATAAAATTCGGAGAAGA | 19751 |
| mRNA | | | CTGGTGAAGGATTCTAACACAAAGAAGGCTGGCAAG | |
| | | | ACAGGCCCTATGAAGACACTGCTGGTGAGAGTGATG | |
| | | | ACACCCGACCTGAGAGAAAGACTGGAAAACCTGAGA | |
| | | | AAGAAGCCTGAGAATATCCCCCAGCCCATCAGCAAC | |
| | | | ACAAGCCGGGCCAACCTGAATAAGCTGCTGACCGAC | |
| | | | TACACCGAAATGAAGAAGGCCATCCTGCACGTGTAT | |
| | | | TGGGAAGAGTTCCAGAAAGACCCAGTCGGCCTGATG | |
| | | | AGCAGAGTGGCTCAGCCTGCCAGCAAGAAGATCGAT | |
| | | | CAGAACAAGCTGAAGCCCGAAATGGACGAGAAGGGG | |
| | | | AACCTGACAACCGCCGGCTTTGCCTGTAGCCAGTGC | |
| | | | GGCCAGCCCCTGTTTGTGTACAAACTGGAACAGGTG | |
| | | | AGCGAAAAGGGCAAGGCTTACACGAATTACTTCGGC | |
| | | | AGATGCAACGTGGCCGAGCACGAGAAGCTGATCCTG | |
| | | | CTGGCCCAGCTGAAGCCTGAGAAGGATAGCGATGAG | |
| | | | GCAGTGACATATTCCCTGGGCAAGTTCGGACAGCGG | |
| | | | GCCCTGGATTTTTATTCCATTCATGTGACCAAGGAA | |
| | | | TCCACCCACCCCGTCAAGCCTCTTGCCCAAATTGCC | |
| | | | GGCAACAGATACGCCAGCGGCCCCGTGGGCAAGGCC | |
| | | | CTGAGCGACGCCTGTATGGGCACCATCGCCAGCTTC | |
| | | | CTGTCTAAGTACCAGGACATTATCATCGAGCACCAG | |
| | | | AAGGTGGTGAAGGGCAACCAGAAGAGACTGGAGAGC | |
| | | | CTGCGCGAGCTGGCCGGCAAGGAAAACCTGGAGTAT | |
| | | | CCTAGCGTGACCCTGCCTCCTCAGCCTCATACAAAG | |
| | | | GAGGGCGTGGATGCCTACAACGAAGTGATCGCCCGG | |
| | | | GTGCGGATGTGGGTGAACCTGAATCTGTGGCAGAAG | |
| | | | CTGAAGCTGTCTAGAGACGACGCCAAGCCCCTGCTG | |
| | | | AGACTGAAGGGCTTCCCCAGCTTCCCTCTGGTGGAG | |
| | | | AGACAGGCAAATGAAGTGGACTGGTGGGACATGGTG | |
| | | | TGTAACGTGAAGAAGCTGATCAATGAGAAGAAGGAG | |
| | | | GACGGCAAAGTGTTCTGGCAGAATCTGGCCGGCTAC | |
| | | | AAGCGTCAGGAGGCCCTGCGGCCCTACCTGAGCAGC | |
| | | | GAGGAAGACAGAAAGAAGGGCAAGAAGTTCGCCCGG | |
| | | | TATCAGCTGGGGGACCTGCTGCTGCACCTCGAGAAG | |
| | | | AAGCACGGCGAAGACTGGGGGAAGGTGTACGATGAG | |
| | | | GCCTGGGAGCGGATCGATAAGAAGGTGGAGGGCCTG | |
| | | | AGCAAGCACATCAAGCTGGAGGAGGAACGGAGATCT | |
| | | | GAGGACGCCCAGAGCAAGGCCGCCCTGACCGACTGG | |
| | | | CTGAGAGCCAAGGCCAGCTTCGTCATCGAGGGGCTG | |
| | | | AAGGAGGCCGACAAGGACGAGTTCTGCCGGTGCGAA | |
| | | | CTGAAGCTGCAGAAGTGGTACGGAGATCTGAGAGGC | |
| | | | AAACCTTTCGCCATCGAGGCCGAGAACAGCATCCTG | |
| | | | GACATCAGCGGCTTCAGCAAGCAGTACAACTGCGCC | |
| | | | TTTATTTGGCAGAAGGACGGAGTGAAGAAGCTGAAC | |
| | | | CTGTACCTGATCATCAACTATTTCAAGGGCGGCAAG | |
| | | | CTGAGATTCAAGAAGATCAAGCCTGAAGCCTTCGAG | |
| | | | GCCAACAGATTCTACACCGTGATTAACAAGAAAAGC | |
| | | | GGAGAGATCGTGCCAATGGAAGTGAACTTCAACTTC | |
| | | | GACGACCCTAACCTGATCATCCTGCCCCTGGCATTT | |
| | | | GGCAAGCGGCAGGGCAGAGAGTTCATCTGGAACGAC | |
| | | | CTGCTGTCTCTGGAGACCGGCAGCCTGAAGCTGGCC | |
| | | | AACGGCAGAGTGATCGAGAAGACACTGTACAACAGA | |
| | | | CGAACCAGACAAGACGAGCCCGCCCTGTTTGTGGCC | |
| | | | CTGACCTTCGAGAGAAGAGAGGTGCTGGACAGCAGC | |
| | | | AATATCAAGCCTATGAACCTGATCGGCGTGGACCGG | |
| | | | GGCGAGAACATCCCTGCCGTGATCGCCCTTACCGAC | |
| | | | CCCGAGGGATGCCCTCTGAGCCGGTTTAAAGACAGC | |
| | | | CTGGGCAACCCTACCCACATCCTGAGAATTGGCGAG | |
| | | | TCCTACAAGGAGAAGCAGAGAACCATCCAGGCCAAG | |
| | | | AAGGAGGTGGAGCAGCGGCGGGCTGGCGGCTACTCC | |
| | | | CGGAAGTACGCCAGCAAGGCCAAGAACCTGGCCGAC | |
| | | | GACATGGTTAGAAATACCGCCAGAGACCTCCTGTAC | |
| | | | TACGCTGTGACCCAGGACGCCATGCTGATCTTCGAG | |
| | | | AACCTGAGCAGAGGCTTCGGCAGACAGGGCAAGAGA | |
| | | | ACCTTCATGGCCGAGAGACAGTACACCCGGATGGAG | |
| | | | GACTGGCTGACCGCCAAGCTGGCCTACGAGGGCCTG | |
| | | | CCCTCTAAGACCTACCTGTCCAAGACCTTGGCACAG | |
| | | | TACACCAGCAAGACATGCTCTAACTGCGGCTTCACA | |
| | | | ATCACGAGCGCCGACTACGACCGGGTGCTGGAGAAA | |
| | | | CTGAAGAAGACCGCCACAGGCTGGATGACCACCATT | |
| | | | AACGGCAAGGAGCTGAAGGTGGAGGGCCAGATCACC | |
| | | | TACTACAACAGGTACAAACGGCAGAACGTGGTGAAG | |
| | | | GACCTGAGCGTGGAACTGGATAGACTGAGCGAGGAA | |
| | | | AGCGTAAACAATGACATCAGCAGCTGGACCAAGGGC | |
| | | | CGGAGCGGCGAGGCCCTGAGCCTGCTGAAGAAGAGA | |
| | | | TTCTCCCACAGACCAGTGCAGGAGAAGTTCGTGTGT | |
| | | | CTGAACTGCGGCTTCGAGACCCACGCCGACGAGCAA | |
| | | | GCCGCCCTGAACATCGCCCGGTCTTGGCTTTTCCTG | |
| | | | CGGAGCCAGGAGTACAAGAAGTACCAGACAAACAAG | |
| | | | ACCACAGGCAACACAGACAAGAGAGCCTTCGTCGAG | |
| | | | ACCTGGCAGAGCTTCTACAGAAAGAAGCTGAAGGAG | |
| | | | GTGTGGAAGCCTGCCGTG | |
| CasX 812 | CasX 812 | | CAGGAGATCAAGCGGATTAATAAAATTCGGAGAAGA | 19752 |
| mRNA | | | CTGGTGAAGGATTCTAACACAAAGAAGGCTGGCAAG | |
| | | | ACAGGCCCTATGAAGACACTGCTGGTGAGAGTGATG | |
| | | | ACACCCGACCTGAGAGAAAGACTGGAAAACCTGAGA | |
| | | | AAGAAGCCTGAGAATATCCCCCAGCCCATCAGCAAC | |
| | | | ACAAGCCGGGCCAACCTGAATAAGCTGCTGACCGAC | |
| | | | TACACCGAAATGAAGAAGGCCATCCTGCACGTGTAT | |
| | | | TGGGAAGAGTTCCAGAAAGACCCAGTCGGCCTGATG | |
| | | | AGCAGAGTGGCTCAGCCTGCCAGCAAGAAGATCGAT | |
| | | | CAGAACAAGCTGAAGCCCGAAATGGACGAGAAGGGG | |
| | | | AACCTGACAACCGCCGGCTTTGCCTGTAGCCAGTGC | |
| | | | GGCCAGCCCCTGTTTGTGTACAAACTGGAACAGGTG | |
| | | | AGCGAAAAGGGCAAGGCTTACACGAATTACTTCGGC | |
| | | | AGATGCAACGTGGCCGAGCACGAGAAGCTGATCCTG | |
| | | | CTGGCCCAGCTGAAGCCTGAGAAGGATAGCGATGAG | |
| | | | GCAGTGACATATTCCCTGGGCAAGTTCGGACAGCGG | |
| | | | GCCCTGGATTTTTATTCCATTCATGTGACCAAGGAA | |
| | | | TCCACCCACCCCGTCAAGCCTCTTGCCCAAATTGCC | |
| | | | GGCAACAGATACGCCAGCGGCCCCGTGGGCAAGGCC | |
| | | | CTGAGCGACGCCTGTATGGGCACCATCGCCAGCTTC | |
| | | | CTGTCTAAGTACCAGGACATTATCATCGAGCACCAG | |
| | | | AAGGTGGTGAAGGGCAACCAGAAGAGACTGGAGAGC | |
| | | | CTGCGCGAGCTGGCCGGCAAGGAAAACCTGGAGTAT | |
| | | | CCTAGCGTGACCCTGCCTCCTCAGCCTCATACAAAG | |
| | | | GAGGGCGTGGATGCCTACAACGAAGTGATCGCCCGG | |
| | | | GTGCGGATGTGGGTGAACCTGAATCTGTGGCAGAAG | |
| | | | CTGAAGCTGTCTAGAGACGACGCCAAGCCCCTGCTG | |
| | | | AGACTGAAGAAGTTCCCCAGCTTCCCTCTGGTGGAG | |
| | | | AGACAGGCAAATGAAGTGGACTGGTGGGACATGGTG | |
| | | | TGTAACGTGAAGAAGCTGATCAATGAGAAGAAGGAG | |
| | | | GACGGCAAAGTGTTCTGGCAGAATCTGGCCGGCTAC | |
| | | | AAGCGTCAGGAGGCCCTGCGGCCCTACCTGAGCAGC | |
| | | | GAGGAAGACAGAAAGAAGGGCAAGAAGTTCGCCCGG | |
| | | | TATCAGCTGGGGGACCTGCTGCTGCACCTCGAGAAG | |
| | | | AAGCACGGCGAAGACTGGGGGAAGGTGTACGATGAG | |
| | | | GCCTGGGAGCGGATCGATAAGAAGGTGGAGGGCCTG | |
| | | | AGCAAGCACATCAAGCTGGAGGAGGAACGGAGATCT | |
| | | | GAGGACGCCCAGAGCAAGGCCGCCCTGACCGACTGG | |
| | | | CTGAGAGCCAAGGCCAGCTTCGTCATCGAGGGGCTG | |
| | | | AAGGAGGCCGACAAGGACGAGTTCTGCCGGTGCGAA | |
| | | | CTGAAGCTGCAGAAGTGGTACGGAGATCTGAGAGGC | |
| | | | AAACCTTTCGCCATCGAGGCCGAGAACAGCATCCTG | |
| | | | GACATCAGCGGCTTCAGCAAGCAGTACAACTGCGCC | |
| | | | TTTATTTGGCAGAAGGACGGAGTGAAGAAGCTGAAC | |
| | | | CTGTACCTGATCATCAACTATTTCAAGGGCGGCAAG | |
| | | | CTGAGATTCAAGAAGATCAAGCCTGAAGCCTTCGAG | |
| | | | GCCAACAGATTCTACACCGTGATTAACAAGAAAAGC | |
| | | | GGAGAGATCGTGCCAATGGAAGTGAACTTCAACTTC | |
| | | | GACGACCCTAACCTGATCATCCTGCCCCTGGCATTT | |
| | | | GGCAAGCGGCAGGGCAGAGAGTTCATCTGGAACGAC | |
| | | | CTGCTGTCTCTGGAGACCGGCAGCCTGAAGCTGGCC | |
| | | | AACGGCAGAGTGATCGAGAAGACACTGTACAACAGA | |
| | | | CGAACCAGACAAGACGAGCCCGCCCTGTTTGTGGCC | |
| | | | CTGACCTTCGAGAGAAGAGAGGTGCTGGACAGCAGC | |
| | | | AATATCAAGCCTATGAACCTGATCGGCGTGGACCGG | |
| | | | GGCGAGAACATCCCTGCCGTGATCGCCCTTACCGAC | |
| | | | CCCGAGGGATGCCCTCTGAGCCGGTTTAAAGACAGC | |
| | | | CTGGGCAACCCTACCCACATCCTGAGAATTGGCGAG | |
| | | | TCCTACAAGGAGAAGCAGAGAACCATCCAGGCCAAG | |
| | | | AAGGAGGTGGAGCAGCGGCGGGCTGGCGGCTACTCC | |
| | | | CGGAAGTACGCCAGCAAGGCCAAGAACCTGGCCGAC | |
| | | | GACATGGTTAGAAATACCGCCAGAGACCTCCTGTAC | |
| | | | TACGCTGTGACCCAGGACGCCATGCTGATCTTCGAG | |
| | | | AACCTGAGCAGAGGCTTCGGCAGACAGGGCAAGAGA | |
| | | | ACCTTCATGGCCGAGAGACAGTACACCCGGATGGAG | |
| | | | GACTGGCTGACCGCCAAGCTGGCCTACGAGGGCCTG | |
| | | | CCCTCTAAGACCTACCTGTCCAAGACCTTGGCACAG | |
| | | | TACACCAGCAAGACATGCTCTAACTGCGGCTTCACA | |
| | | | ATCACGAGCGCCGACTACGACCGGGTGCTGGAGAAA | |
| | | | CTGAAGAAGACCGCCACAGGCTGGATGACCACCATT | |
| | | | AACGGCAAGGAGCTGAAGGTGGAGGGCCAGATCACC | |
| | | | TACTACAACAGGTACAAACGGCAGAACGTGGTGAAG | |
| | | | GACCTGAGCGTGGAACTGGATAGACTGAGCGAGGAA | |
| | | | AGCGTAAACAATGACATCAGCAGCTGGACCAAGGGC | |
| | | | CGGAGCGGCGAGGCCCTGAGCCTGCTGAAGAAGAGA | |
| | | | TTCTCCCACAGACCAGTGCAGGAGAAGTTCGTGTGT | |
| | | | CTGAACTGCGGCTTCGAGACCCACGCCGACGAGCAA | |
| | | | GCCGCCCTGAACATCGCCCGGTCTTGGCTTTTCCTG | |
| | | | CGGAGCCAGGAGTACAAGAAGTACCAGACAAACAAG | |
| | | | ACCACAGGCAACACAGACAAGAGAGCCTTCGTCGAG | |
| | | | ACCTGGCAGAGCTTCTACAGAAAGAAGCTGAAGGAG | |
| | | | GTGTGGAAGCCTGCCGTG | |
| CasX 515 | c-MYC NLS + | | GGAAGCCCCGCTGCCAAGAGAGTGAAGCTGGACTAA | 19753 |
| & | STOP codon | | | |
| CasX 812 | 3′UTR | Mouse HBA | GCTGCCTTCTGCGGGGCTTGCCTTCTGGCCATGCCC | 19740 |
| mRNA | | | TTCTTCTCTCCCTTGCACCTGTACCTCTTGGTCTTT | |
| | | | GAATAAAGCCTGAGTAGGAAG | |
| | XbaI | | TCTAG | 19741 |
| | restriction | | | |
| | site (partial) | | | |
| | Poly(A) tail | | AAAAAAAAAAAAAAAAAAAAAAAAAAAAAAAAAAAA | 19826 |
| | | | AAAAAAAAAAAAAAAAAAAAAAAAAAAAAAAAAAAA | |
| | | | AAAAAAA | |

*Components are listed in a 5′ to 3′ order within the constructs

TABLE 24
Full-length RNA sequences of CasX mRNA molecules assessed in this
example. The CleanCap ® AG 5′ cap is not shown in the table. Modification ‘mψ’ = N1-
methyl-pseudouridine

| CasX | | SEQ ID |
|---|---|---|
| mRNA | RNA sequence | NO |
| CasX 515 | AAAmψAAGAGAGAAAAGAAGAGmψAAGAAGAAAmψAmψAAGAGCCACCAmψGGCCCCm | 19755 |
| mRNA | ψGCmψGCCAAGAGAGmψGAAGCmψGGAmψAGCAGACAGGAGAmψCAAGCGGAmψmψAA | |
| | mψAAAAmψmψCGGAGAAGACmψGGmψGAAGGAmψmψCmψAACACAAAGAAGGCmψGGC | |
| | AAGACAGGCCCmψAmψGAAGACACmψGCmψGGmψGAGAGmψGAmψGACACCCGACCmψ | |
| | GAGAGAAAGACmψGGAAAACCmψGAGAAAGAAGCCmψGAGAAmψAmψCCCCCAGCCCA | |
| | mψCAGCAACACAAGCCGGGCCAACCmψGAAmψAAGCmψGCmψGACCGACmψACACCGA | |
| | AAmψGAAGAAGGCCAmψCCmψGCACGmψGmψAmψmψGGGAAGAGmψmψCCAGAAAGAC | |
| | CCAGmψCGGCCmψGAmψGAGCAGAGmψGGCmψCAGCCmψGCCAGCAAGAAGAmψCGAm | |
| | ψCAGAACAAGCmψGAAGCCCGAAAmψGGACGAGAAGGGGAACCmψGACAACCGCCGGC | |
| | mψmψmψGCCmψGmψAGCCAGmψGCGGCCAGCCCCmψGmψmψmψGmψGmψACAAACmψG | |
| | GAACAGGmψGAGCGAAAAGGGCAAGGCmψmψACACGAAmψmψACmψmψCGGCAGAmψG | |
| | CAACGmψGGCCGAGCACGAGAAGCmψGAmψCCmψGCmψGGCCCAGCmψGAAGCCmψGA | |
| | GAAGGAmψAGCGAmψGAGGCAGmψGACAmψAmψmψCCCmψGGGCAAGmψmψCGGACAG | |
| | CGGGCCCmψGGAmψmψmψmψmψAmψmψCCAmψmψCAmψGmψGACCAAGGAAmψCCACC | |
| | CACCCCGmψCAAGCCmψCmψmψGCCCAAAmψmψGCCGGCAACAGAmψACGCCAGCGGC | |
| | CCCGmψGGGCAAGGCCCmψGAGCGACGCCmψGmψAmψGGGCACCAmψCGCCAGCmψmψ | |
| | CCmψGmψCmψAAGmψACCAGGACAmψmψAmψCAmψCGAGCACCAGAAGGmψGGmψGAA | |
| | GGGCAACCAGAAGAGACmψGGAGAGCCmψGCGCGAGCmψGGCCGGCAAGGAAAACCmψ | |
| | GGAGmψAmψCCmψAGCGmψGACCCmψGCCmψCCmψCAGCCmψCAmψACAAAGGAGGGC | |
| | GmψGGAmψGCCmψACAACGAAGmψGAmψCGCCCGGGmψGCGGAmψGmψGGGmψGAACC | |
| | mψGAAmψCmψGmψGGCAGAAGCmψGAAGCmψGmψCmψAGAGACGACGCCAAGCCCCmψ | |
| | GCmψGAGACmψGAAGGGCmψmψCCCCAGCmψmψCCCmψCmψGGmψGGAGAGACAGGCA | |
| | AAmψGAAGmψGGACmψGGmψGGGACAmψGGmψGmψGmψAACGmψGAAGAAGCmψGAmψ | |
| | CAAmψGAGAAGAAGGAGGACGGCAAAGmψGmψmψCmψGGCAGAAmψCmψGGCCGGCmψ | |
| | ACAAGCGmψCAGGAGGCCCmψGCGGCCCmψACCmψGAGCAGCGAGGAAGACAGAAAGA | |
| | AGGGCAAGAAGmψmψCGCCCGGmψAmψCAGCmψGGGGGACCmψGCmψGCmψGCACCmψ | |
| | CGAGAAGAAGCACGGCGAAGACmψGGGGGAAGGmψGmψACGAmψGAGGCCmψGGGAGC | |
| | GGAmψCGAmψAAGAAGGmψGGAGGGCCmψGAGCAAGCACAmψCAAGCmψGGAGGAGGA | |
| | ACGGAGAmψCmψGAGGACGCCCAGAGCAAGGCCGCCCmψGACCGACmψGGCmψGAGAG | |
| | CCAAGGCCAGCmψmψCGmψCAmψCGAGGGGCmψGAAGGAGGCCGACAAGGACGAGmψm | |
| | ψCmψGCCGGmψGCGAACmψGAAGCmψGCAGAAGmψGGmψACGGAGAmψCmψGAGAGGC | |
| | AAACCmψmψmψCGCCAmψCGAGGCCGAGAACAGCAmψCCmyGGACAmψCAGCGGCmψm | |
| | ψCAGCAAGCAGmψACAACmψGCGCCmψmψmψAmψmψmψGGCAGAAGGACGGAGmψGAA | |
| | GAAGCmψGAACCmψGmψACCmψGAmψCAmψCAACmψAmψmψmψCAAGGGCGGCAAGCm | |
| | ψGAGAmψmψCAAGAAGAmψCAAGCCmψGAAGCCmψmψCGAGGCCAACAGAmψmψCmψA | |
| | CACCGmψGAmψmψAACAAGAAAAGCGGAGAGAmψCGmψGCCAAmψGGAAGmψGAACmψ | |
| | mψCAACmψmψCGACGACCCmψAACCmψGAmψCAmψCCmψGCCCCmψGGCAmψmψmψGG | |
| | CAAGCGGCAGGGCAGAGAGmψmψCAmψCmψGGAACGACCmψGCmψGmψCmψCmψGGAG | |
| | ACCGGCAGCCmψGAAGCmψGGCCAACGGCAGAGmψGAmψCGAGAAGACACmψGmψACA | |
| | ACAGACGAACCAGACAAGACGAGCCCGCCCmψGmψmψmψGmψGGCCCmψGACCmψmψC | |
| | GAGAGAAGAGAGGmψGCmψGGACAGCAGCAAmψAmψCAAGCCmψAmψGAACCmψGAmψ | |
| | CGGCGmψGGACCGGGGCGAGAACAmψCCCmψGCCGmψGAmψCGCCCmψmψACCGACCC | |
| | CGAGGGAmψGCCCmψCmψGAGCCGGmψmψmψAAAGACAGCCmψGGGCAACCCmψACCC | |
| | ACAmψCCmyGAGAAmψmψGGCGAGmψCCmψACAAGGAGAAGCAGAGAACCAmψCCAGG | |
| | CCAAGAAGGAGGmψGGAGCAGCGGCGGGCmψGGCGGCmψACmψCCCGGAAGmψACGCC | |
| | AGCAAGGCCAAGAACCmψGGCCGACGACAmψGGmψmψAGAAAmψACCGCCAGAGACCm | |
| | ψCCmψGmψACmψACGCmψGmψGACCCAGGACGCCAmψGCmψGAmψCmψmψCGAGAACC | |
| | mψGAGCAGAGGCmψmψCGGCAGACAGGGCAAGAGAACCmψmψCAmψGGCCGAGAGACA | |
| | GmψACACCCGGAmψGGAGGACmψGGCmψGACCGCCAAGCmψGGCCmψACGAGGGCCmψ | |
| | GCCCmψCmψAAGACCmψACCmψGmψCCAAGACCmψmψGGCACAGmψACACCAGCAAGA | |
| | CAmψGCmψCmψAACmψGCGGCmψmψCACAAmψCACGAGCGCCGACmψACGACCGGGmψ | |
| | GCmψGGAGAAACmψGAAGAAGACCGCCACAGGCmψGGAmψGACCACCAmψmψAACGGC | |
| | AAGGAGCmψGAAGGmψGGAGGGCCAGAmψCACCmψACmψACAACAGGmψACAAACGGC | |
| | AGAACGmψGGmψGAAGGACCmψGAGCGmψGGAACmψGGAmψAGACmψGAGCGAGGAAA | |
| | GCGmψAAACAAmψGACAmψCAGCAGCmψGGACCAAGGGCCGGAGCGGCGAGGCCCmψG | |
| | AGCCmψGCmψGAAGAAGAGAmψmψCmψCCCACAGACCAGmψGCAGGAGAAGmψmψCGm | |
| | ψGmψGmψCmψGAACmψGCGGCmψmψCGAGACCCACGCCGACGAGCAAGCCGCCCmψGA | |
| | ACAmψCGCCCGGmψCmψmψGGCmψmψmψmψCCmψGCGGAGCCAGGAGmψACAAGAAGm | |
| | ψACCAGACAAACAAGACCACAGGCAACACAGACAAGAGAGCCmψmψCGmψCGAGACCm | |
| | ψGGCAGAGCmψmψCmψACAGAAAGAAGCmψGAAGGAGGmψGmψGGAAGCCmψGCCGmψ | |
| | GGGAAGCCCCGCmψGCCAAGAGAGmψGAAGCmψGGACmψAAGCmψGCCmψmψCmψGCG | |
| | GGGCmψmψGCCmψmψCmψGGCCAmψGCCCmψmψCmψmψCmψCmψCCCmψmψGCACCmψ | |
| | GmψACCmψCmψmψGGmψCmψmψmψGAAmψAAAGCCmψGAGmψAGGAAGmψCmψAGAAA | |
| | AAAAAAAAAAAAAAAAAAAAAAAAAAAAAAAAAAAAAAAAAAAAAAAAAAAAAAAAAA | |
| | AAAAAAAAAAAAAAAAAA | |
| CasX 812 | AAAmψAAGAGAGAAAAGAAGAGmψAAGAAGAAAmψAmψAAGAGCCACCAmψGGCCCCm | 19756 |
| mRNA | ψGCmψGCCAAGAGAGmψGAAGCmψGGAmψAGCAGACAGGAGAmψCAAGCGGAmψmψAA | |
| | mψAAAAmψmψCGGAGAAGACmψGGmψGAAGGAmψmψCmψAACACAAAGAAGGCmψGGC | |
| | AAGACAGGCCCmψAmψGAAGACACmψGCmψGGmψGAGAGmψGAmψGACACCCGACCmψ | |
| | GAGAGAAAGACmψGGAAAACCmψGAGAAAGAAGCCmψGAGAAmψAmψCCCCCAGCCCA | |
| | mψCAGCAACACAAGCCGGGCCAACCmψGAAmψAAGCmψGCmψGACCGACmψACACCGA | |
| | AAmψGAAGAAGGCCAmψCCmψGCACGmψGmψAmψmψGGGAAGAGmψmψCCAGAAAGAC | |
| | CCAGmψCGGCCmψGAmψGAGCAGAGmψGGCmψCAGCCmψGCCAGCAAGAAGAmψCGAm | |
| | ψCAGAACAAGCmψGAAGCCCGAAAmψGGACGAGAAGGGGAACCmψGACAACCGCCGGC | |
| | mψmψmψGCCmψGmψAGCCAGmψGCGGCCAGCCCCmψGmψmψmψGmψGmψACAAACmψG | |
| | GAACAGGmψGAGCGAAAAGGGCAAGGCmψmψACACGAAmψmψACmψmψCGGCAGAmψG | |
| | CAACGmψGGCCGAGCACGAGAAGCmψGAmψCCmψGCmψGGCCCAGCmψGAAGCCmψGA | |
| | GAAGGAmψAGCGAmψGAGGCAGmψGACAmψAmψmψCCCmψGGGCAAGmψmψCGGACAG | |
| | CGGGCCCmψGGAmψmψmψmψmψAmψmψCCAmψmψCAmψGmψGACCAAGGAAmψCCACC | |
| | CACCCCGmψCAAGCCmψCmψmψGCCCAAAmψmψGCCGGCAACAGAmψACGCCAGCGGC | |
| | CCCGmψGGGCAAGGCCCmψGAGCGACGCCmψGmψAmψGGGCACCAmψCGCCAGCmψmψ | |
| | CCmψGmψCmψAAGmψACCAGGACAmψmψAmψCAmψCGAGCACCAGAAGGmψGGmψGAA | |
| | GGGCAACCAGAAGAGACmψGGAGAGCCmψGCGCGAGCmψGGCCGGCAAGGAAAACCmψ | |
| | GGAGmψAmψCCmψAGCGmψGACCCmψGCCmψCCmψCAGCCmψCAmψACAAAGGAGGGC | |
| | GmψGGAmψGCCmψACAACGAAGmψGAmψCGCCCGGGmψGCGGAmψGmψGGGmψGAACC | |
| | mψGAAmψCmψGmψGGCAGAAGCmψGAAGCmψGmψCmψAGAGACGACGCCAAGCCCCmψ | |
| | GCmψGAGACmψGAAGAAGmψmψCCCCAGCmψmψCCCmψCmψGGmψGGAGAGACAGGCA | |
| | AAmψGAAGmψGGACmψGGmψGGGACAmψGGmψGmψGmψAACGmψGAAGAAGCmψGAmψ | |
| | CAAmψGAGAAGAAGGAGGACGGCAAAGmψGmψmψCmψGGCAGAAmψCmψGGCCGGCmψ | |
| | ACAAGCGmψCAGGAGGCCCmψGCGGCCCmψACCmψGAGCAGCGAGGAAGACAGAAAGA | |
| | AGGGCAAGAAGmψmψCGCCCGGmψAmψCAGCmψGGGGGACCmψGCmψGCmψGCACCmψ | |
| | CGAGAAGAAGCACGGCGAAGACmψGGGGGAAGGmψGmψACGAmψGAGGCCmψGGGAGC | |
| | GGAmψCGAmψAAGAAGGmψGGAGGGCCmψGAGCAAGCACAmψCAAGCmψGGAGGAGGA | |
| | ACGGAGAmψCmψGAGGACGCCCAGAGCAAGGCCGCCCmψGACCGACmψGGCmψGAGAG | |
| | CCAAGGCCAGCmψmψCGmψCAmψCGAGGGGCmψGAAGGAGGCCGACAAGGACGAGmψm | |
| | ψCmψGCCGGmψGCGAACmψGAAGCmψGCAGAAGmψGGmψACGGAGAmψCmψGAGAGGC | |
| | AAACCmψmψmψCGCCAmψCGAGGCCGAGAACAGCAmψCCmyGGACAmψCAGCGGCmψm | |
| | ψCAGCAAGCAGmψACAACmψGCGCCmψmψmψAmψmψmψGGCAGAAGGACGGAGmψGAA | |
| | GAAGCmψGAACCmψGmψACCmψGAmψCAmψCAACmψAmψmψmψCAAGGGCGGCAAGCm | |
| | ψGAGAmψmψCAAGAAGAmψCAAGCCmψGAAGCCmψmψCGAGGCCAACAGAmψmψCmψA | |
| | CACCGmψGAmψmψAACAAGAAAAGCGGAGAGAmψCGmψGCCAAmψGGAAGmψGAACmψ | |
| | mψCAACmψmψCGACGACCCmψAACCmψGAmψCAmψCCmψGCCCCmψGGCAmψmψmψGG | |
| | CAAGCGGCAGGGCAGAGAGmψmψCAmψCmψGGAACGACCmψGCmψGmψCmψCmψGGAG | |
| | ACCGGCAGCCmψGAAGCmψGGCCAACGGCAGAGmψGAmψCGAGAAGACACmψGmψACA | |
| | ACAGACGAACCAGACAAGACGAGCCCGCCCmψGmψmψmψGmψGGCCCmψGACCmψmψC | |
| | GAGAGAAGAGAGGmψGCmψGGACAGCAGCAAmψAmψCAAGCCmψAmψGAACCmψGAmψ | |
| | CGGCGmψGGACCGGGGCGAGAACAmψCCCmψGCCGmψGAmψCGCCCmψmψACCGACCC | |
| | CGAGGGAmψGCCCmψCmψGAGCCGGmψmψmψAAAGACAGCCmψGGGCAACCCmψAGGG | |
| | ACAmψCCmψGAGAAmψmψGGCGAGmψCCmψACAAGGAGAAGCAGAGAACCAmψCCAGG | |
| | CCAAGAAGGAGGmψGGAGCAGCGGCGGGCmψGGCGGCmψACmψCCCGGAAGmψACGCC | |
| | AGCAAGGCCAAGAACCmψGGCCGACGACAmψGGmψmψAGAAAmψACCGCCAGAGACCm | |
| | ψCCmψGmψACmψACGCmψGmψGACCCAGGACGCCAmψGCmψGAmψCmψmψCGAGAACC | |
| | mψGAGCAGAGGCmψmψCGGCAGACAGGGCAAGAGAACCmψmψCAmψGGCCGAGAGACA | |
| | GmψACACCCGGAmψGGAGGACmψGGCmψGACCGCCAAGCmψGGCCmψACGAGGGCCmψ | |
| | GCCCmψCmψAAGACCmψACCmψGmψCCAAGACCmψmψGGCACAGmψACACCAGCAAGA | |
| | CAmψGCmψCmψAACmψGCGGCmψmψCACAAmψCACGAGCGCCGACmψACGACCGGGmψ | |
| | GCmψGGAGAAACmψGAAGAAGACCGCCACAGGCmψGGAmψGACCACCAmψmψAACGGC | |
| | AAGGAGCmψGAAGGmψGGAGGGCCAGAmψCACCmψACmψACAACAGGmψACAAACGGC | |
| | AGAACGmψGGmψGAAGGACCmψGAGCGmψGGAACmψGGAmψAGACmψGAGCGAGGAAA | |
| | GCGmψAAACAAmψGACAmψCAGCAGCmψGGACCAAGGGCCGGAGCGGCGAGGCCCmψG | |
| | AGCCmψGCmψGAAGAAGAGAmψmψCmψCCCACAGACCAGmψGCAGGAGAAGmψmψCGm | |
| | ψGmψGmψCmψGAACmψGCGGCmψmψCGAGACCCACGCCGACGAGCAAGCCGCCCmψGA | |
| | ACAmψCGCCCGGmψCmymψGGCmψmψmψmψCCmψGCGGAGCCAGGAGmψACAAGAAGm | |
| | ψGGCAGAGCmψmψCmψACAGAAAGAAGCmψGAAGGAGGmψGmψGGAAGCCmψGCCGmψ | |
| | GGGAAGCCCCGCmψGCCAAGAGAGmψGAAGCmψGGACmψAAGCmψGCCmψmψCmψGCG | |
| | GGGCmψmψGCCmψmψCmψGGCCAmψGCCCmψmψCmψmψCmψCmψCCCmψmψGCACCmψ | |
| | GmψACCmψCmψmψGGmψCmψmψmψGAAmψAAAGCCmψGAGmψAGGAAGmψCmψAGAAA | |
| | AAAAAAAAAAAAAAAAAAAAAAAAAAAAAAAAAAAAAAAAAAAAAAAAAAAAAAAAAA | |
| | AAAAAAAAAAAAAAAAAA | |

TABLE 25
Full-length protein sequences of CasX molecules assessed in this example.

| | | SEQ |
|---|---|---|
| CasX | AA sequence | ID NO |
| CasX 515 | MAPAAKRVKLDSRQEIKRINKIRRRLVKDSNTKKAGKTGPMKTLLVRVMTPDLRERLE | 19757 |
| with | NLRKKPENIPQPISNTSRANLNKLLTDYTEMKKAILHVYWEEFQKDPVGLMSRVAQPA | |
| flanking | SKKIDQNKLKPEMDEKGNLTTAGFACSQCGQPLFVYKLEQVSEKGKAYTNYFGRCNVA | |
| c-MYC | EHEKLILLAQLKPEKDSDEAVTYSLGKFGQRALDFYSIHVTKESTHPVKPLAQIAGNR | |
| NLSes | YASGPVGKALSDACMGTIASFLSKYQDIIIEHQKVVKGNQKRLESLRELAGKENLEYP | |
| | SVTLPPQPHTKEGVDAYNEVIARVRMWVNLNLWQKLKLSRDDAKPLLRLKGFPSFPLV | |
| | ERQANEVDWWDMVCNVKKLINEKKEDGKVFWQNLAGYKRQEALRPYLSSEEDRKKGKK | |
| | FARYQLGDLLLHLEKKHGEDWGKVYDEAWERIDKKVEGLSKHIKLEEERRSEDAQSKA | |
| | ALTDWLRAKASFVIEGLKEADKDEFCRCELKLQKWYGDLRGKPFAIEAENSILDISGF | |
| | SKQYNCAFIWQKDGVKKLNLYLIINYFKGGKLRFKKIKPEAFEANRFYTVINKKSGEI | |
| | VPMEVNFNFDDPNLIILPLAFGKRQGREFIWNDLLSLETGSLKLANGRVIEKTLYNRR | |
| | TRQDEPALFVALTFERREVLDSSNIKPMNLIGVDRGENIPAVIALTDPEGCPLSRFKD | |
| | SLGNPTHILRIGESYKEKQRTIQAKKEVEQRRAGGYSRKYASKAKNLADDMVRNTARD | |
| | LLYYAVTQDAMLIFENLSRGFGRQGKRTFMAERQYTRMEDWLTAKLAYEGLPSKTYLS | |
| | KTLAQYTSKTCSNCGFTITSADYDRVLEKLKKTATGWMTTINGKELKVEGQITYYNRY | |
| | KRQNVVKDLSVELDRLSEESVNNDISSWTKGRSGEALSLLKKRFSHRPVQEKFVCLNC | |
| | GFETHADEQAALNIARSWLFLRSQEYKKYQTNKTTGNTDKRAFVETWQSFYRKKLKEV | |
| | WKPAVGSPAAKRVKLD | |
| CasX 812 | MAPAAKRVKLDSRQEIKRINKIRRRLVKDSNTKKAGKTGPMKTLLVRVMTPDLRERLE | 19758 |
| with | NLRKKPENIPQPISNTSRANLNKLLTDYTEMKKAILHVYWEEFQKDPVGLMSRVAQPA | |
| flanking | SKKIDQNKLKPEMDEKGNLTTAGFACSQCGQPLFVYKLEQVSEKGKAYTNYFGRCNVA | |
| c-MYC | EHEKLILLAQLKPEKDSDEAVTYSLGKFGQRALDFYSIHVTKESTHPVKPLAQIAGNR | |
| NLSes | YASGPVGKALSDACMGTIASFLSKYQDIIIEHQKVVKGNQKRLESLRELAGKENLEYP | |
| | SVTLPPQPHTKEGVDAYNEVIARVRMWVNLNLWQKLKLSRDDAKPLLRLKKFPSFPLV | |
| | ERQANEVDWWDMVCNVKKLINEKKEDGKVFWQNLAGYKRQEALRPYLSSEEDRKKGKK | |
| | FARYQLGDLLLHLEKKHGEDWGKVYDEAWERIDKKVEGLSKHIKLEEERRSEDAQSKA | |
| | ALTDWLRAKASFVIEGLKEADKDEFCRCELKLQKWYGDLRGKPFAIEAENSILDISGF | |
| | SKQYNCAFIWQKDGVKKLNLYLIINYFKGGKLRFKKIKPEAFEANRFYTVINKKSGEI | |
| | VPMEVNFNFDDPNLIILPLAFGKRQGREFIWNDLLSLETGSLKLANGRVIEKTLYNRR | |
| | TRQDEPALFVALTFERREVLDSSNIKPMNLIGVDRGENIPAVIALTDPEGCPLSRFKD | |
| | SLGNPTHILRIGESYKEKQRTIQAKKEVEQRRAGGYSRKYASKAKNLADDMVRNTARD | |
| | LLYYAVTQDAMLIFENLSRGFGRQGKRTFMAERQYTRMEDWLTAKLAYEGLPSKTYLS | |
| | KTLAQYTSKTCSNCGFTITSADYDRVLEKLKKTATGWMTTINGKELKVEGQITYYNRY | |
| | KRQNVVKDLSVELDRLSEESVNNDISSWTKGRSGEALSLLKKRFSHRPVQEKFVCLNC | |
| | GFETHADEQAALNIARSWLFLRSQEYKKYQTNKTTGNTDKRAFVETWQSFYRKKLKEV | |
| | WKPAVGSPAAKRVKLD | |

Synthesis of gRNAs:

[0400] In this example, gRNAs targeting the human PCSK9 locus were designed using gRNA scaffold 316 and chemically synthesized. The sequences of the PCSK9-targeting gRNAs with the v1 modification profile (as described in Example 7, below) are listed in Table 26. Schematics of the sites of chemical modifications for the v1-v6 profiles of the gRNA scaffold variant 316 are shown in FIG. 13A and FIG. 13B.

TABLE 26
Sequences of chemically modified gRNAs targeting the human PCSK9 locus
assayed in this example

| gRNA ID (scaffold | | | SEQ ID |
|---|---|---|---|
| variant-spacer) | Target | gRNA sequence | NO |
| 316-6.1 (v1) | human | mA*mC*mU*GGCGCUUCUAUCUGAUUACUCUGAGCGCCAU | 19759 |
| | PCSK9 | CACCAGCGACUAUGUCGUAGUGGGUAAAGCUCCCUCUUCG | |
| | | GAGGGAGCAUCAGAGGAGGAGGACGGCCUGGC*mC*mG*m | |
| | | A | |
| 316-6.8 (v1) | human | mA*mC*mU*GGCGCUUCUAUCUGAUUACUCUGAGCGCCAU | 19760 |
| | PCSK9 | CACCAGCGACUAUGUCGUAGUGGGUAAAGCUCCCUCUUCG | |
| | | GAGGGAGCAUCAGAGUGGCUUCCUGGUGAAGA*mU*mG*m | |
| | | A | |

### Formulation of Lipid Nanoparticles (LNPs):

[0401] CasX mRNA and gRNA were encapsulated into LNPs using GenVoy-ILM™ lipids on the Precision NanoSystems Inc. (PNI) Ignite™ Benchtop System and following the manufacturer's guidelines. GenVoy-ILM™ lipids are manufactured by PNI, with a proprietary composition of ionizable lipid: DSPC: cholesterol: stabilizer at 50:10:37.5:2.5 mol %.

[0402] Briefly, to formulate LNPs, equal mass ratios of CasX mRNA and gRNA were diluted in PNI Formulation Buffer, pH 4.0. GenVoy-ILM™ was diluted 1:1 in anhydrous ethanol. mRNA/gRNA co-formulations were performed using a 6:1 N/P ratio. The RNA and lipids were run through a PNI laminar flow cartridge at a predetermined flow rate ratio (RNA: Genvoy-ILM™) on the PNI Ignite™ Benchtop System. After formulation, the LNPs were diluted in PBS, pH 7.4, to decrease the ethanol concentration and increase the pH, which increases the stability of the particles. Buffer exchange of the mRNA/sgRNA-LNPs was achieved by overnight dialysis into PBS, pH 7.4, at 4° C. using 10k Slide-A-Lyzer™ Dialysis Cassettes (Thermo Scientific™). Following dialysis, the mRNA/gRNA-LNPs were concentrated to >0.5 mg/mL using 100 kDa Amicon®-Ultra Centrifugal Filters (Millipore) and then filter-sterilized. Formulated LNPs were analyzed on a Stunner (Unchained Labs) to determine their diameter and polydispersity index (PDI). Encapsulation efficiency and RNA concentration was determined by RiboGreen™ assay using Invitrogen's Quant-iT™ Ribogreen™ RNA assay kit. LNPs were used in various experiments as described herein to deliver CasX mRNA and gRNA to target cells and tissue.

Delivery of LNPs Encapsulating CasX mRNA and Targeting gRNA into Primary Human Hepatocytes:

[0403] Two lots (lot #31 and lot #51) of primary human hepatocytes derived from two different donors (Lonza Biologics), were used in these experiments to assess CasX:gRNA-mediated editing at the human PCSK9 locus when delivered by LNPs. For each lot, ˜50,000 cells, cultured in Williams' E media supplemented with FBS, PenStrep, L-glutamine, ITS (insulin, transferrin, sodium selenite), dexamethasone, and Z-VAD-FMK, were seeded per well in a 96-well plate. The next day, seeded cells were treated with varying concentrations of LNPs, which were prepared in five 3-fold serial dilutions starting at 1,200 ng. These LNPs were formulated to encapsulate CasX 515 or CasX 812 mRNA and a PCSK9-targeting gRNA incorporating scaffold variant 316 with either spacer 6.1 or 6.8 (v1; see Table 25). Media was changed two days after LNP treatment, and cells were cultured for three additional days prior to harvesting 1) the media supernatant to measure PCSK9 secretion levels and 2) treated cells for gDNA extraction for editing assessment at the PCSK9 locus by NGS. Briefly, for editing assessment, amplicons were amplified from 200 ng of extracted gDNA with primers targeting the human PCSK9 locus and processed as described in Example 5. PCSK9 secretion levels were measured by ELISA using the BioLegendR ELISA MAX™ kit following the manufacturer's instructions. Treatment with LNPs co-encapsulating a non-targeting gRNA with CasX 515 mRNA served as an experimental control.

### Results

[0404] Two lots of primary human hepatocytes were treated with LNPs, which co-encapsulated either CasX 515 or CasX 812 mRNA and a PCSK9-targeting gRNA, at various doses and harvested five days post-treatment to assess effects on PCSK9 secretion (FIGS. 3A-3D) and editing at the PCSK9 locus (FIGS. 4A-4C). The results in FIGS. 3A-3D demonstrate that the effects from treatment with LNPs to deliver either CasX 515 or CasX 812 mRNA were comparable, such that similar levels of reduced PCSK9 secretion were observed in a dose-dependent manner. Furthermore, the data in FIGS. 4A-4C show that use of either CasX 515 or CasX 812 mRNA resulted in similar levels of editing at the PCSK9 locus in primary human hepatocytes in a dose-dependent manner, corroborating findings observed in FIGS. 3A-3D.

[0405] Altogether, the results from these experiments demonstrate that delivery of LNPs encapsulating an mRNA encoding CasX and a chemically-modified PCSK9-targeting gRNA was able to induce efficacious editing at the endogenous human PCSK9 locus in primary human hepatocytes, which resulted in substantial reduction in secreted PCSK9 levels.

### Example 7: Design and Assessment of Modified gRNAs in Improving Editing when Delivered Together with CasX mRNA In Vitro and In Vivo

[0406] Experiments were performed to identify new gRNA variant sequences and demonstrate that chemical modifications of these gRNA variants enhance the editing efficiency of the CasX:gRNA system when delivered in vitro in conjunction with CasX mRNA.

### Materials and Methods

Synthesis of gRNAs:

[0407] All gRNAs tested in this example were chemically synthesized and were derived from gRNA scaffolds 174, 235, and 316. The sequences of gRNA scaffolds 174, 235, and 316 and their chemical modification profiles are listed in Table 27. The sequences of the resulting gRNAs, including spacers targeting PCSK9, B2M, or ROSA26, and their chemical modification profiles assayed in this example are listed in Table 28. A schematic of the structure of gRNA scaffold variants 174, 235, and 316 are shown in FIGS. 8A-8C, respectively, and the sites of chemical modifications of the gRNA variants are shown schematically in FIGS. 5A, 5B, 7, 13A, and 13B.

TABLE 27
Sequences of gRNA scaffolds with their different chemical modification
profiles (denoted by version number), where “NNNNNNNNNNNNNNNNNNNN” is a
spacer placeholder. Chemical modifications: * = phosphorothioate bond; m = 2′OMe
modification

| gRNA | | SEQ ID |
|---|---|---|
| scaffold | | NO |
| (version) | gRNA sequence | |
| 174 (v0) | ACUGGCGCUUUUAUCUGAUUACUUUGAGAGCCAUCACCAGCGACUAUGUCGUAGUGG | 19703 |
| | GUAAAGCUCCCUCUUCGGAGGGAGCAUCAAAGNNNNNNNNNNNNNNNNNNNN | |
| 174 (v1) | mA*mC*mU*GGCGCUUUUAUCUGAUUACUUUGAGAGCCAUCACCAGCGACUAUGUCG | 19704 |
| | UAGUGGGUAAAGCUCCCUCUUCGGAGGGAGCAUCAAAGNNNNNNNNNNNNNNNNNmN | |
| | *mN*mN | |
| 174 (v2) | mA*mC*mU*GGCGCUUUUAUCUGAUUACUUUGAGAGCCAUCACCAGCGACUAUGUCG | 19705 |
| | UAGUGGGUAAAGCUCCCUCUUCGGAGGGAGCAUCAAAGNNNNNNNNNNNNNNNNNNN | |
| | N*mU*mU*mU | |
| 174 (v3) | mA*mC*mU*mGmGmCmGmCmUmUmUmUmAmUmCmUmGmAmUUACUUUGmAmGmAmGm | 19706 |
| | CmCmAmUmCmAmCmCAGCGAmCmUAUmGmUmCmGUAGUGmGmGmUmAmAmAmGmCmU | |
| | mCmCmCmUmCmUmUmCmGmGmAmGmGmGmAmGmCmAmUmCmAAAGNNNNNNNNNNNN | |
| | NNNNNmN*mN*mN | |
| 174 (v4) | mA*mC*mU*mGmGmCmGmCUUUUmAmUmCmUmGmAmUUACUUUGmAmGmAmGmCmCm | 19707 |
| | AmUmCmAmCmCAGCGAmCmUAUmGmUmCmGUAGUGmGmGmUmAmAmAmGmCmUmCmC | |
| | mCmUmCmUmUmCmGmGmAmGmGmGmAmGmCmAmUCAAAGNNNNNNNNNNNNNNNNNm | |
| | N*mN*mN | |
| 174 (v5) | mA*mC*mU*GGCGCUUUUAUCUGAUUACUUUGAGAGCCAUCACCAGCGAmCmUAUmG | 19708 |
| | mUmCmGUAGUGGGUAAAmGmCmUmCmCmCmUmCmUmUmCmGmGmAmGmGmGmAmGmC | |
| | AUCAAAGNNNNNNNNNNNNNNNNNmN*mN*mN | |
| 174 (v6) | mA*mC*mU*GGCGCUUUUAUCUGAUUACUUUGAGAGCCAUCACCAGCGACUAUGUCG | 19709 |
| | UAGUGGGUAAAmGmCmUmCmCmCmUmCmUmUmCmGmGmAmGmGmGmAmGmCAUCAAA | |
| | GNNNNNNNNNNNNNNNNNmN*mN*mN | |
| 174 (v7) | mA*mC*mU*GGmCGmCmUUUUAmUmCUGAUUACUUUGmAmGAGCCmAmUmCmAmCCA | 19710 |
| | GCmGmAmCmUAUmGmUmCmGUAGUGGmGmUAmAmAmGmCmUmCmCmCmUmCmUmUmC | |
| | mGmGmAmGmGmGmAmGmCmAmUCAAAGNNNNNNNNNNNNNNNNN*mN*mN*mN | |
| 174 (v8) | mA*mC*mU*GGCGCUUUUAUCUGAUUACUUUGAGAGCCmAmUmCmAmCCAGCmGmAm | 19711 |
| | CmUAUmGmUmCmGUAGUGGmGmUmAmAAmGmCmUmCmCmCmUmCmUmUmCmGmGmAm | |
| | GmGmGmAmGmCmAmUCAAAGNNNNNNNNNNNNNNNNN*mN*mN*mN | |
| 174 (v9) | mA*mC*mU*GGmCmGCmUUUUAmUmCUGAUUACUUUGmAmGAGCCAUCACCAGCmGm | 19712 |
| | AmCmUAUmGmUmCmGUAGUGGGUAAAmGmCmUmCmCmCmUmCmUmUmCmGmGmAmGm | |
| | GmGmAmGmCAUCAAAGNNNNNNNNNNNNNNNNN*mN*mN*mN | |
| 235 (v0) | ACUGGCGCUUCUAUCUGAUUACUCUGAGCGCCAUCACCAGCGACUAUGUCGUAGUGG | 19713 |
| | GUAAAGCCGCUUACGGACUUCGGUCCGUAAGAGGCAUCAGAGNNNNNNNNNNNNNNN | |
| | NNNNN | |
| 235 (v1) | mA*mC*mU*GGCGCUUCUAUCUGAUUACUCUGAGCGCCAUCACCAGCGACUAUGUCG | 19714 |
| | UAGUGGGUAAAGCCGCUUACGGACUUCGGUCCGUAAGAGGCAUCAGAGNNNNNNNNN | |
| | NNNNNNNNmN*mN*mN | |
| 235 (v2) | mA*mC*mU*GGCGCUUCUAUCUGAUUACUCUGAGCGCCAUCACCAGCGACUAUGUCG | 19715 |
| | UAGUGGGUAAAGCCGCUUACGGACUUCGGUCCGUAAGAGGCAUCAGAGNNNNNNNNN | |
| | NNNNNNNNNNN*mU*mU*mU | |
| 235 (v3) | mA*mC*mU*mGmGmCmGmCmUmUmCmUmAmUmCmUmGmAmUUACUCUGmAmGmCmGm | 19716 |
| | CmCmAmUmCmAmCmCAGCGAmCmUAUmGmUmCmGUAGUGmGmGmUmAmAmAmGmCmC | |
| | mGmCmUmUmAmCmGmGmAmCmUmUmCmGmGmUmCmCmGmUmAmAmGmAmGmGmCmAm | |
| | UmCmAGAGNNNNNNNNNNNNNNNNNmN*mN*mN | |
| 235 (v4) | mA*mC*mU*mGmGmCmGmCUUCUmAmUmCmUmGmAmUUACUCUGmAmGmCmGmCmCm | 19717 |
| | AmUmCmAmCmCAGCGAmCmUAUmGmUmCmGUAGUGmGmGmUmAmAmAmGmCmCmGmC | |
| | mUmUmAmCmGmGmAmCmUmUmCmGmGmUmCmCmGmUmAmAmGmAmGmGmCmAmUCAG | |
| | AGNNNNNNNNNNNNNNNNNmN*mN*mN | |
| 235 (v5) | mA*mC*mU*GGCGCUUCUAUCUGAUUACUCUGAGCGCCAUCACCAGCGAmCmUAUmG | 19718 |
| | mUmCmGUAGUGGGUmAmAmAmGmCmCmGmCmUmUmAmCmGmGmAmCmUmUmCmGmGm | |
| | UmCmCmGmUmAmAmGmAmGmGmCAUCAGAGNNNNNNNNNNNNNNNNNmN*mN*mN | |
| 235 (v6) | mA*mC*mU*GGCGCUUCUAUCUGAUUACUCUGAGCGCCAUCACCAGCGACUAUGUCG | 19719 |
| | UAGUGGGUmAmAmAmGmCmCmGmCmUmUmAmCmGmGmAmCmUmUmCmGmGmUmCmCm | |
| | GmUmAmAmGmAmGmGmCAUCAGAGNNNNNNNNNNNNNNNNNmN*mN*mN | |
| 235 (v7) | mA*mC*mU*GGmCGmCmUUCUAmUmCUGAUUACUCUGmAmGCGCCmAmUmCmAmCCA | 19720 |
| | GCmGmAmCmUAUmGmUmCmGUAGUGGmGmUmAmAAmGmCmCmGmCmUmUmAmCmGmG | |
| | mAmCmUmUmCmGmGmUmCmCmGmUmAmAmGmAmGmGmCmAmUCAGAGNNNNNNNNNN | |
| | NNNNNNN*mN*mN*mN | |
| 235 (v8) | mA*mC*mU*GGCGCUUCUAUCUGAUUACUCUGAGCGCCmAmUmCmAmCCAGCmGmAm | 19721 |
| | CmUAUmGmUmCmGUAGUGGmGmUmAmAAmGmCmCmGmCmUmUmAmCmGmGmAmCmUm | |
| | UmCmGmGmUmCmCmGmUmAmAmGmAmGmGmCmAmUCAGAGNNNNNNNNNNNNNNNNN | |
| | *mN*mN*mN | |
| 235 (v9) | mA*mC*mU*GGmCGmCmUUCUAmUmCUGAUUACUCUGmAmGCGCCAUCACCAGCmGm | 19722 |
| | AmCmUAUmGmUmCmGUAGUGGGUAAAmGmCmCmGmCmUmUmAmCmGmGmAmCmUmUm | |
| | CmGmGmUmCmCmGmUmAmAmGmAmGmGmCAUCAGAGNNNNNNNNNNNNNNNNN*mN* | |
| | mN*mN | |
| 316 (v0) | ACUGGCGCUUCUAUCUGAUUACUCUGAGCGCCAUCACCAGCGACUAUGUCGUAGUGG | 19723 |
| | GUAAAGCUCCCUCUUCGGAGGGAGCAUCAGAGNNNNNNNNNNNNNNNNNNNN | |
| 316 (v1) | mA*mC*mU*GGCGCUUCUAUCUGAUUACUCUGAGCGCCAUCACCAGCGACUAUGUCG | 19724 |
| | UAGUGGGUAAAGCUCCCUCUUCGGAGGGAGCAUCAGAGNNNNNNNNNNNNNNNNN*m | |
| | N*mN*mN | |
| 316 (v2) | mA*mC*mU*GGCGCUUCUAUCUGAUUACUCUGAGCGCCAUCACCAGCGACUAUGUCG | 19725 |
| | UAGUGGGUAAAGCUCCCUCUUCGGAGGGAGCAUCAGAGNNNNNNNNNNNNNNNNNNN | |
| | N*mU*mU*mU | |
| 316 (v3) | mA*mC*mU*mGmGmCmGmCmUmUmCmUmAmUmCmUmGmAmUUACUCUGmAmGmCmGm | 19726 |
| | CmCmAmUmCmAmCmCAGCGAmCmUAUmGmUmCmGUAGUGmGmGmUmAmAmAmGmCmU | |
| | mCmCmCmUmCmUmUmCmGmGmAmGmGmGmAmGmCmAmUmCmAGAGNNNNNNNNNNNN | |
| | NNNNN*mN*mN*mN | |
| 316 (v4) | mA*mC*mU*mGmGmCmGmCUUCUmAmUmCmUmGmAmUUACUCUGmAmGmCmGmCmCm | 19727 |
| | AmUmCmAmCmCAGCGAmCmUAUmGmUmCmGUAGUGmGmGmUmAmAmAmGmCmUmCmC | |
| | mCmUmCmUmUmCmGmGmAmGmGmGmAmGmCmAmUCAGAGNNNNNNNNNNNNNNNNN* | |
| | mN*mN*mN | |
| 316 (v5) | mA*mC*mU*GGCGCUUCUAUCUGAUUACUCUGAGCGCCAUCACCAGCGAmCmUAUmG | 19728 |
| | mUmCmGUAGUGGGUAAAmGmCmUmCmCmCmUmCmUmUmCmGmGmAmGmGmGmAmGmC | |
| | AUCAGAGNNNNNNNNNNNNNNNNN*mN*mN*mN | |
| 316 (v6) | mA*mC*mU*GGCGCUUCUAUCUGAUUACUCUGAGCGCCAUCACCAGCGACUAUGUCG | 19729 |
| | UAGUGGGUAAAmGmCmUmCmCmCmUmCmUmUmCmGmGmAmGmGmGmAmGmCAUCAGA | |
| | GNNNNNNNNNNNNNNNNN*mN*mN*mN | |
| 316 (v7) | mA*mC*mU*GGmCGmCmUUCUAmUmCUGAUUACUCUGmAmGCGCCmAmUmCmAmCCA | 19730 |
| | GCmGmAmCmUAUmGmUmCmGUAGUGGmGmUmAmAAmGmCmUmCmCmCmUmCmUmUmC | |
| | mGmGmAmGmGmGmAmGmCmAmUCAGAGNNNNNNNNNNNNNNNNN*mN*mN*mN | |
| 316 (v8) | mA*mC*mU*GGCGCUUCUAUCUGAUUACUCUGAGCGCCmAmUmCmAmCCAGCmGmAm | 19731 |
| | CmUAUmGmUmCmGUAGUGGmGmUmAmAAmGmCmUmCmCmCmUmCmUmUmCmGmGmAm | |
| | GmGmGmAmGmCmAmUCAGAGNNNNNNNNNNNNNNNNN*mN*mN*mN | |
| 316 (v9) | mA*mC*mU*GGmCGmCmUUCUAmUmCUGAUUACUCUGmAmGCGCCAUCACCAGCmGm | 19732 |
| | AmCmUAUmGmUmCmGUAGUGGGUAAAmGmCmUmCmCmCmUmCmUmUmCmGmGmAmGm | |
| | GmGmAmGmCAUCAGAGNNNNNNNNNNNNNNNNN*mN*mN*mN | |

TABLE 28
Sequences of gRNAs with their different chemical modification profiles
(denoted by version number) assayed in this example. Chemical modifications: * =
phosphorothioate bond; m = 2′OMe modification

| gRNA ID | | | |
|---|---|---|---|
| (scaffold | | | SEQ |
| variant-spacer) | Target | gRNA sequence | ID NO |
| 174-6.7 | human | ACUGGCGCUUUUAUCUGAUUACUUUGAGAGCCAUCACCAGCGAC | 19761 |
| (v0) | PCSK9 | UAUGUCGUAGUGGGUAAAGCUCCCUCUUCGGAGGGAGCAUCAAA | |
| | | GUCCUGGCUUCCUGGUGAAGA | |
| 174-6.7 | human | mA*mC*mU*GGCGCUUUUAUCUGAUUACUUUGAGAGCCAUCACC | 19762 |
| (v1) | PCSK9 | AGCGACUAUGUCGUAGUGGGUAAAGCUCCCUCUUCGGAGGGAGC | |
| | | AUCAAAGUCCUGGCUUCCUGGUGAmA*mG*mA | |
| 174-6.8 | human | ACUGGCGCUUUUAUCUGAUUACUUUGAGAGCCAUCACCAGCGAC | 19763 |
| (v0) | PCSK9 | UAUGUCGUAGUGGGUAAAGCUCCCUCUUCGGAGGGAGCAUCAAA | |
| | | GUGGCUUCCUGGUGAAGAUGA | |
| 174-6.8 | human | mA*mC*mU*GGCGCUUUUAUCUGAUUACUUUGAGAGCCAUCACC | 19764 |
| (v1) | PCSK9 | AGCGACUAUGUCGUAGUGGGUAAAGCUCCCUCUUCGGAGGGAGC | |
| | | AUCAAAGUGGCUUCCUGGUGAAGAmU*mG*mA | |
| 174-7.9 | human | ACUGGCGCUUUUAUCUGAUUACUUUGAGAGCCAUCACCAGCGAC | 19765 |
| (v0) | B2M | UAUGUCGUAGUGGGUAAAGCUCCCUCUUCGGAGGGAGCAUCAAA | |
| | | GGUGUAGUACAAGAGAUAGAA | |
| 174-7.9 | human | mA*mC*mU*GGCGCUUUUAUCUGAUUACUUUGAGAGCCAUCACC | 19766 |
| (v1) | B2M | AGCGACUAUGUCGUAGUGGGUAAAGCUCCCUCUUCGGAGGGAGC | |
| | | AUCAAAGGUGUAGUACAAGAGAUAmG*mA*mA | |
| 316-6.7 | human | ACUGGCGCUUCUAUCUGAUUACUCUGAGCGCCAUCACCAGCGAC | 19767 |
| (v0) | PCSK9 | UAUGUCGUAGUGGGUAAAGCUCCCUCUUCGGAGGGAGCAUCAGA | |
| | | GUCCUGGCUUCCUGGUGAAGA | |
| 316-6.7 | human | mA*mC*mU*GGCGCUUCUAUCUGAUUACUCUGAGCGCCAUCACC | 19768 |
| (v1′) | PCSK9 | AGCGACUAUGUCGUAGUGGGUAAAGCUCCCUCUUCGGAGGGAGC | |
| | | AUCAGAGUCCUGGCUUCCUGGUGAmA*mG*mA | |
| 316-6.8 | human | ACUGGCGCUUCUAUCUGAUUACUCUGAGCGCCAUCACCAGCGAC | 19769 |
| (v0) | PCSK9 | UAUGUCGUAGUGGGUAAAGCUCCCUCUUCGGAGGGAGCAUCAGA | |
| | | GUGGCUUCCUGGUGAAGAUGA | |
| 316-6.8 | human | mA*mC*mU*GGCGCUUCUAUCUGAUUACUCUGAGCGCCAUCACC | 19770 |
| (v1′) | PCSK9 | AGCGACUAUGUCGUAGUGGGUAAAGCUCCCUCUUCGGAGGGAGC | |
| | | AUCAGAGUGGCUUCCUGGUGAAGAmU*mG*mA | |
| 316-7.9 | human | ACUGGCGCUUCUAUCUGAUUACUCUGAGCGCCAUCACCAGCGAC | 19771 |
| (v0) | B2M | UAUGUCGUAGUGGGUAAAGCUCCCUCUUCGGAGGGAGCAUCAGA | |
| | | GGUGUAGUACAAGAGAUAGAA | |
| 316-7.9 | human | mA*mC*mU*GGCGCUUCUAUCUGAUUACUCUGAGCGCCAUCACC | 19772 |
| (v1′) | B2M | AGCGACUAUGUCGUAGUGGGUAAAGCUCCCUCUUCGGAGGGAGC | |
| | | AUCAGAGGUGUAGUACAAGAGAUAmG*mA*mA | |
| 174-7.37 | human | ACUGGCGCUUUUAUCUgAUUACUUUGAGAGCCAUCACCAGCGAC | 19773 |
| (v0) | B2M | UAUGUCGUAgUGGGUAAAGCUCCCUCUUCGGAGGGAGCAUCAAA | |
| | | GGGCCGAGAUGUCUCGCUC | |
| 174-7.37 | human | mA*mC*mU*GGCGCUUUUAUCUgAUUACUUUGAGAGCCAUCACC | 19774 |
| (v1*) | B2M | AGCGACUAUGUCGUAgUGGGUAAAGCUCCCUCUUCGGAGGGAGC | |
| | | AUCAAAGGGCCGAGAUGUCUCG*mC*mU*mC | |
| 235-6.7 | human | ACUGGCGCUUCUAUCUGAUUACUCUGAGCGCCAUCACCAGCGAC | 19775 |
| (v0) | PCSK9 | UAUGUCGUAGUGGGUAAAGCCGCUUACGGACUUCGGUCCGUAAG | |
| | | AGGCAUCAGAGUCCUGGCUUCCUGGUGAAGA | |
| 235-6.7 | human | mA*mC*mU*GGCGCUUCUAUCUGAUUACUCUGAGCGCCAUCACC | 19776 |
| (v1) | PCSK9 | AGCGACUAUGUCGUAGUGGGUAAAGCCGCUUACGGACUUCGGUC | |
| | | CGUAAGAGGCAUCAGAGUCCUGGCUUCCUGGUGAmA*mG*mA | |
| 235-6.7 | human | mA*mC*mU*GGCGCUUCUAUCUGAUUACUCUGAGCGCCAUCACC | 19777 |
| (v2) | PCSK9 | AGCGACUAUGUCGUAGUGGGUAAAGCCGCUUACGGACUUCGGUC | |
| | | CGUAAGAGGCAUCAGAGUCCUGGCUUCCUGGUGAAGAU*mU*mU | |
| | | *mU | |
| 235-6.7 | human | mA*mC*mU*mGmGmCmGmCmUmUmCmUmAmUmCmUmGmAmUUAC | 19778 |
| (v3) | PCSK9 | UCUGmAmGmCmGmCmCmAmUmCmAmCmCAGCGAmCmUAUmGmUm | |
| | | CmGUAGUGmGmGmUmAmAmAmGmCmCmGmCmUmUmAmCmGmGmA | |
| | | mCmUmUmCmGmGmUmCmCmGmUmAmAmGmAmGmGmCmAmUmCmA | |
| | | GAGUCCUGGCUUCCUGGUGAmA*mG*mA | |
| 235-6.7 | human | mA*mC*mU*mGmGmCmGmCUUCUmAmUmCmUmGmAmUUACUCUG | 19779 |
| (v4) | PCSK9 | mAmGmCmGmCmCmAmUmCmAmCmCAGCGAmCmUAUmGmUmCmGU | |
| | | AGUGmGmGmUmAmAmAmGmCmCmGmCmUmUmAmCmGmGmAmCmU | |
| | | mUmCmGmGmUmCmCmGmUmAmAmGmAmGmGmCmAmUCAGAGUCC | |
| | | UGGCUUCCUGGUGAmA*mG*mA | |
| 235-6.7 | human | mA*mC*mU*GGCGCUUCUAUCUGAUUACUCUGAGCGCCAUCACC | 19780 |
| (v5) | PCSK9 | AGCGAmCmUAUmGmUmCmGUAGUGGGUmAmAmAmGmCmCmGmCm | |
| | | UmUmAmCmGmGmAmCmUmUmCmGmGmUmCmCmGmUmAmAmGmAm | |
| | | GmGmCAUCAGAGUCCUGGCUUCCUGGUGAmA*mG*mA | |
| 235-6.7 | human | mA*mC*mU*GGCGCUUCUAUCUGAUUACUCUGAGCGCCAUCACC | 19781 |
| (v6) | PCSK9 | AGCGACUAUGUCGUAGUGGGUmAmAmAmGmCmCmGmCmUmUmAm | |
| | | CmGmGmAmCmUmUmCmGmGmUmCmCmGmUmAmAmGmAmGmGmCA | |
| | | UCAGAGUCCUGGCUUCCUGGUGAmA*mG*mA | |
| 235-6.8 | human | ACUGGCGCUUCUAUCUGAUUACUCUGAGCGCCAUCACCAGCGAC | 19782 |
| (v0) | PCSK9 | UAUGUCGUAGUGGGUAAAGCCGCUUACGGACUUCGGUCCGUAAG | |
| | | AGGCAUCAGAGUGGCUUCCUGGUGAAGAUGA | |
| 235-6.8 | human | mA*mC*mU*GGCGCUUCUAUCUGAUUACUCUGAGCGCCAUCACC | 19783 |
| (v1) | PCSK9 | AGCGACUAUGUCGUAGUGGGUAAAGCCGCUUACGGACUUCGGUC | |
| | | CGUAAGAGGCAUCAGAGUGGCUUCCUGGUGAAGAmU*mG*mA | |
| 235-6.8 | human | mA*mC*mU*GGCGCUUCUAUCUGAUUACUCUGAGCGCCAUCACC | 19784 |
| (v2) | PCSK9 | AGCGACUAUGUCGUAGUGGGUAAAGCCGCUUACGGACUUCGGUC | |
| | | CGUAAGAGGCAUCAGAGUGGCUUCCUGGUGAAGAUGA*mU*mU* | |
| | | mU | |
| 235-6.8 | human | mA*mC*mU*mGmGmCmGmCmUmUmCmUmAmUmCmUmGmAmUUAC | 19785 |
| (v3) | PCSK9 | UCUGmAmGmCmGmCmCmAmUmCmAmCmCAGCGAmCmUAUmGmUm | |
| | | CmGUAGUGmGmGmUmAmAmAmGmCmCmGmCmUmUmAmCmGmGmA | |
| | | mCmUmUmCmGmGmUmCmCmGmUmAmAmGmAmGmGmCmAmUmCmA | |
| | | GAGUGGCUUCCUGGUGAAGAmU*mG*mA | |
| 235-6.8 | human | mA*mC*mU*mGmGmCmGmCUUCUmAmUmCmUmGmAmUUACUCUG | 19786 |
| (v4) | PCSK9 | mAmGmCmGmCmCmAmUmCmAmCmCAGCGAmCmUAUmGmUmCmGU | |
| | | AGUGmGmGmUmAmAmAmGmCmCmGmCmUmUmAmCmGmGmAmCmU | |
| | | mUmCmGmGmUmCmCmGmUmAmAmGmAmGmGmCmAmUCAGAGUGG | |
| | | CUUCCUGGUGAAGAmU*mG*mA | |
| 235-6.8 | human | mA*mC*mU*GGCGCUUCUAUCUGAUUACUCUGAGCGCCAUCACC | 19787 |
| (v5) | PCSK9 | AGCGAmCmUAUmGmUmCmGUAGUGGGUmAmAmAmGmCmCmGmCm | |
| | | UmUmAmCmGmGmAmCmUmUmCmGmGmUmCmCmGmUmAmAmGmAm | |
| | | GmGmCAUCAGAGUGGCUUCCUGGUGAAGAmU*G*mA | |
| 235-6.8 | human | mA*mC*mU*GGCGCUUCUAUCUGAUUACUCUGAGCGCCAUCACC | 19788 |
| (v6) | PCSK9 | AGCGACUAUGUCGUAGUGGGUmAmAmAmGmCmCmGmCmUmUmAm | |
| | | CmGmGmAmCmUmUmCmGmGmUmCmCmGmUmAmAmGmAmGmGmCA | |
| | | UCAGAGUGGCUUCCUGGUGAAGAmU*mG*mA | |
| 316-27.107 | mouse | ACUGGCGCUUCUAUCUGAUUACUCUGAGCGCCAUCACCAGCGAC | 19789 |
| (v0) | PCSK9 | UAUGUCGUAGUGGGUAAAGCUCCCUCUUCGGAGGGAGCAUCAGA | |
| | | GCUGGCUUCUUGGUGAAGAUG | |
| 316-27.107 | mouse | mA*mC*mU*GGCGCUUCUAUCUGAUUACUCUGAGCGCCAUCACC | 19790 |
| (v1) | PCSK9 | AGCGACUAUGUCGUAGUGGGUAAAGCUCCCUCUUCGGAGGGAGC | |
| | | AUCAGAGCUGGCUUCUUGGUGAAG*mA*mU*mG | |
| 316-27.107 | mouse | mA*mC*mU*GGmCGmCmUUCUAmUmCUGAUUACUCUGmAmGCGC | 19791 |
| (v7) | PCSK9 | CmAmUmCmAmCCAGCmGmAmCmUAUmGmUmCmGUAGUGGmGmUm | |
| | | AmAAmGmCmUmCmCmCmUmCmUmUmCmGmGmAmGmGmGmAmGmC | |
| | | mAmUCAGAGCUGGCUUCUUGGUGAAG*mA*mU*mG | |
| 316-27.107 | mouse | mA*mC*mU*GGCGCUUCUAUCUGAUUACUCUGAGCGCCmAmUmC | 19792 |
| (v8) | PCSK9 | mAmCCAGCmGmAmCmUAUmGmUmCmGUAGUGGmGmUmAmAAmGm | |
| | | CmUmCmCmCmUmCmUmUmCmGmGmAmGmGmGmAmGmCmAmUCAG | |
| | | AGCUGGCUUCUUGGUGAAG*mA*mU*mG | |
| 316-27.107 | mouse | mA*mC*mU*GGmCGmCmUUCUAmUmCUGAUUACUCUGmAmGCGC | 19793 |
| (v9*) | PCSK9 | CAUCACCAGCmGmAmCmUAUmGmUmCmGUAGUGGGUAAAmGmCm | |
| | | UmCmCmCmUmCmUmUmCmGmGmAmGmGmGmAmGmCAUCAGAGCU | |
| | | GGCUUCUUGGUGAA*mG*mA*mU*mG | |
| 174-35.2 (v0) | ROSA26 | ACUGGCGCUUUUAUCUGAUUACUUUGAGAGCCAUCACCAGCGAC | 19794 |
| | | UAUGUCGUAGUGGGUAAAGCUCCCUCUUCGGAGGGAGCAUCAAA | |
| | | GAGAAGAUGGGCGGGAGUCUU | |
| 174-35.2 (v2) | ROSA26 | mA*mC*mU*GGCGCUUUUAUCUGAUUACUUUGAGAGCCAUCACC | 19795 |
| | | AGCGACUAUGUCGUAGUGGGUAAAGCUCCCUCUUCGGAGGGAGC | |
| | | AUCAAAGAGAAGAUGGGGGGGAGUCUU*mU*mU*mU | |
| 316-35.2 (v0) | ROSA26 | ACUGGCGCUUCUAUCUGAUUACUCUGAGCGCCAUCACCAGCGAC | 19796 |
| | | UAUGUCGUAGUGGGUAAAGCUCCCUCUUCGGAGGGAGCAUCAGA | |
| | | GAGAAGAUGGGCGGGAGUCUU | |
| 316-35.2 (v1) | ROSA26 | mA*mC*mU*GGCGCUUCUAUCUGAUUACUCUGAGCGCCAUCACC | 19797 |
| | | AGCGACUAUGUCGUAGUGGGUAAAGCUCCCUCUUCGGAGGGAGC | |
| | | AUCAGAGAGAAGAUGGGGGGAGU*mC*mU*mU | |
| 316-35.2 (v5) | ROSA26 | mA*mC*mU*GGCGCUUCUAUCUGAUUACUCUGAGCGCCAUCACC | 19798 |
| | | AGCGAmCmUAUmGmUmCmGUAGUGGGUAAAmGmCmUmCmCmCmU | |
| | | mCmUmUmCmGmGmAmGmGmGmAmGmCAUCAGAGAGAAGAUGGGC | |
| | | GGGAGU*mC*mU*mU | |

Note that gRNAs annotated with a v1′ design contain one less phosphorothioate bond on the 3′ end of the gRNA. gRNAs annotated with v1* contain one extra phosphorothioate bond on the 3′end of the gRNA. gRNAs annotated with a v9* contain an extra phosphorothioate bond on the 3′ end of the gRNA.

Biochemical Characterization of gRNA Activity:

[0408] Target DNA oligonucleotides with fluorescent moieties on the 5′ ends were purchased commercially (sequences listed in Table 29). Double-stranded DNA (dsDNA) targets were formed by mixing the oligos in a 1:1 ratio in 1× cleavage buffer (20 mM Tris HCl pH 7.5, 150 mM NaCl, 1 mM TCEP, 5% glycerol, 10 mM MgCl₂), following by heating to 95° C. for 10 minutes, and then allowing the solution to cool to room temperature. CasX ribonucleoproteins (RNPs) were reconstituted with CasX 491 and the indicated gRNAs at a final concentration of 1 μM with 1,2-fold excess of the indicated gRNA in 1× cleavage buffer. RNPs were allowed to form at 37° C. for 10 minutes.

[0409] The effects of various structural and chemical modifications to the gRNA scaffold on the cleavage rate of CasX 491 RNPs were determined. Cleavage reactions were prepared with final RNP concentrations of 200 nM and final target concentrations of 10 nM, and reactions were carried out at 16° C. and initiated by the addition of the labeled target DNA substrate (Table 29). Aliquots of reactions were taken at 0.25, 0.5, 1, 2, 5, and 10 minutes and quenched by adding an equal volume of 95% formamide with 20 mM EDTA. Samples were denatured at 95° C. for 10 minutes and resolved on a 10% urea-PAGE gel. Gels were imaged on a Typhoon™ laser-scanner platform and quantified using ImageQuant™ TL 8.2 image analysis software (Cytiva™). The apparent first-order rate constant of non-target strand cleavage (kcleave-) was determined for each CasX:gRNA combination.

[0410] To determine the competent fraction formed by each gRNA, cleavage reactions were prepared with final RNP concentrations of 100 nM and final target concentrations of 100 nM. Reactions were carried out at 37° C. and initiated by the addition of the labeled target substrate (Table 29). Aliquots were taken at 0.5, 1, 2, 5, 10, and 30 minutes and quenched by adding an equal volume of 95% formamide with 25 mM EDTA. Samples were denatured by heating at 95° C. for 10 minutes and resolved on a 10% urea-PAGE gel. Gels were imaged and quantified as above. CasX was assumed to act as a single-turnover enzyme under the assayed conditions, as indicated by the observation that sub-stoichiometric amounts of enzyme would fail to cleave a greater-than-stoichiometric amount of target substrate even under extended time-scales, and instead would approach a plateau that scaled with the amount of enzyme present. Thus, the fraction of target substrate cleaved over long time-scales by an equimolar amount of RNP would be indicative of the fraction of RNP that was properly formed and active for cleavage. The cleavage traces were fitted with a biphasic rate model, as the cleavage reaction clearly deviated from monophasic under this concentration regime. The plateau of each fit was determined and reported as the active fraction for each RNP in Table 32.

TABLE 29
Sequences of target DNA substrate oligonucleotides with fluorescent moieties
on the 5′ ends used for biochemical characterization of gRNA activity./700/ =
IRDye700;/800/ = IRDye800

| DNA substrate | Sequence |
|---|---|
| 6.7/6.8 target top strand | /700/catgtcttccatggccttcttcctggcttcctggtgaagatgagt |
| (SEQ ID NO: 19799) | ggcgacctgctggag |
| 6.7/6.8 target bottom strand | /800/ctccagcaggtcgccactcatcttcaccaggaagccaggaagaag |
| (SEQ ID NO: 19800) | gccatggaagacatg |

In Vitro Transcription of CasX mRNA:

[0411] DNA templates encoding for CasX 491 (see Table 30 for encoding sequences) used for in vitro transcription were generated by PCR using forward primers containing a T7 promoter, followed by agarose gel extraction of the appropriately sized DNA, 25 ng/μL final concentration of template DNA was used in each in vitro transcription reaction that was carried out following the manufacturer's recommended protocol with slight modifications. Following in vitro transcription reaction incubation for 2-3 hours at 37° C., which were carried out with CleanCap® AG and NI-methyl-pseudouridine, DNAse digestion of template DNA and column-based purification using the Zymo RNA miniprep kit were performed. The poly (A) tail was added using E. coli Poly A Polymerase following the manufacturer's protocol, followed by column-based purification as stated above. Poly (A) tailed in vitro transcribed RNA was eluted in RNAse free water, analyzed on an Agilent TapeStation for integrity, and flash frozen prior to storage at −80° C.

TABLE 30
Encoding sequences of the CasX mRNA molecules assessed in this example*

| CasX 491 | Component | | SEQ |
|---|---|---|---|
| mRNA ID | (ID) | DNA sequence | ID NO |
| CasX 491 | 5′UTR | GACCGGCCGCCACC | 19801 |
| mRNA #1 | START codon + | ATGGCCCCAGCGGCCAAACGGGTGAAGCTGGACTCTAGA | 19802 |
| | c-MYC NLS + | | |
| | linker | | |
| | CasX 491 | CAAGAGATCAAGAGAATCAACAAGATCAGAAGGAGACTGGT | 19803 |
| | | CAAGGACAGCAACACAAAGAAGGCCGGCAAGACAGGCCCCA | |
| | | TGAAAACCCTGCTCGTCAGAGTGATGACCCCTGACCTGAGA | |
| | | GAGCGGCTGGAAAACCTGAGAAAGAAGCCCGAGAACATCCC | |
| | | TCAGCCTATCAGCAACACCAGCAGGGCCAACCTGAACAAGC | |
| | | TGCTGACCGACTACACCGAGATGAAGAAAGCCATCCTGCAC | |
| | | GTGTACTGGGAAGAGTTCCAGAAAGACCCCGTGGGCCTGAT | |
| | | GAGCAGAGTTGCTCAGCCTGCCAGCAAGAAGATCGACCAGA | |
| | | ACAAGCTGAAGCCCGAGATGGACGAGAAGGGCAATCTGACC | |
| | | ACAGCCGGCTTTGCCTGCTCTCAGTGTGGCCAGCCTCTGTT | |
| | | CGTGTACAAGCTGGAACAGGTGTCCGAGAAAGGCAAGGCCT | |
| | | ACACCAACTACTTCGGCAGATGTAACGTGGCCGAGCACGAG | |
| | | AAGCTGATTCTGCTGGCCCAGCTGAAACCTGAGAAGGACTC | |
| | | TGATGAGGCCGTGACCTACAGCCTGGGCAAGTTTGGACAGA | |
| | | GAGCCCTGGACTTCTACAGCATCCACGTGACCAAAGAAAGC | |
| | | ACACACCCCGTGAAGCCCCTGGCTCAGATCGCCGGCAATAG | |
| | | ATACGCCTCTGGACCTGTGGGCAAAGCCCTGTCCGATGCCT | |
| | | GCATGGGAACAATCGCCAGCTTCCTGAGCAAGTACCAGGAC | |
| | | ATCATCATCGAGCACCAGAAGGTGGTCAAGGGCAACCAGAA | |
| | | GAGACTGGAAAGCCTGAGGGAGCTGGCCGGCAAAGAGAACC | |
| | | TGGAATACCCCAGCGTGACCCTGCCTCCTCAGCCTCACACA | |
| | | AAAGAAGGCGTGGACGCCTACAACGAAGTGATCGCCAGAGT | |
| | | GAGAATGTGGGTCAACCTGAACCTGTGGCAGAAGCTGAAAC | |
| | | TGTCCAGGGACGACGCCAAGCCTCTGCTGAGACTGAAGGGC | |
| | | TTCCCTAGCTTCCCTCTGGTGGAAAGACAGGCCAATGAAGT | |
| | | GGATTGGTGGGACATGGTCTGCAACGTGAAGAAGCTGATCA | |
| | | ACGAGAAGAAAGAGGATGGCAAGGTTTTCTGGCAGAACCTG | |
| | | GCCGGCTACAAGAGACAAGAAGCCCTGAGGCCTTACCTGAG | |
| | | CAGCGAAGAGGACCGGAAGAAGGGCAAGAAGTTCGCCAGAT | |
| | | ACCAGCTGGGCGACCTGCTGCTGCACCTGGAAAAGAAGCAC | |
| | | GGCGAGGACTGGGGCAAAGTGTACGATGAGGCCTGGGAGAG | |
| | | AATCGACAAGAAGGTGGAAGGCCTGAGCAAGCACATTAAGC | |
| | | TGGAAGAGGAAAGAAGGAGCGAGGACGCCCAATCTAAAGCC | |
| | | GCTCTGACCGATTGGCTGAGAGCCAAGGCCAGCTTTGTGAT | |
| | | CGAGGGCCTGAAAGAGGCCGACAAGGACGAGTTCTGCAGAT | |
| | | GCGAGCTGAAGCTGCAGAAGTGGTACGGCGATCTGAGAGGC | |
| | | AAGCCCTTCGCCATTGAGGCCGAGAACAGCATCCTGGACAT | |
| | | CAGCGGCTTCAGCAAGCAGTACAACTGCGCCTTCATTTGGC | |
| | | AGAAAGACGGCGTCAAGAAACTGAACCTGTACCTGATCATC | |
| | | AATTACTTCAAAGGCGGCAAGCTGCGGTTCAAGAAGATCAA | |
| | | ACCCGAGGCCTTCGAGGCTAACAGATTCTACACCGTGATCA | |
| | | ACAAAAAGTCCGGCGAGATCGTGCCCATGGAAGTGAACTTC | |
| | | AACTTCGACGACCCCAACCTGATTATCCTGCCTCTGGCCTT | |
| | | CGGCAAGAGACAGGGCAGAGAGTTCATCTGGAACGATCTGC | |
| | | TGAGCCTGGAAACCGGCTCTCTGAAGCTGGCCAATGGCAGA | |
| | | GTGATCGAGAAAACCCTGTACAACAGGAGAACCAGACAGGA | |
| | | CGAGCCTGCTCTGTTTGTGGCCCTGACCTTCGAGAGAAGAG | |
| | | AGGTGCTGGACAGCAGCAACATCAAGCCCATGAACCTGATC | |
| | | GGCGTGGACCGGGGCGAGAATATCCCTGCTGTGATCGCCCT | |
| | | GACAGACCCTGAAGGATGCCCACTGAGCAGATTCAAGGACT | |
| | | CCCTGGGCAACCCTACACACATCCTGAGAATCGGCGAGAGC | |
| | | TACAAAGAGAAGCAGAGGACAATCCAGGCCAAGAAAGAGGT | |
| | | GGAACAGCGCAGAGCCGGCGGATACTCTAGGAAGTACGCCA | |
| | | GCAAGGCCAAGAATCTGGCCGACGACATGGTCCGAAACACC | |
| | | GCCAGAGATCTGCTGTACTACGCCGTGACACAGGACGCCAT | |
| | | GCTGATCTTCGAGAATCTGAGCAGAGGCTTCGGCCGGCAGG | |
| | | GCAAGAGAACCTTTATGGCCGAGAGGCAGTACACCAGAATG | |
| | | GAAGATTGGCTCACAGCTAAACTGGCCTACGAGGGACTGAG | |
| | | CAAGACCTACCTGTCCAAAACACTGGCCCAGTATACCTCCA | |
| | | AGACCTGCAGCAATTGCGGCTTCACCATCACCAGCGCCGAC | |
| | | TACGACAGAGTGCTGGAAAAGCTCAAGAAAACCGCCACCGG | |
| | | CTGGATGACCACCATCAACGGCAAAGAGCTGAAGGTTGAGG | |
| | | GCCAGATCACCTACTACAACAGGTACAAGAGGCAGAACGTC | |
| | | GTGAAGGATCTGAGCGTGGAACTGGACAGACTGAGCGAAGA | |
| | | GAGCGTGAACAACGACATCAGCAGCTGGACAAAGGGCAGAT | |
| | | CAGGCGAGGCTCTGAGCCTGCTGAAGAAGAGGTTTAGCCAC | |
| | | AGACCTGTGCAAGAGAAGTTCGTGTGCCTGAACTGCGGCTT | |
| | | CGAGACACACGCCGATGAACAGGCTGCCCTGAACATTGCCA | |
| | | GAAGCTGGCTGTTCCTGAGAAGCCAAGAGTACAAGAAGTAC | |
| | | CAGACCAACAAGACCACCGGCAACACCGACAAGAGGGCCTT | |
| | | TGTGGAAACCTGGCAGAGCTTCTACAGAAAAAAGCTGAAAG | |
| | | AAGTCTGGAAGCCCGCCGTG | |
| | Linker + c-MYC | GGCTCCCCCGCCGCGAAGCGAGTGAAACTGGACGGATCCGG | 19804 |
| | NLS | C | |
| | P2A mScarlet + | GCAACAAACTTCTCTCTGCTGAAACAAGCCGGAGATGTCGA | 19805 |
| | STOP codon | AGAGAATCCTGGACCGATGGTATCAAAGGGTGAGGCGGTCA | |
| | | TTAAGGAATTCATGCGGTTCAAAGTTCACATGGAGGGGAGT | |
| | | ATGAATGGTCACGAATTTGAGATCGAGGGTGAGGGAGAGGG | |
| | | TAGACCTTACGAAGGCACCCAGACAGCAAAACTCAAAGTCA | |
| | | CTAAGGGCGGCCCACTCCCTTTCTCATGGGATATACTGAGT | |
| | | CCTCAATTTATGTATGGCTCCCGGGCCTTTATCAAGCATCC | |
| | | AGCCGACATACCCGATTACTATAAACAGTCATTCCCCGAGG | |
| | | GATTCAAATGGGAGAGAGTGATGAATTTTGAAGACGGGGGT | |
| | | GCCGTGACCGTAACTCAAGATACCTCTTTGGAAGATGGTAC | |
| | | CCTCATTTACAAGGTTAAGCTTAGAGGAACTAATTTCCCAC | |
| | | CAGACGGACCCGTTATGCAGAAAAAAACCATGGGTTGGGAG | |
| | | GCTAGCACCGAACGGCTGTATCCAGAGGATGGAGTTTTGAA | |
| | | AGGTGATATTAAGATGGCCCTGCGCCTGAAAGACGGAGGGC | |
| | | GGTACCTCGCAGATTTCAAAACTACCTACAAAGCTAAGAAA | |
| | | CCGGTCCAAATGCCGGGTGCTTATAACGTCGATAGGAAGCT | |
| | | GGATATAACATCACACAACGAAGACTATACGGTTGTCGAAC | |
| | | AGTATGAGCGATCTGAGGGGAGGCACAGCACGGGCGGGATG | |
| | | GATGAGCTTTACAAGTGA | |
| CasX 676 | 5′UTR + Kozak | AAATAAGAGAGAAAAGAAGAGTAAGAAGAAATATAAGAGCC | 19739 |
| mRNA #2 | sequence | ACC | |
| | (underlined) | | |
| | START codon + | ATGGCCCCTGCTGCCAAGAGAGTGAAGCTGGATAGCAGA | 19734 |
| | c-MYC NLS | | |
| | CasX 676 | CAGGAGATCAAGCGGATTAATAAAATTCGGAGAAGACTGGT | 19735 |
| | | GAAGGATTCTAACACAAAGAAGGCTGGCAAGACACGGGGCC | |
| | | CTATGAAGACACTGCTGGTGAGAGTGATGACACCCGACCTG | |
| | | AGAGAAAGACTGGAAAACCTGAGAAAGAAGCCTGAGAATAT | |
| | | CCCCCAGCCCATCAGCAACACAAGCCGGGCCAACCTGAATA | |
| | | AGCTGCTGACCGACTACACCGAAATGAAGAAGGCCATCCTG | |
| | | CACGTGTATTGGGAAGAGTTCCAGAAAGACCCAGTCGGCCT | |
| | | GATGAGCAGAGTGGCTCAGCCTGCCAGCAAGAAGATCGATC | |
| | | AGAACAAGCTGAAGCCCGAAATGGACGAGAAGGGGAACCTG | |
| | | ACAACCGCCGGCTTTGCCTGTAGCCAGTGCGGCCAGCCCCT | |
| | | GTTTGTGTACAAACTGGAACAGGTGAGCGAAAAGGGCAAGG | |
| | | CTTACACGAATTACTTCGGCAGATGCAACGTGGCCGAGCAC | |
| | | GAGAAGCTGATCAAGCTGGCCCAGCTGAAGCCTGAGAAGGA | |
| | | TAGCGATGAGGCAGTGACATATTCCCTGGGCAAGTTCGGAC | |
| | | AGCGGGCCCTGGATTTTTATTCCATTCATGTGACCAAGGAA | |
| | | TCCACCCACCCCGTCAAGCCTCTTGCCCAAATTGCCGGCAA | |
| | | CAGATACGCCTCCAGCCCCGTGGGCAAGGCCCTGAGCGACG | |
| | | CCTGTATGGGCACCATCGCCAGCTTCCTGTCTAAGTACCAG | |
| | | GACATTATCATCGAGCACCAGAAGGTGGTGAAGGGCAACCA | |
| | | GAAGAGACTGGAGAGCCTGCGCGAGCTGGCCGGCAAGGAAA | |
| | | ACCTGGAGTATCCTAGCGTGACCCTGCCTCCTCAGCCTCAT | |
| | | ACAAAGGAGGGCGTGGATGCCTACAACGAAGTGATCGCCCG | |
| | | GGTGCGGATGTGGGTGAACCTGAATCTGTGGCAGAAGCTGA | |
| | | AGCTGTCTAGAGACGACGCCAAGCCCCTGCTGAGACTGAAG | |
| | | GGCTTCCCCAGCTTCCCTCTGGTGGAGAGACAGGCAAATGA | |
| | | AGTGGACTGGTGGGACATGGTGTGTAACGTGAAGAAGCTGA | |
| | | TCAATGAGAAGAAGGAGGACGGCAAAGTGTTCTGGCAGAAT | |
| | | CTGGCCGGCTACAAGCGTCAGGAGGCCCTGCGGCCCTACCT | |
| | | GAGCAGCGAGGAAGACAGAAAGAAGGGCAAGAAGTTCGCCC | |
| | | GGTATCAGCTGGGGGACCTGCTGCTGCACCTCGAGAAGAAG | |
| | | CACGGCGAAGACTGGGGGAAGGTGTACGATGAGGCCTGGGA | |
| | | GCGGATCGATAAGAAGGTGGAGGGCCTGAGCAAGCACATCA | |
| | | AGCTGGAGGAGGAACGGAGATCTGAGGACGCCCAGAGCAAG | |
| | | GCCGCCCTGACCGACTGGCTGAGAGCCAAGGCCAGCTTCGT | |
| | | CATCGAGGGGCTGAAGGAGGCCGACAAGGACGAGTTCTGCC | |
| | | GGTGCGAACTGAAGCTGCAGAAGTGGTACGGAGATCTGAGA | |
| | | GGCAAACCTTTCGCCATCGAGGCCGAGAACAGCATCCTGGA | |
| | | CATCAGCGGCTTCAGCAAGCAGTACAACTGCGCCTTTATTT | |
| | | GGCAGAAGGACGGAGTGAAGAAGCTGAACCTGTACCTGATC | |
| | | ATCAACTATTTCAAGGGCGGCAAGCTGAGATTCAAGAAGAT | |
| | | CAAGCCTGAAGCCTTCGAGGCCAACAGATTCTACACCGTGA | |
| | | TTAACAAGAAAAGCGGAGAGATCGTGCCAATGGAAGTGAAC | |
| | | TTCAACTTCGACGACCCTAACCTGATCATCCTGCCCCTGGC | |
| | | ATTTGGCAAGCGGCAGGGCAGAGAGTTCATCTGGAACGACC | |
| | | TGCTGTCTCTGGAGACCGGCAGCCTGAAGCTGGCCAACGGC | |
| | | AGAGTGATCGAGAAGACACTGTACAACAGACGAACCAGACA | |
| | | AGACGAGCCCGCCCTGTTTGTGGCCCTGACCTTCGAGAGAA | |
| | | GAGAGGTGCTGGACAGCAGCAATATCAAGCCTATGAACCTG | |
| | | ATCGGCGTGGACCGGGGCGAGAACATCCCTGCCGTGATCGC | |
| | | CCTTACCGACCCCGAGGGATGCCCTCTGAGCCGGTTTAAAG | |
| | | ACAGCCTGGGCAACCCTACCCACATCCTGAGAATTGGCGAG | |
| | | TCCTACAAGGAGAAGCAGAGAACCATCCAGGCCAAGAAGGA | |
| | | GGTGGAGCAGCGGCGGGCTGGCGGCTACTCCCGGAAGTACG | |
| | | CCAGCAAGGCCAAGAACCTGGCCGACGACATGGTTAGAAAT | |
| | | ACCGCCAGAGACCTCCTGTACTACGCTGTGACCCAGGACGC | |
| | | CATGCTGATCTTCGAGAACCTGAGCAGAGGCTTCGGCAGAC | |
| | | AGGGCAAGAGAACCTTCATGGCCGAGAGACAGTACACCCGG | |
| | | ATGGAGGACTGGCTGACCGCCAAGCTGGCCTACGAGGGCCT | |
| | | GCCCTCTAAGACCTACCTGTCCAAGACCTTGGCACAGTACA | |
| | | CCAGCAAGACATGCTCTAACTGCGGCTTCACAATCACGAGC | |
| | | GCCGACTACGACCGGGTGCTGGAGAAACTGAAGAAGACCGC | |
| | | CACAGGCTGGATGACCACCATTAACGGCAAGGAGCTGAAGG | |
| | | TGGAGGGCCAGATCACCTACTACAACAGGTACAAACGGCAG | |
| | | AACGTGGTGAAGGACCTGAGCGTGGAACTGGATAGACTGAG | |
| | | CGAGGAAAGCGTAAACAATGACATCAGCAGCTGGACCAAGG | |
| | | GCCGGAGCGGCGAGGCCCTGAGCCTGCTGAAGAAGAGATTC | |
| | | TCCCACAGACCAGTGCAGGAGAAGTTCGTGTGTCTGAACTG | |
| | | CGGCTTCGAGACCCACGCCGACGAGCAAGCCGCCCTGAACA | |
| | | TCGCCCGGTCTTGGCTTTTCCTGCGGAGCCAGGAGTACAAG | |
| | | AAGTACCAGACAAACAAGACCACAGGCAACACAGACAAGAG | |
| | | AGCCTTCGTCGAGACCTGGCAGAGCTTCTACAGAAAGAAGC | |
| | | TGAAGGAGGTGTGGAAGCCTGCCGTG | |
| | c-MYC NLS + | GGAAGCCCCGCTGCCAAGAGAGTGAAGCTGGACTAATAGAT | 19736 |
| | STOP codons | AA | |
| | 3′UTR | GCTGCCTTCTGCGGGGCTTGCCTTCTGGCCATGCCCTTCTT | 19740 |
| | | CTCTCCCTTGCACCTGTACCTCTTGGTCTTTGAATAAAGCC | |
| | | TGAGTAGGAAG | |
| | XbaI restriction | TCTAG | 19741 |
| | site (partial) | | |
| | Poly(A) tail | AAAAAAAAAAAAAAAAAAAAAAAAAAAAAAAAAAAAAAAAA | 19738 |
| | | AAAAAAAAAAAAAAAAAAAAAAAAAAAAAAAAAAAAAAA | |

*Components are listed in a 5′ to 3′ order within the constructs

In Vitro Delivery of gRNA and CasX mRNA Via Transfection:

[0412] Editing at the PCSK9 locus and consequential effects on secreted PCSK9 levels were assessed for conditions using CasX 491 mRNA co-delivered with a PCSK9-targeting gRNA with scaffold variant 174 compared to conditions where a PCSK9-targeting gRNA with scaffold variant 316 was used, 100 ng of in vitro transcribed mRNA coding for CasX 491 with a P2A and mScarlet fluorescent protein was transfected into HepG2 cells with version 1 (v1) of gRNAs 174-6.7, 174-6.8, 316-6.7, and 316-6.8 (see Table 28) using lipofectamine. After a media change, the following were harvested at 28 hours post-transfection; 1) transfected cells were harvested for editing assessment at the PCSK9 locus by NGS; 2) media supernatant was harvested to measure secreted PCSK9 protein levels by ELISA. For editing analysis by NGS, amplicons were amplified from 200 ng of extracted gDNA with a set of primers targeting the PCSK9 locus and processed as described earlier in Example 5. Secreted PCSK9 levels in the media supernatant were also analyzed using a fluorescence resonance energy transfer-based immunoassay from CISBio following the manufacturer's instructions. Here, a gRNA using scaffold 174 with spacer 7.37 (v0; see Table 28), which targeted the endogenous B2M (beta-2-microglobulin) locus, served as the non-targeting (NT) control. These results are shown in FIG. 9.

[0413] To compare the editing potency of version 0 (v0) and version 1 (v1) of B2M-targeting gRNAs, ˜6E4 HepG2 hepatocytes were seeded per well of a 96-well plate, 24 hours later, seeded cells were co-transfected using lipofectamine with 100 ng of in vitro transcribed mRNA coding for CasX 491 and different doses (1, 5, or 50 ng) of either v0 or v1 of the B2M-targeting gRNA containing scaffold variant 174 and spacer 7.37 (see Table 28). Six days post-transfection, cells were harvested for B2M protein expression analysis via immunostaining of the B2M-dependent HLA protein, followed by flow cytometry using the Attune™ NxT flow cytometer. These results are shown in FIG. 6.

[0414] V1 through v6 variants of chemically-modified PCSK9-targeting gRNAs (Table 28) were assessed for their effects on editing potency and consequential effects on secreted PCSK9 levels in vitro. Briefly, 100 ng of in vitro transcribed mRNA coding for CasX variant 491 and a P2A and mScarlet fluorescent protein was transfected into HepG2 cells with 50 ng of the indicated chemically-modified gRNA using lipofectamine. After a media change, the following were harvested at 28 hours post-transfection: 1) transfected cells for editing assessment at the PC′SK9 locus by NGS as described above: 2) media supernatant to measure secreted PCSK9 protein levels by ELISA, as described above. Here, a B2M-targeting gRNA was used as a non-targeting control. These results are shown in Table 33.

[0415] LNP co-formulations were generated as described in Example 6.

Delivery of LNPs Encapsulating CasX mRNA and Targeting gRNAs In Vitro:

[0416] ˜50,000 HepG2 cells, cultured in DMEM/F-12 media containing 10% FBS and 1% PenStrep, were seeded per well in a 96-well plate. The next day, seeded cells were treated with varying concentrations of LNPs, which were prepared in six 2-fold serial dilutions starting at 250) ng. These LNPs were formulated to encapsulate CasX 491 mRNA and a B2M-targeting gRNA incorporating either scaffold variant 174 or 316 with spacer 7.9 (v1; see Table 28). Media was changed 24 hours after LNP treatment, and cells were cultured for six additional days prior to harvesting for gDNA extraction for editing assessment at the B2M locus by NGS and B2M protein expression analysis via HLA immunostaining, followed by flow cytometry using the Attune NxT flow cytometer. Briefly, for editing assessment, amplicons were amplified from 200 ng of extracted gDNA with primers targeting the human B2M locus and processed as described in Example 5. The results of these assays are shown in FIGS. 10A and 10B.

[0417] ˜20,000 mouse Hepal-6 hepatocytes were seeded per well in a 96-well plate. The following day, seeded cells were treated with varying concentrations of LNPs, which were prepared in eight 2-fold serial dilutions starting at 1000 ng. These LNPs were formulated to encapsulate CasX 676 mRNA #2 (see Table 30) and a ROSA26-targeting gRNA incorporating scaffold variant 316 with spacer 35.2 (v1 or 5; see Table 28). Media was changed 24 hours post-treatment with LNPs, and cells were cultured for seven additional days prior to harvesting for gDNA extraction for editing assessment at the ROSA26 locus by NGS. Briefly, amplicons were amplified from extracted gDNA with primers targeting the mouse ROSA26 locus and processed as described in Example 5. The results of this experiment are shown in FIG. 11A.

Delivery of LNPs Encapsulating CasX mRNA and Targeting gRNA In Vivo:

[0418] To assess the effects of using v1 and v5 of scaffold 316 in vivo, CasX 676 mRNA #2 (see Table 30) and a ROSA26-targeting gRNA using scaffold 316 with spacer 35.2 (v1 or v5; see Table 28) were encapsulated within the same LNP using a 1:1 mass ratio for mRNA:gRNA. LNP co-formulations were performed as described in Example 6. Formulated LNPs were buffer-exchanged to PBS for in vivo injection. LNPs were administered intravenously through the retro-orbital sinus into 4-week old C57BL/6 mice. Mice were observed for five minutes after injection to ensure recovery from anesthesia before being placed into their home cage. Naïve, uninjected animals served as experimental controls. Six days post-administration, mice were euthanized, and the liver tissue was harvested for gDNA extraction using the Zymo Research Quick DNA/RNA Miniprep kit following the manufacturer's instructions. Target amplicons were then amplified from the extracted gDNA with a set of primers targeting the mouse ROSA26 locus and processed for editing assessment by NGS as described earlier in Example 5. The results of this experiment are shown in FIG. 11B.

[0419] To compare the effects of using v7, v8, and v9 of scaffold 316 on editing at the PCSK9 locus in vivo, CasX 676 mRNA #1 (see Table 31 for sequences) and a PCSK9-targeting gRNA using scaffold 316 with spacer 27.107 (v1, v7, v8, or v9; see Table 28), were encapsulated within the same LNP using a 1:1 mass ratio for mRNA:gRNA for each gRNA. LNPs were administered retro-orbitally into 6-week old C57BL/6 mice, as described above, and mice were euthanized seven days post-injection to harvest liver tissue for gDNA extraction for editing assessment by NGS at the PCSK9 locus. The results of this experiment are shown in FIG. 12.

TABLE 31
Encoding sequences of CasX 676 mRNA #1 molecule

| CasX | Component | | | SEQ ID |
|---|---|---|---|---|
| ID | (ID) | Description | DNA sequence | NO |
| CasX 676 | 5′UTR | Human HBA | ACTCTTCTGGTCCCCACAGACTCAGAGAGAAC | 19733 |
| mRNA #1 | | | CCGCCACC | |
| | START | | ATGGCCCCTGCTGCCAAGAGAGTGAAGCTGGA | 19734 |
| | codon + c- | | TAGCAGA | |
| | MYC NLS | | | |
| | CasX 676 | | CAGGAGATCAAGCGGATTAATAAAATTCGGAG | 19735 |
| | | | AAGACTGGTGAAGGATTCTAACACAAAGAAGG | |
| | | | CTGGCAAGACACGGGGCCCTATGAAGACACTG | |
| | | | CTGGTGAGAGTGATGACACCCGACCTGAGAGA | |
| | | | AAGACTGGAAAACCTGAGAAAGAAGCCTGAGA | |
| | | | ATATCCCCCAGCCCATCAGCAACACAAGCCGG | |
| | | | GCCAACCTGAATAAGCTGCTGACCGACTACAC | |
| | | | CGAAATGAAGAAGGCCATCCTGCACGTGTATT | |
| | | | GGGAAGAGTTCCAGAAAGACCCAGTCGGCCTG | |
| | | | ATGAGCAGAGTGGCTCAGCCTGCCAGCAAGAA | |
| | | | GATCGATCAGAACAAGCTGAAGCCCGAAATGG | |
| | | | ACGAGAAGGGGAACCTGACAACCGCCGGCTTT | |
| | | | GCCTGTAGCCAGTGCGGCCAGCCCCTGTTTGT | |
| | | | GTACAAACTGGAACAGGTGAGCGAAAAGGGCA | |
| | | | AGGCTTACACGAATTACTTCGGCAGATGCAAC | |
| | | | GTGGCCGAGCACGAGAAGCTGATCAAGCTGGC | |
| | | | CCAGCTGAAGCCTGAGAAGGATAGCGATGAGG | |
| | | | CAGTGACATATTCCCTGGGCAAGTTCGGACAG | |
| | | | CGGGCCCTGGATTTTTATTCCATTCATGTGAC | |
| | | | CAAGGAATCCACCCACCCCGTCAAGCCTCTTG | |
| | | | CCCAAATTGCCGGCAACAGATACGCCTCCAGC | |
| | | | CCCGTGGGCAAGGCCCTGAGCGACGCCTGTAT | |
| | | | GGGCACCATCGCCAGCTTCCTGTCTAAGTACC | |
| | | | AGGACATTATCATCGAGCACCAGAAGGTGGTG | |
| | | | AAGGGCAACCAGAAGAGACTGGAGAGCCTGCG | |
| | | | CGAGCTGGCCGGCAAGGAAAACCTGGAGTATC | |
| | | | CTAGCGTGACCCTGCCTCCTCAGCCTCATACA | |
| | | | AAGGAGGGCGTGGATGCCTACAACGAAGTGAT | |
| | | | CGCCCGGGTGCGGATGTGGGTGAACCTGAATC | |
| | | | TGTGGCAGAAGCTGAAGCTGTCTAGAGACGAC | |
| | | | GCCAAGCCCCTGCTGAGACTGAAGGGCTTCCC | |
| | | | CAGCTTCCCTCTGGTGGAGAGACAGGCAAATG | |
| | | | AAGTGGACTGGTGGGACATGGTGTGTAACGTG | |
| | | | AAGAAGCTGATCAATGAGAAGAAGGAGGACGG | |
| | | | CAAAGTGTTCTGGCAGAATCTGGCCGGCTACA | |
| | | | AGCGTCAGGAGGCCCTGCGGCCCTACCTGAGC | |
| | | | AGCGAGGAAGACAGAAAGAAGGGCAAGAAGTT | |
| | | | CGCCCGGTATCAGCTGGGGGACCTGCTGCTGC | |
| | | | ACCTCGAGAAGAAGCACGGCGAAGACTGGGGG | |
| | | | AAGGTGTACGATGAGGCCTGGGAGCGGATCGA | |
| | | | TAAGAAGGTGGAGGGCCTGAGCAAGCACATCA | |
| | | | AGCTGGAGGAGGAACGGAGATCTGAGGACGCC | |
| | | | CAGAGCAAGGCCGCCCTGACCGACTGGCTGAG | |
| | | | AGCCAAGGCCAGCTTCGTCATCGAGGGGCTGA | |
| | | | AGGAGGCCGACAAGGACGAGTTCTGCCGGTGC | |
| | | | GAACTGAAGCTGCAGAAGTGGTACGGAGATCT | |
| | | | GAGAGGCAAACCTTTCGCCATCGAGGCCGAGA | |
| | | | ACAGCATCCTGGACATCAGCGGCTTCAGCAAG | |
| | | | CAGTACAACTGCGCCTTTATTTGGCAGAAGGA | |
| | | | CGGAGTGAAGAAGCTGAACCTGTACCTGATCA | |
| | | | TCAACTATTTCAAGGGCGGCAAGCTGAGATTC | |
| | | | AAGAAGATCAAGCCTGAAGCCTTCGAGGCCAA | |
| | | | CAGATTCTACACCGTGATTAACAAGAAAAGCG | |
| | | | GAGAGATCGTGCCAATGGAAGTGAACTTCAAC | |
| | | | TTCGACGACCCTAACCTGATCATCCTGCCCCT | |
| | | | GGCATTTGGCAAGCGGCAGGGCAGAGAGTTCA | |
| | | | TCTGGAACGACCTGCTGTCTCTGGAGACCGGC | |
| | | | AGCCTGAAGCTGGCCAACGGCAGAGTGATCGA | |
| | | | GAAGACACTGTACAACAGACGAACCAGACAAG | |
| | | | ACGAGCCCGCCCTGTTTGTGGCCCTGACCTTC | |
| | | | GAGAGAAGAGAGGTGCTGGACAGCAGCAATAT | |
| | | | CAAGCCTATGAACCTGATCGGCGTGGACCGGG | |
| | | | GCGAGAACATCCCTGCCGTGATCGCCCTTACC | |
| | | | GACCCCGAGGGATGCCCTCTGAGCCGGTTTAA | |
| | | | AGACAGCCTGGGCAACCCTACCCACATCCTGA | |
| | | | GAATTGGCGAGTCCTACAAGGAGAAGCAGAGA | |
| | | | ACCATCCAGGCCAAGAAGGAGGTGGAGCAGCG | |
| | | | GCGGGCTGGCGGCTACTCCCGGAAGTACGCCA | |
| | | | GCAAGGCCAAGAACCTGGCCGACGACATGGTT | |
| | | | AGAAATACCGCCAGAGACCTCCTGTACTACGC | |
| | | | TGTGACCCAGGACGCCATGCTGATCTTCGAGA | |
| | | | ACCTGAGCAGAGGCTTCGGCAGACAGGGCAAG | |
| | | | AGAACCTTCATGGCCGAGAGACAGTACACCCG | |
| | | | GATGGAGGACTGGCTGACCGCCAAGCTGGCCT | |
| | | | ACGAGGGCCTGCCCTCTAAGACCTACCTGTCC | |
| | | | AAGACCTTGGCACAGTACACCAGCAAGACATG | |
| | | | CTCTAACTGCGGCTTCACAATCACGAGCGCCG | |
| | | | ACTACGACCGGGTGCTGGAGAAACTGAAGAAG | |
| | | | ACCGCCACAGGCTGGATGACCACCATTAACGG | |
| | | | CAAGGAGCTGAAGGTGGAGGGCCAGATCACCT | |
| | | | ACTACAACAGGTACAAACGGCAGAACGTGGTG | |
| | | | AAGGACCTGAGCGTGGAACTGGATAGACTGAG | |
| | | | CGAGGAAAGCGTAAACAATGACATCAGCAGCT | |
| | | | GGACCAAGGGCCGGAGCGGCGAGGCCCTGAGC | |
| | | | CTGCTGAAGAAGAGATTCTCCCACAGACCAGT | |
| | | | GCAGGAGAAGTTCGTGTGTCTGAACTGCGGCT | |
| | | | TCGAGACCCACGCCGACGAGCAAGCCGCCCTG | |
| | | | AACATCGCCCGGTCTTGGCTTTTCCTGCGGAG | |
| | | | CCAGGAGTACAAGAAGTACCAGACAAACAAGA | |
| | | | CCACAGGCAACACAGACAAGAGAGCCTTCGTC | |
| | | | GAGACCTGGCAGAGCTTCTACAGAAAGAAGCT | |
| | | | GAAGGAGGTGTGGAAGCCTGCCGTG | |
| | c-MYC | | GGAAGCCCCGCTGCCAAGAGAGTGAAGCTGGA | 19736 |
| | NLS + | | CTAATAGATAA | |
| | STOP codons | | | |
| | 3′UTR | Human HBA | GCTGGAGCCTCGGTGGCCATGCTTCTTGCCCC | 19737 |
| | | | TTGGGCCTCCCCCCAGCCCCTCCTCCCCTTCC | |
| | | | TGCACCCGTACCCCCGTGGTCTTTGAATAAAG | |
| | | | TCTGAGTGGGCGGCA | |
| | Poly(A) tail | | AAAAAAAAAAAAAAAAAAAAAAAAAAAAAAAA | 19738 |
| | | | AAAAAAAAAAAAAAAAAAAAAAAAAAAAAAAA | |
| | | | AAAAAAAAAAAAAAAA | |

*Components are listed in a 5′ to 3′ order within the constructs

### Results

Assessing the Effects of Various Chemical Modifications on gRNA Activity:

[0420] Several studies involving Cas9 have demonstrated that chemical modifications of the gRNA resulted in significantly improved editing activity when delivered with Cas9 mRNA. Following delivery of Cas9 mRNA and gRNA into target cells, unprotected gRNA is susceptible to degradation during the mRNA translation process. Addition of chemical modifications such as 2′O-methyl (2′OMe) groups and phosphorothioate bonds can reduce the susceptibility of the gRNA to cellular RNases, but also have the potential to disrupt folding of the gRNA and its interactions with the CRISPR-Cas protein. Given the lack of structural similarity between CasX and Cas9, as well as their respective gRNAs, appropriate chemical modification profiles must be designed and validated de novo. Using published structures of wild-type CasX from Deltaproteobacteria (PDB codes 6NY1, 6NY2, and 6NY3) as reference, residues that appeared potentially amenable to modification were selected. However, the published structures were of a wild type CasX ortholog and gRNA distinct from the species used as the basis for the engineered variants presented here, and they also lacked the resolution to confidently determine interactions between protein side-chains and the RNA backbone. These limitations introduced a significant amount of ambiguity into determining which nucleotides might be safely modified. As a result, six profiles of chemical modifications (denoted as versions) were designed for initial testing, and these six profiles are illustrated in FIGS. 5A and 5B. The v1 profile was designed as a simple end-protected structure, where the first and last three nucleotides were modified with 2′OMe and phosphorothioate bonds. In the v2 profile, 3′UUU tail was added to mimic the termination sequence used in cellular transcription systems and to move the modified nucleotides outside of the region of the spacer involved in target recognition. The v3 profile included the end protection as in v1, as well as the addition of 2′OMe modifications at all nucleotides identified to be potentially modifiable based on structural analysis. The v4 profile was modeled based on v3, but with all the modifications in the triplex region removed, as this structure was predicted to be more sensitive to any perturbation of the RNA helical structure and backbone flexibility. The v5 profile maintained chemical modifications in the scaffold stem and extended stem regions, while the v6 profile harbored modifications only in the extended stem. The extended stem is a region that would become fully exposed to solvent in the RNP and is amenable to replacement by other hairpin structures, and therefore presumably relatively insensitive to chemical modifications.

[0421] The minimally modified v1 gRNA was initially assessed against an unmodified gRNA (v0) to determine the potential benefit of such chemical modifications on editing when the gRNA was co-delivered with CasX mRNA to target cells. Modified (v1) and unmodified (v0) B2M-targeting gRNAs with spacer 7.37 were co-transfected with CasX mRNA into HepG2 cells, and editing at the B2M locus was measured by loss of surface presentation of the B2M-dependent HLA complex, as detected by flow cytometry (FIG. 6). The data demonstrate that use of the v1 gRNA resulted in substantially greater loss of B2M expression compared to the levels seen with v0 gRNA across the various doses, thereby confirming that end modifications of the gRNA increased CasX-mediated editing activity upon delivery of the CasX mRNA and gRNA.

[0422] The broader set of gRNA chemical modification profiles were assessed using PCSK9-targeting gRNAs using scaffold variant 235 and spacers 6.7 and 6.8 to determine whether the additional chemical modifications would be able to support the formation of active RNPs. In vitro cleavage assays described above were performed to determine keleave and fraction competence for these engineered gRNAs harboring the various chemical modification profiles. The results from these in vitro cleavage assays are shown in Table 32. The data demonstrate that gRNAs with the v3 profiles exhibited no activity, an indication that the addition of some chemical modifications significantly interfered with RNP formation or activity. Adding v4 chemical modifications resulted in a reasonable cleavage rate in the excess RNP condition, but exhibited very low fraction competence. The difference between v3 and v4 modifications confirmed that modifications in the triplex region prevented the formation of any active RNP, either due to the inability of the gRNA to fold properly or a disruption in the gRNA-protein interactions. The reduced fraction competence resulting from appending v4 modifications suggest that while the gRNA was able to successfully assemble with the CasX protein to form a cleavage-competent RNP, a large majority of the gRNA was misfolded, or that the appended chemical modifications reduced the affinity of the gRNA for the CasX protein and impeded the efficiency of RNP formation. Application of the v5 or v6 profiles resulted in competent fractions that were comparable to, but slightly lower than, those obtained for reactions using the v1 and v2 modifications. While the kcleave values were relatively consistent between v5 and v6 gRNAs, both v5 and v6 gRNAs achieved nearly half of the keleave values for v1 and v2 gRNAs. The reduced keleave value for v6 gRNA was particularly surprising, given the lack of expected interaction between the gRNA and CasX protein in the modified extended stem. However, for both v5 and v6 gRNAs, it is possible that the reduced flexibility of the gRNA, resulting from the 2′OMe modifications, inhibited structural changes in the RNP required for efficient cleavage, or that the modified initial base-pairs of the hairpin involved in CasX protein interaction had been negatively impacted by the inclusion of the 2′OMe groups.

TABLE 32
Parameters of cleavage activity assessed for CasX
RNPs with the various PCSK9-targeting gRNAs using
scaffold 235 and harboring the indicated chemical
modification profile, denoted by version number.

| gRNA | | |
|---|---|---|
| (scaffold variant-spacer, | k_{cleave} | Fraction |
| version no.) | (min⁻¹) | competence |
| 235-6.7, v1 | 0.901 | 0.398 |
| 235-6.8, v1 | 1.36 | 0.398 |
| 235-6.7, v2 | 0.454 | 0.386 |
| 235-6.8, v2 | 2.03 | 0.361 |
| 235-6.7, v3 | 0 | 0 |
| 235-6.8, v3 | 0 | 0 |
| 235-6.7, v4 | 0.434 | 0.031 |
| 235-6.8, v4 | 0.257 | 0.005 |
| 235-6.7, v5 | 0.506 | 0.313 |
| 235-6.8, v5 | 0.680 | 0.388 |
| 235-6.7, v6 | 0.462 | 0.346 |
| 235-6.8, v6 | 0.715 | 0.325 |

[0423] The chemically-modified PCSK9-targeting gRNAs based on scaffold 235 were subsequently assessed for editing in a cell-based assay. CasX mRNA and chemically modified PCSK9-targeting gRNAs were co-transfected into HepG2 cells using lipofectamine. Editing levels were measured by indel rate at the PCSK9 locus by NGS and secreted PCSK9 levels by ELISA, and the data are displayed in Table 33. The data demonstrate that use of v3 and v4 gRNAs resulted in minimal editing activity at the PCSK9 locus, consistent with findings from the biochemical in vitro cleavage assays shown in Table 32. Meanwhile, use of v5 and v6 gRNAs resulted in editing levels, measured by indel rate and PCSK9 secretion, that were slightly lower than the levels attained with use of v1 and v2 gRNAs (Table 33). Specifically, the results show that use of v1 and v2 gRNAs, which harbored end modifications, resulted in ˜80-85% editing at the PCSK9 locus, indicating that adding chemical modifications to the gRNA ends was sufficient to achieve efficient editing with CasX. While the data demonstrate that use of v5 and v6 gRNAs resulted in efficient editing in vitro, near-saturating levels of editing were observed with use of the v1 gRNA in this experiment where a single dose of the gRNA was transfected. As a result, the use of a single dose rendered it challenging to assess clearly the effects of the chemical modifications on editing under guide-limiting conditions. Therefore, profiles v1 and v5 were chosen for further testing, as v1 contains the simplest modification profile, and v5 is the most heavily modified profile whose application demonstrated robust activity in vitro (Tables 7F and 7G).

TABLE 33
Editing levels measured by indel rate at PCSK9 locus by NGS and
secreted PCSK9 levels by ELISA in HepG2 cells co-transfected
with CasX 491 mRNA and various chemically-modified PCSK9-targeting
gRNAs using scaffold 235 and either spacer 6.7 or 6.8.

| Experimental | Indel rate (edit fraction) | | Secreted PCSK9 (ng/mL) | |
|---|---|---|---|---|
| condition | Mean | Stdev | Mean | Stdev |
| CasX mRNA only | 0.0021 | 0.003 | 52 | 14 |
| 235-6.7, v1 | 0.83 | 0.0058 | 18 | 5.7 |
| 235-6.7, v2 | 0.79 | 0.0071 | 21 | 4 |
| 235-6.7, v3 | 0.024 | 0.02 | 48 | 19 |
| 235-6.7, v4 | 0.12 | 0.006 | 34 | 5.5 |
| 235-6.7, v5 | 0.73 | 0.023 | 21 | 9 |
| 235-6.7, v6 | 0.75 | 0.0069 | 22 | 8.8 |
| 235-6.8, v1 | 0.85 | 0.017 | 16 | 4.4 |
| 235-6.8, v2 | 0.83 | 0.0028 | 20 | 1.5 |
| 235-6.8, v3 | 0.023 | 0.0027 | 39 | 2.7 |
| 235-6.8, v4 | 0.088 | 0.0086 | 42 | 10 |
| 235-6.8, v5 | 0.77 | 0.017 | 19 | 1.6 |
| 235-6.8, v6 | 0.78 | 0.014 | 24 | 6.9 |
| Non-targeting ctrl | 0.0019 | 0.0026 | 42 | 12 |

[0424] The v1 and v5 profiles were further tested in another cell-based assay to assess their effects on editing efficiency. LNPs were formulated to co-encapsulate CasX 676 mRNA #2 and v1 and v5 chemically-modified ROSA26-targeting gRNAs using the newly-designed gRNA scaffold 316 (described further in the following sub-section). The “v5” profile was modified slightly for application to the 316 scaffold. Three 2′ OMe modifications in the non-base-paired region immediately 5′ of the extended stem were removed to restrict modifications to the two stemloop regions. Hepal-6 hepatocytes were treated with the resulting LNPs at various doses and harvested eight days post-treatment to assess editing at the ROSA26 locus, measured as indel rate detected by NGS (FIG. 11A). The data demonstrate that treatment with LNPs delivering the v5 ROSA26-targeting gRNA resulted in markedly lower editing levels across the range of doses compared to the levels achieved with the v1 counterpart (FIG. 11A). There are several possible explanations for the differences in relative activity observed with use of v5 gRNA in FIG. 11A relative to that observed in Table 33. The first and most likely possible explanation is that the single dose used to achieve editing shown in Table 33 was too high to measure differences in activity accurately between use of v5 gRNA and v1 gRNA. It is also possible that the removal of the modifications outside the stemloop motifs in the 316 version of v5 negatively impacted guide activity. While it is possible that these modifications provide stability benefits that outweigh an activity cost imparted by the stemloop modifications, this seems unlikely given that increasing levels of modification have so far resulted in decreased activity. A final possible explanation is that the modifications in the v5 profile might negatively impact LNP formulation or behavior through differential interactions between the modified nucleotide backbone and the ionizable lipid of the LNP, potentially resulting in less efficient gRNA encapsulation or in less efficient gRNA release following internalization.

[0425] LNPs co-encapsulating the CasX mRNA #2 and v1 and v5 chemically-modified ROSA26-targeting gRNAs based on scaffold 316 were further tested in vivo. FIG. 11B shows the results of the editing assay as percent editing measured as indel rate at the ROSA26 locus. The data demonstrate that use of the v5 gRNA resulted in ˜5-fold lower editing compared to that achieved with use of the v1 gRNA, under more relevant testing conditions of in vivo LNP delivery. These findings support the reduced cleavage rate observed biochemically for the v5 gRNA in Table 32, an indication that the v5 modifications have interfered with some aspect of CasX activity. Given the consistent decrease in activity detected in v5 and v6 profiles (Table 32), the reduced editing may be attributed to modifications in the extended stem region. Although the extended stem of the gRNA has minimal interactions with the CasX protein, it is possible that addition of 2 OMe groups at the first base-pair disrupted either the CasX protein-gRNA interactions or the complex RNA fold where the extended stem meets the pseudoknot and triplex regions. More specifically, inclusion of the 2′OMe groups might have adversely affected the basal base-pairs of the gRNA extended stem and residues R49, K50, and K51 of the CasX protein. Finally, structural studies of CasX have suggested that flexibility of the gRNA is required for efficient DNA cleavage (Liu J, et al, CasX enzymes comprise a distinct family of RNA-guided genome editors. Nature 566:218-223 (2019); Tsuchida C A, et al, Chimeric CRISPR-CasX enzymes and guide RNAs for improved genome editing activity. Mol Cell 82 (6): 1199-1209 (2022)). Thus, the addition of the 2′OMe groups throughout the extended stem might have enforced a more rigid A-form helical structure and prevented the needed flexibility for the gRNA for efficient cleavage. Furthermore, it is possible that the additional modifications in the scaffold stem in the v5 and v6 profiles might be detrimental to activity, though this is currently unclear given the limited comparisons between the v5 and v6 profiles.

[0426] Additional modification profiles were designed with the goal of enhancing gRNA stability while mitigating the adverse effects on RNP cleavage activity. Using recently published structures of wild-type CasX from Planctomycetes (PDB codes 7WAY, 7WAZ, 7WB0, 7WB1), which has a higher homology to the engineered CasX variants being assessed, additional chemical modification profiles for gRNAs were designed and are illustrated in FIG. 7. These profiles illustrate the addition of 2′OMe groups and phosphorothioate bonds to a newly-designed gRNA scaffold variant, which is described in the ensuing sub-section. These new gRNA chemical modification profiles were designed based on the initial data demonstrating sufficient editing activity observed in Table 33 with use of the v5 gRNA that suggested that modifications to the extended stem and scaffold stem regions would not negatively impact activity. The v7 profile was designed to include 2′OMe at residues likely to be modifiable throughout the gRNA structure, which excluded the triplex region, given the dramatic negative effects of adding such modifications observed earlier with the v3 profile. More conservative profiles, v8 and v9, were also designed, as illustrated in FIG. 7. For the v8 construct, modifications were removed in the pseudoknot and triplex loop region, but were retained in the scaffold stem, extended stem, and their flanking single-stranded regions, in addition to the 5′ and 3′ termini. For the v9 profile, modifications were removed in the single-stranded regions flanking the stemloops, but were retained in the stemloops themselves, in addition to the pseudoknot, triplex loop, and 5′ and 3′ termini. The additional chemical modification profiles v7, v8, and v9 of the newly designed gRNA scaffold variant 316 (discussed further below) were assessed in vivo at the PCSK9 locus. The results of the editing assay in vivo quantified as percent editing at the PC′SK9 locus measured as indel rate as detected NGS are illustrated in FIG. 12. Despite the fact that low editing efficiency was detected overall, the data demonstrate that use of v7, v8, and v9 gRNAs resulted in lower editing levels at the PCSK9 locus compared to the indel rate achieved with use of the v1 gRNA (FIG. 12). Given the findings in FIGS. 11A-11B showing inferior editing activity attained with the v5 gRNA, it is unsurprising that v7, v8, and v9 profiles similarly demonstrated comparatively lower editing activity. As illustrated in FIG. 7, the v7, v8, and v9 profiles include modifications throughout the extended stem region, which might have interfered with RNP activity.

Comparison of gRNA Scaffold Variant 174 and 316 Using an In Vitro Cleavage Assay:

[0427] Previous work had established gRNA scaffold variant 235 as the top-performing scaffold variant across multiple delivery conditions. However, the longer length of scaffold 235 (119 bp, when using a 20 bp spacer) relative to gRNAs including scaffold 174 (109 bp, when using a 20 bp spacer) increased the difficulty of solid-phase RNA synthesis, which would result in increased manufacturing costs, decreased purity and vield, and higher rates of synthesis failures. To address these issues but retain the improved activity of using scaffold variant 235, a chimeric gRNA scaffold was designed primarily on the basis of the scaffold 235 sequence, but the extended stemloop of scaffold 235 was replaced with the shorter extended stemloop of scaffold variant 174 (FIGS. 8A-8C). The resulting chimeric scaffold, named scaffold 316, was synthesized in parallel with scaffold 174 and PCSK9-targeting spacers 6.7 and 6.8, and B2M-targeting spacer 7.9 harboring the v1 chemical modification profile, with 2′OMe and phosphorothioate bonds on the first and last three nucleotides of all gRNAs (see Table 28). Scaffold variant 174 was chosen as the comparator rather than variant 235 because variant 174 was the best previously characterized scaffold with the same length as variant 316.

[0428] In vitro cleavage activity was assessed for gRNAs with scaffold 174 and 316 and spacers 6.7 and 6.8. Cleavage assays were carried out with 20-fold excess RNP over a matching dsDNA target. Cleavage rates were quantified for all four guides, and the results are shown in Table 34. The data demonstrate that in the context of spacer 6.7, use of either scaffold 174 or 316 resulted in similar cleavage rates, with scaffold 316 resulting in marginally faster cleavage than that achieved with scaffold 174. In the context of spacer 6.8, the difference in cleavage activity was more pronounced: CasX RNPs using scaffold 316 were able to cleave DNA nearly twice as quickly as CasX RNPs using scaffold 174 (Table 34).

[0429] Assays were also performed with equimolar amounts of RNP and DNA target over a longer time course to assess the fraction of expected RNP active for cleavage. As the CasX RNP is essentially single-turnover over the tested timescale, and the concentrations used are expected to be substantially higher than the Kp of the DNA-binding reaction, the amount of cleaved DNA should approximate the amount of active RNP. For either spacer 6.7 or 6.8, the active fraction of CasX RNPs incorporating scaffold 316 was 25-30% higher than for CasX RNPs using scaffold 174 (Table 34). These data suggest that a higher fraction of gRNA using scaffold 316 was properly folded for association with the CasX protein, or that the gRNA using scaffold 316 was able to associate more strongly with the CasX protein. Compared to scaffold 174, scaffold 316 harbors mutations expected to stabilize the pseudoknot and triplex structures required for proper gRNA folding. The increased stability of these motifs in particular, which were more likely to misfold than the simple hairpins found elsewhere in the gRNA structure, might result in a slightly higher fraction of the gRNAs folding into an active conformation.

TABLE 34
Parameters of cleavage activity assessed for CasX RNPs
with gRNAs containing scaffold variant 174 or 316 with
the version 1 (v1) chemical modification profile.

| gRNA | k_{cleave} | Fraction |
|---|---|---|
| (scaffold variant-spacer) | (min⁻¹) | competence |
| 174-6.7, v1 | 0.236 | 0.194 |
| 174-6.8, v1 | 0.142 | 0.165 |
| 316-6.7, v1 | 0.264 | 0.244 |
| 316-6.8, v1 | 0.272 | 0.213 |

Comparison of gRNA Scaffold Variant 174 and 316 in a Cell-Based Assay:

[0430] An editing assessment using gRNA scaffold variant 174 compared to variant 316 was performed in a cell-based assay. CasX 491 mRNA and the version 1 (v1) of PCSK9-targeting gRNAs using spacers 6.7 and 6.8 were lipofected into HepG2 cells. Treated cells were harvested 28 hours post-transfection for analysis of editing levels at the PCSK9 locus by NGS and secreted PCSK9 levels by ELISA, and the data are presented in FIG. 9. The data demonstrate that use of any of the PCSK9-targeting gRNA tested resulted in efficient editing at the PCSK9 locus and substantial reduction in PCSK9 secretion compared to the non-targeting control using the B2M-targeting gRNA. The results also show that use of scaffold 316 resulted in more effective editing at the PCSK9 locus than that observed with use of scaffold 174 (˜10 percentage point increase in editing rate achieved with scaffold 316 over scaffold 174). This finding is further supported by the ELISA results, such that use of scaffold 316 resulted in more effective reduction of PCSK9 secretion compared to that achieved with use of scaffold 174.

[0431] Scaffold variants 174 and 316 were also assessed in an editing assay where LNPs were formulated to co-encapsulate CasX 491 mRNA and B2M-targeting gRNA harboring either scaffold variant. HepG2 cells were treated with the resulting LNPs at various doses and harvested seven days post-treatment to assess editing at the B2M locus, measured as indel rate detected by NGS (FIG. 10A) and loss of surface presentation of the B2M-dependent HLA complex, as detected by flow cytometry (FIG. 10B). The results from both assays demonstrate that treatment with LNPs to deliver the B2M-targeting gRNA using scaffold 316 resulted in higher editing potency at the B2M locus compared to LNPs delivering the gRNA using scaffold 174 at each dose (FIGS. 10A and 10B). Specifically, at the highest dose of 250 ng, use of scaffold 316 resulted in an editing level that was nearly two-fold higher than the level attained with using scaffold 174. This substantial increase in editing efficacy when using scaffold 316 versus scaffold 174, compared to the comparatively modest difference in activity observed from the in vitro cleavage assays, might be attributed to the destabilization of gRNA structure and folding during LNP formulation. The low pH conditions and association of cationic lipids during LNP formulation could adversely affect parts of the gRNA structure and result in unfolding. Consequently, it would be necessary for the gRNA to refold quickly in the cytoplasm upon delivery, both to bind the CasX protein to form the RNP and to evade RNase degradation. The stability-increasing mutations in scaffold 316 compared to scaffold 174 might provide a substantial benefit in supporting proper gRNA refolding in the cytoplasm after LNP delivery, while the deliberate folding protocol carried out for the gRNA prior to biochemical experiments likely reduced the impact of these mutations.

### Example 8: CasX:gRNA In Vitro Cleavage Assays

[0432] Experiments were performed to assess in vitro DNA cleavage by CasX:gRNA ribonucleoproteins (RNPs).

### Materials and Methods

[0433] RNPs of either CasX 119, CasX 491 (SEQ ID NO: 4), CasX 515 (SEQ ID NO: 5), or CasX 812 (SEQ ID NO: 7) were assembled with single guide RNAs (sgRNA) with scaffold 316 (ACUGGCGCUUCUAUCUGAUUACUCUGAGCGCCAUCACCAGCGACUAUGUCGU AGUGGGUAAAGCUCCCUCUUCGGAGGGAGCAUCAGAG; SEQ ID NO: 466) and one of two spacers, as described in detail below. The amino acid sequences of CasX 119 and CasX 491 are disclosed in International Publication No. WO2020247882A1, and the amino acid sequence of CasX 515 is disclosed in International Publication No. WO2022120095A1. Separately, RNPs of CasX 515 were assembled with sgRNA with either scaffold 2, 174, 235, or 316 and one of two spacers. The RNA sequences of scaffolds 2 and 174 are disclosed in International Publication No. WO2020247882A1, and the RNA sequence of scaffold 235 is disclosed in International Publication No. WO2022120095A1.

[0434] Purified RNP of CasX and sgRNA were prepared same-day prior to experiments. For experiments where protein variants were being compared, the CasX protein was incubated with sgRNA at 1:1.2 molar ratio. When scaffolds were compared, the protein was added in 1.2:1 ratio to guide. Briefly, sgRNA was added to Buffer #1 (20 mM Tris HCl pH 7.5, 150 mM NaCl, 1 mM TCEP, 5% glycerol, 10 mM MgCl₂) on ice, then CasX was added to the sgRNA solution, slowly with swirling, and immediately incubated at 37° C. for 20 minutes to form RNP complexes. RNP complexes were centrifuged at 4° C. for 5 minutes at 16,000×g to remove any precipitate. Formation of competent (active) RNP was assessed as described below.

### In Vitro Cleavage Assays:

[0435] The ability of CasX variants to form active RNP compared to reference CasX was determined using an in vitro cleavage assay. The beta-2 microglobulin (B2M) 7.9 and 7.37 target for the cleavage assay was created as follows. DNA oligos (sequences in Table 35) were generated with 5′ terminal amino modification for conjugation to Cy-dyes with an amino-reactive handle (N-hydroxysuccinimide). Oligo-dye conjugation reactions of 100 uM oligo and 1 mM dye were performed in 100 mM sodium borate pH 8.3 at 4° C. for 16 h. Target strands (TS) were labeled with Cy5.5 and non-targeting strands (NTS) were labeled with Cy7.5. After quenching the reactions with 1 mM Tris pH 7.5, the conjugated oligos were purified via ethanol precipitation. Double-stranded DNA (dsDNA) targets were formed by mixing the oligos in a 1:1 ratio in 1× hybridization buffer (20 mM Tris HCl pH 7.5, 100 mM KCl, 5 mM MgCl₂), heating to 95° C. for 10 minutes, and allowing the solution to cool to room temperature.

TABLE 35
DNA sequences and descriptions of target DNAs

| DNA Sequence (5′-3′)* | SEQ ID NO | Description |
|---|---|---|
| /5AmMC6/TGAAGCTGACAGCATTCGGGCCGAGA | 20025 | 7.37 NTS with 5′ amine for NHS |
| TGTCTCGCTCCGTGGCCTTAGCTGTGCTCGCGCT | | ester linkages** |
| /5AmMC6/AGCGCGAGCACAGCTAAGGCCACGGA | 20026 | 7.37 TS with 5′ amine* |
| GCGAGACATCTCGGCCCGAATGCTGTCAGCTTCA | | |
| /5AmMC6/TGAAGCTGACAGCATTCGGGCCTAGA | 20027 | 7.37 gel probe NTS, mismatch at 5 |
| TGTCTCGCTCCGTGGCCTTAGCTGTGCTCGCGCT | | |
| /5AmMC6/AGCGCGAGCACAGCTAAGGCCACGGA | 20028 | 7.37 gel probe TS, mismatch at 5 |
| GCGAGACATCTAGGCCCGAATGCTGTCAGCTTCA | | |
| /5AmMC6/TGAAGCTGACAGCATTCGGGCCGAGA | 20029 | 7.37 gel probe NTS, mismatch at 10 |
| TATCTCGCTCCGTGGCCTTAGCTGTGCTCGCGCT | | |
| /5AmMC6/AGCGCGAGCACAGCTAAGGCCACGGA | 20030 | 7.37 gel probe TS, mismatch at 10 |
| GCGAGATATCTCGGCCCGAATGCTGTCAGCTTCA | | |
| /5AmMC6/TGAAGCTGACAGCATTCGGGCCGAGA | 20031 | 7.37 gel probe NTS, mismatch at 15 |
| TGTCTCGATCCGTGGCCTTAGCTGTGCTCGCGCT | | |
| /5AmMC6/AGCGCGAGCACAGCTAAGGCCACGGA | 20032 | 7.37 gel probe TS, mismatch at 15 |
| TCGAGACATCTCGGCCCGAATGCTGTCAGCTTCA | | |
| /5AmMC6/CTTTCAGCAAGGACTGGTCTTTCTAT | 20033 | 7.9 target TS |
| CTCTTGTACTACACTGAATTCACCCCCACTGAAA | | |
| /5AmMC6/TTTCAGTGGGGGTGAATTCAGTGTAG | 20034 | 7.9 target NTS |
| TACAAGAGATAGAAAGACCAGTCCTTGCTGAAAG | | |
| /5AmMC6/CTTTCAGCAAGGACTGGTCTTTCTAT | 20035 | 7.9 gel probe TS, mismatch at 5 |
| CTCTTGTACGACACTGAATTCACCCCCACTGAAA | | |
| /5AmMC6/TTTCAGTGGGGGTGAATTCAGTGTCG | 20036 | 7.9 gel probe NTS, mismatch at 5 |
| TACAAGAGATAGAAAGACCAGTCCTTGCTGAAAG | | |
| /5AmMC6/CTTTCAGCAAGGACTGGTCTTTCTAT | 20037 | 7.9 gel probe TS, mismatch at 10 |
| CTCTCGTACTACACTGAATTCACCCCCACTGAAA | | |
| /5AmMC6/TTTCAGTGGGGGTGAATTCAGTGTAG | 20038 | 7.9 gel probe NTS, mismatch at 10 |
| TACGAGAGATAGAAAGACCAGTCCTTGCTGAAAG | | |
| /5AmMC6/CTTTCAGCAAGGACTGGTCTTTCTGT | 20039 | 7.9 gel probe TS, mismatch at 15 |
| CTCTTGTACTACACTGAATTCACCCCCACTGAAA | | |
| /5AmMC6/TTTCAGTGGGGGTGAATTCAGTGTAG | 20040 | 7.9 gel probe NTS, mismatch at 15 |
| TACAAGAGACAGAAAGACCAGTCCTTGCTGAAAG | | |

*5AmMC6 indicates the 5′ Amino Modifier C6 and is not included in as a part of the identified sequence in the sequence listing. The target sequences are underlined.
**The Kcleave assay using the mismatched position 5 dsDNA target was run at 37° C.

### Determining Cleavage-Competent Fractions for RNPs

[0436] Cleavage reactions were prepared with final RNP concentrations of 100 nM and final target concentration of 100 nM. Reactions were carried out at 37° C. and initiated by the addition of the dye-labeled dsDNA target. Aliquots were taken at 5, 30, and 60 minutes and quenched by adding to 95% formamide, 25 mM EDTA. Samples were denatured by heating at 95° C. for 10 minutes and run on a 10% urea-PAGE gel. The gels were imaged with a Cytiva Typhoon and quantified using the Cytiva IQTL software.

### Kcleave Assay:

[0437] Cleavage reactions were set up with a final RNP concentration of 200 nM and a final target concentration of 10 nM. Reactions were carried out at 16° C., except where otherwise noted, and initiated by the addition of the target DNA. Aliquots were taken at 15, 30, 60, 120, 180, 240, and 480 seconds, and quenched by adding to 95% formamide, 25 mM EDTA. Samples were denatured by heating at 95° C. for 10 minutes and run on a 10% urea-PAGE gel. The gels were imaged with a Cytiva Typhoon and quantified using the Cytiva IQTL software. The apparent first-order rate constant of non-target strand cleavage (k_{cleave}) was determined for each CasX: sgRNA combination replicate individually.

[0438] To test the relative specificities of engineered proteins in vitro, apparent cleavage rate constants were compared for targets with mismatched bases at various positions (5, 10, and 15 nt downstream of PAM, Table 35). Cleavage assays were performed in large excess of RNP (200 nM RNP and 1 nM target dsDNA) at 16° C., with the exception of assays measuring cleavage of the target with a mismatch at 5 nt, which were conducted at 37° C. in order to observe measurable cleavage rates. Aliquots were taken at 15, 30, 60, 120, 180, 240, and 480 seconds, and quenched by adding to 95% formamide, 25 mM EDTA. Samples were denatured by heating at 95° C. for 10 minutes and run on a 10% urea-PAGE gel. The gels were imaged with a Cytiva Typhoon and quantified using the Cytiva IQTL software. The apparent first-order rate constant of non-target strand cleavage (k_{cleave}) was determined for each CasX: sgRNA combination replicate individually.

### Results:

### Determining Cleavage-Competent Fractions for Protein Variants Compared to Reference CasX 119

[0439] To determine the cleavage-competent fraction for the tested CasX proteins, it was assumed that CasX acts essentially as a single-turnover enzyme under the assayed conditions, as indicated by the observation that sub-stoichiometric amounts of enzyme fail to cleave a greater-than-stoichiometric amount of target even under extended time-scales and instead approach a plateau that scales with the amount of enzyme present. Thus, the fraction of target cleaved over long time-scales by an equimolar amount of RNP is indicative of what fraction of the RNP is properly formed and active for cleavage. Thus, the active (competent) fraction for each RNP was derived from the cleaved fraction over the total signal at the 60-minute timepoint, upon confirming an increase in cleaved fraction from the 5-minute timepoint, and relative plateau in cleaved fraction from the 30-minute timepoint.

[0440] Apparent competent fractions were determined for the RNPs with various CasX proteins, and are provided in Table 36.

TABLE 36
Protein variant RNP comparison of fraction competence and Kcleave rates

| | Fraction | Kcleave (sec⁻¹) | | | |
|---|---|---|---|---|---|
| | competence * | On- | Position 15 | Position 10 | Position 5 |
| RNP | (mean ± | target | mismatch | mismatch | mismatch |
| (CasX.Scaffold.Spacer) | stdev) | spacer | spacer | spacer | spacer** |
| 119.174.7.9 | 26.71 ± | 0.0292 | 0.0158 | 0.0047 | 0.0127 |
| | 9.65% | | | | |
| 491.174.7.9 | 49.23 ± | 0.0966 | 0.0552 | 0.03 | 0.0616 |
| | 6.37% | | | | |
| 515.174.7.9 | 30.15 ± | 0.0782 | 0.0625 | 0.0324 | 0.0392 |
| | 3.58% | | | | |
| 812.174.7.9 | 53.28 ± | 0.0909 | 0.0512 | 0.0142 | 0.01 |
| | 5.14% | | | | |
| 119.174.7.37 | 29.01 ± | 0.0022 | 0.0061 | 0.0028 | 0.0034 |
| | 2.67% | | | | |
| 491.174.7.37 | 48.73 ± | 0.0425 | 0.015 | 0.0297 | 0.0301 |
| | 5.44% | | | | |
| 515.174.7.37 | 43.54 ± | 0.0396 | 0.0127 | 0.0297 | 0.0347 |
| | 16.19% | | | | |
| 812.174.7.37 | 38.23 ± | 0.027 | 0.0111 | 0.0119 | 0.014 |
| | 2.49% | | | | |

* Active fraction was calculated by averaging three experimental replicates.
* The Kcleave assay using the mismatched position 5 dsDNA target was run at 37° C.

[0441] For protein variant comparison, the following CasX proteins were used with guide scaffold 316 and spacer 7.9 or guide 316 and spacer 7.37; CasX 119, CasX 491, CasX 515, and CasX 812. CasX 119 had the lowest active fraction for both spacers, indicating that CasX 491, CasX 515, and CasX 812 form more active and stable RNP with the identical guides under the tested conditions as compared to CasX 119. CasX proteins 491, 515, and 812 did not show consistent trends in their competent fractions across the two spacers, consistent with the expectation that the additional engineering following CasX 491 primarily affects target engagement and cleavage, rather than guide binding or stability.

Kcleave Assay to Understand Specificity of RNPs Formed from Protein Variants

[0442] Assays were performed to measure the apparent first-order rate constant of non-target strand cleavage (k_{cleave}), and the results are presented in Table 36, above. A drastic effect on the kinetics of CasX 812 RNP cleavage was observed for on-target versus the mismatched dsDNA target for both spacers. CasX 812 had comparable on-target cleavage rates to CasX 491 and CasX 515 for both spacers, with a slightly higher cleavage rate than 515 on spacer 7.9, which might be explained by the lower competent fraction observed for the 515 RNP with that spacer, and a lower cleavage rate on 7.37.

[0443] The off-target rates for CasX 812 were much more substantially reduced for most of the mismatched substrates. The difference in kcleave rates was readily apparent for the target with a mismatch at position 10, with 812 having a roughly 6-fold (7.9) and 2-fold (7.37) reduction in cleavage rate, as compared to its on-target rate. CasX 515, by comparison, exhibited a 2.4-fold and a 25% reduction on the same targets. A substantial difference was also observed for the position 5 mismatch targets. Even though the assay was run at 37° C. to enable measurable cleavage rates, as the position 5 mismatch targets were essentially uncleaved by the CasX RNPs at the lower temperature used for the other targets, CasX 812 against spacer 7.9 exhibited a 9-fold reduction in cleavage rate from on-target rate run at 16° C. and a 2-fold reduction for the 7.37 spacer with a position 5 mismatch. CasX 515 showed a 2-fold reduction for mismatched 7.9 and a nearly equivalent cleavage rate for 7.37 with the position 5 mismatch (note that the “equivalent” cleavage rate is due to the increased temperature).

[0444] For the position 15 mismatch substrate, CasX 812 exhibited modest reductions in cleavage rates relative to on-target rates, comparable to the reduction observed for 515. This suggests that the increased sensitivity of CasX 812 to mismatches declines by the PAM distal region, at least for the specific mismatches and spacers tested here. The increased sensitivity at positions 5 and 10 in particular correlates with the position of the G329K mutation present in CasX 812. This mutation introduces a positive charge near the RNA spacer around position 8 and may help CasX to better read out distortions caused by mismatches. Mismatches closer to this new site of contact would be more likely to significantly disrupt either R-loop propagation or allosteric activation of the RuvC (depending on the precise mechanism of increased specificity), while mismatches farther away (as in the position 15 mismatch) might have more variable effects depending on the nature of the mismatch and its effects on the broader heteroduplex structure. Taken together, these data confirm that CasX 812 is inherently more sensitive to mismatches between the RNA spacer and the DNA target and is not simply a less active enzyme, as the decrease in cleavage rate at mismatched targets is in excess of the decrease in cleavage rate at properly matched targets. This is consistent with the results presented in Examples B and C that indicate that CasX 812 is a highly specific enzyme, with lower off-target editing compared to the other nucleases tested.

### Determining Cleavage-Competent Fractions for Single Guide Variants Relative to Reference Single Guide 2

[0445] RNPs were complexed using the aforementioned methods. To isolate the effect of sgRNA identity on RNP formation, guide-limiting conditions were employed. sgRNAs with scaffolds 2, 174, 235, or 316 with spacers 7.9 or 7.37 were mixed with CasX 515 at final concentrations of 1 μM for the guide and 1.2 μM for the protein. Fraction competence was calculated as described above, and the results are provided in Table 37.

TABLE 37
Guide variant RNP comparison of fraction
competence and Kcleave assay

| RNP construct | Competent fraction | Kcleave |
|---|---|---|
| (CasX.Scaffold.Spacer) | (mean ± stdev) | (sec⁻¹) |
| 515.2.7.9 | 28.146.87% | 0.1346 ± 0.0118 |
| 515.174.7.9 | 42.779.62% | 0.1723 ± 0.0046 |
| 515.235.7.9 | 34.111.15% | 0.1696 ± 0.0571 |
| 515.316.7.9 | 30.896.87% | 0.1413 ± 0.0301 |
| 515.2.7.37 | 10.422.24% | 0.0204 ± 0.0002 |
| 515.174.7.37 | 19.962.88% | 0.0534 ± 0.0200 |
| 515.235.7.37 | 32.6411.60% | 0.0647 ± 0.0163 |
| 515.316.7.37 | 26.9811.08% | 0.0851 ± 0.0071 |

* active fraction was calculated by averaging two experimental replicates

[0446] Given the complex folding structure of the CasX guide, fraction competence is expected to largely be determined by how much of the guide is properly folded for interaction with the protein. All guides with engineered scaffolds showed improvements over scaffold 2, but guides with scaffold 235 or 316 showed improvements relative to 174 for spacer 7.37. This is consistent with the introduction of mutations in the pseudoknot and triplex that are expected to stabilize the properly folded form.

[0447] Higher competent fractions of all guides were observed for spacer 7.9. For this spacer, scaffold 174 had the highest competent fraction, followed by scaffolds 316, 235, and 2. Proper guide folding is expected to be highly dependent on the potential for undesired interactions between the scaffold and spacer sequences, so the observed differences may be attributable to differential sequence-specific interactions, variations in prep quality, or noise in the assay.

Determining k_{cleave} for Single Guide Variants Compared to Reference Scaffold 2

[0448] Cleavage assays were performed with CasX 515 and guides with reference scaffold 2 compared to guides with scaffolds 174, 235, or 316 with spacer 7.9 or 7.37 to determine relative cleavage rates. The mean and standard deviation of three replicates with independent fits are presented in Table 37, above.

[0449] To reduce cleavage kinetics to a range measurable with the assay, the cleavage reactions were incubated at 16° C. Under these conditions, all guides supported faster cleavage rates as compared to scaffold 2. For spacer 7.37, the cleavage kinetics aligned with those guides that contributed to the highest fraction competence, with the highest cleavage rate being sg174 (0.1723 s⁻¹), followed by scaffold 235 (0.1696 s⁻¹) and scaffold 316 (0.1413 s⁻¹), versus scaffold 2 (0.1346 s⁻¹). For spacer 7.9, scaffold 316 yielded the highest cleavage rate (0.0851 s⁻¹), followed by scaffold 235 (0.0647 s⁻¹) and sg174 (0.0534 s⁻¹), versus scaffold 2 (0.0204 s⁻¹). The fraction competence and kcleave data did not demonstrate differences across the engineered variants that were consistent across both spacers, although all are consistently better than scaffold 2. This suggests that the improvements seen for scaffold 235 and 316 over 174 are primarily due to behavior in the cell, whether it be stability in the cytoplasm, folding in the cytoplasm, transcription when delivered via plasmid or AAV, or refolding ability when delivered via LNP, that are not captured by guides that have been in vitro transcribed, refolded, and tested for cleavage biochemically.

### Example 9: Suppression of Apo (a) Secretion in Primary Human Hepatocytes

[0450] Experiments were conducted to demonstrate the ability of a CasX:gRNA system to reduce apo (a) secretion in primary human hepatocytes.

### Materials and Methods

In Vitro Delivery of gRNA and CasX mRNA Via Lipofection:

[0451] Editing at the LPA locus and consequential effects on secreted apo (a) levels were assessed using CasX 515 mRNA (SEQ ID NO: 19755) co-delivered with gRNA comprising scaffold 316 (SEQ ID NO: 466) and LPA-targeting sequences (see Table 38) that, in each case, were converted into the chemically-modified v1 versions (detailed in Example 7) for delivery, into primary human hepatocytes by lipofection. As experimental control, CasX 515 mRNA was co-delivered with a non-targeting gRNA.

TABLE 38
LPA-targeting targeting sequences used in this
example.

| Targeting | | SEQ ID |
|---|---|---|
| sequence ID | Targeting sequence (RNA) | NO: |
| TG-48-239 | UGUGACAGUGGUGGAGGAUA | 820 |
| TG-48-351 | CAAUAACAAGGAGCUGGGCU | 901 |

### Assessment of Apo (a) Secretion by Western Blot Using an Automated Capillary Separation and Detection System, Jess (Bio-Techne):

[0452] Briefly, primary human hepatocytes were lipofected with an in vitro transcribed mRNA coding for CasX 515 and an LPA-targeting gRNA using lipofectamine. Six days after lipofection, and 72 hours after a media change, supernatant was harvested and the apo (a) secreted into the media was measured. Total protein was quantified and diluted to 2 ug/μL prior to Western blotting, and secreted apo (a) was detected using a monoclonal apo (a) antibody (Abcam: Ab208184). The amount of protein was determined using Compass software to calculate the area under the curve (AUC) for the apo (a) peak detected at ˜450 kDa. AUC values were compared to a standard curve of fixed apo (a) concentrations to quantify final protein concentrations. While a standard curve was not included for every Jess run, 2 or more calibrator samples were included across multiple Jess runs to 1) calculate protein concentrations based on a previous standard curve and 2) evaluate protein concentrations from multiple Jess runs.

### Results

[0453] The ability of CasX 515 and gRNA comprising scaffold 235 (SEQ ID NO: 19713) and an LPA-targeting sequence to reduce secretion of apo (a) was assessed. FIG. 14 and Table 39, below, provide the relative level of apo (a) produced by primary human hepatocytes with each individual targeting sequence, rounded to the nearest hundredth.

TABLE 39
Apo(a) levels relative to non-targeting
gRNA in primary human hepatocytes

| Targeting sequence ID | Apo(a) level | Percent Reduction |
|---|---|---|
| TG-48-239 | 0.03 | 97% |
| TG-48-351 | 0.07 | 93% |

[0454] The results demonstrate that CasX 515 and an LPA-targeting gRNA were able to edit the LPA locus in primary human hepatocytes with gRNAs, markedly reducing apo (a) secretion.

### Example 10: Assessment of CasX Variant 515 and gRNAs Using Scaffold Variant 235 with LPA-Targeting Targeting Sequences to Induce Off-Target Editing

[0455] Experiments were performed to assess the potential off-target editing of various CasX proteins and gRNAs with targeting sequences designed to target the human LPA locus. Here, in silico analysis was performed to determine and assess the predicted off-target sites for the various LPA-targeting targeting sequences. Furthermore, cut site incorporation and sequencing (CSI-seq) was performed in cells, experimentally assessing the off-target activity of gRNAs containing human LPA-targeting targeting sequences in complex with CasX variant 515.

### Materials and Methods

### CSI-Seq Assay:

[0456] ˜700,000 HEK293 cells were nucleofected using a Lonza nucleofector with 500 ng of plasmid DNA encoding CasX 515, gRNA with scaffold 235 and LPA-targeting targeting sequences (sequences listed in Table 40), and 100 pmol of a double stranded DNA fragment to be incorporated at cut-sites. Nucleofected cells were then plated onto a 6-well plate and grown for five days, after which they were harvested for genomic DNA (gDNA) extraction using a Zymo QuickDNA™ miniprep kit. Samples were normalized and sequenced on an Illumina NextSeq™. Subsequently, samples were analyzed to identify off-target editing events. Briefly, reads were filtered to eliminate off-target priming sites from analysis. These filtered reads are referred to herein as “CSI-seq reads.” Genomic sites with multiple mapped reads were required to have aligned reads in both orientations to further reduce false positives. Sites with a nearby sequence containing seven or fewer mismatches or RNA/DNA bulges away from the search targeting sequence were identified as potential off-target sites. The number of CSI-seq reads at each site relative to the number of CSI-seq reads at the on-target site was expected to be roughly proportional to the relative amount of off-target editing at that site. FIG. 15 presents the level of off-target editing of the tested targeting sequences at the given off-target sites normalized to the level of on-target editing for each targeting sequence, calculated as the number of off-target CSI-seq reads for a targeting sequence at a particular site divided by the number of on-target CSI-reads for the targeting sequence, multiplied by 100.

### Results

[0457] Potential off-target sites were identified using a CSI-seq assay for each LPA-targeting sequence. The results are depicted as the number of off-target CSI-seq reads at a particular off-target site, normalized to the number of on-target CSI-seq reads obtained for that targeting sequence, as described above. Targeting sequences with few off-target sites and relatively few CSI-seq reads at each site were considered to have minimal off-target risk, while targeting sequences with many off-target sites with moderate numbers of CSI-seq reads or a top off-target site with a high number of reads were considered to have a high off-target risk.

[0458] While several targeting sequences show minimal off-target activity, others had a top off-target site with reads >25% of on-target, with one with a top off-target with 65% of on-target CSI-seq reads (FIG. 15). The top off-target site was very often not the identified site with the fewest mismatches, and in many cases sites with fewer mismatches could be identified computationally but did not appear in the CSI-seq hits. This observation, consistent with published data for other CRISPR nucleases, demonstrates the importance of experimentally determining the potential off-target editing locations for targeting sequences. These results show that two targeting sequences, 48.305 and 48.351, with minimal off-target editing effects have been identified for LPA, enabling the safe and efficacious targeting of the locus.

TABLE 40
Sequences of human LPA-targeting targeting sequences tested in a CSI-seq
assay

| Targeting | | SEQ | | SEQ |
|---|---|---|---|---|
| sequence | Targeting sequence DNA | ID | Targeting sequence RNA | ID |
| ID | sequence | NO: | sequence | NO: |
| 48.171 | GTCACCAGGCATTGTGTCAG | 19806 | GUCACCAGGCAUUGUGUC | 877 |
| | | | AG | |
| 48.178 | TCAGAAGAAGCCTCTGTGCT | 19807 | UCAGAAGAAGCCUCUGUG | 878 |
| | | | CU | |
| 48.222 | TGTGATAGTGGTGGAGAGTG | 19808 | UGUGAUAGUGGUGGAGA | 817 |
| | | | GUG | |
| 48.280 | GAAGGAGGCCCTAGGCTTG | 19809 | GAAGGAGGCCCUAGGCUU | 787 |
| | G | | GG | |
| 48.284 | AGGGACAAATAAATGGGCA | 19810 | AGGGACAAAUAAAUGGGC | 826 |
| | G | | AG | |
| 48.305 | AGCAGTGAGCAGCAGTCAG | 19811 | AGCAGUGAGCAGCAGUCA | 792 |
| | C | | GC | |
| 48.351 | CAATAACAAGGAGCTGGGC | 19812 | CAAUAACAAGGAGCUGGG | 901 |
| | T | | CU | |

### Example 11: Functional Assessments of CasX: GRNA Systems Targeting the Human LPA Locus in Primary Human Hepatocytes

[0459] Experiments were performed to assess the ability of a CasX:gRNA system to reduce apo (a) secretion in primary human hepatocytes. This set of experiments was used to narrow the selection of LPA-targeting sequences from 60 to the 8 LPA-targeting sequences resulting in the greatest editing.

### Materials and Methods

In Vitro Delivery of gRNA and CasX mRNA Via Lipofection:

[0460] Editing at the LPA locus and consequential effects on secreted apo (a) levels were assessed using CasX 515 mRNA (SEQ ID NO: 19755, Table 42) co-delivered with the 316 gRNA scaffold (SEQ ID NO: 466) with LPA-targeting sequences (see Table 41) that, in each case, were converted into the chemically-modified v1 versions (detailed in Example 7) for delivery, into primary human hepatocytes by lipofection. As experimental control, CasX 515 mRNA was co-delivered with a non-targeting gRNA.

### Assessment of Apo (a) Secretion by Western Blot Using an Automated Capillary Separation and Detection System, Jess (Bio-Techne):

[0461] Briefly, primary human hepatocytes were lipofected with an in vitro transcribed mRNA coding for CasX 515 and an LPA-targeting gRNA using lipofectamine. Six days after lipofection, and 72 hours after a media change, supernatant was harvested and the apo (a) secreted into the media was measured. Total protein was quantified and diluted to 2 ug/μL prior to Western blotting, and secreted apo (a) was detected using a monoclonal apo (a) antibody (Abcam: Ab208184). The amount of protein was determined using Compass software to calculate the area under the curve (AUC) for the apo (a) peak detected at ˜450 kDa. AUC values were compared to a standard curve of fixed apo (a) concentrations to quantify final protein concentrations. While a standard curve was not included for every Jess run, 2 or more calibrator samples were included across multiple Jess runs to 1) calculate protein concentrations based on a previous standard curve and 2) evaluate protein concentrations from multiple Jess runs. mRNA level measurement by qPCR:

[0462] Measurement of LPA mRNA expression was performed using a single-step RT-qPCR approach, 25-50 uL of sample lysate was used for RNA extraction. GAPDH primers/probe were used for normalizing transcript levels (IDT; Hs.PT.39a.22214836). Percent change in RNA was calculated by comparing to samples treated with a non-targeting gRNA (Table 43).

### Assessment of Editing of LPA Gene by Next-Generation Sequencing (NGS):

[0463] Genomic DNA was amplified via PCR with primers specific to the target genomic location of interest to form a target amplicon. These primers contained additional sequence at the 5′ ends to introduce Illumina reads 1 and 2 sequences. Further, they contained a 16-nucleotide random sequence that functioned as a unique molecular identifier (UMI). The quality and quantification of the amplicon was assessed using a Fragment Analyzer DNA analyzer kit (Agilent, dsDNA 35-1500 bp). Amplicons were sequenced on the Illumina MiSeq™ according to the manufacturer's instructions. Raw fastq sequencing files were processed by trimming for quality and adapter sequences and merging read 1 and read 2 into a single insert sequence; insert sequences were then analyzed by the CRISPResso2 program. The percentage of reads modified in a window around the 3′ end of the targeting sequence was determined. The editing activity of the CasX molecule was quantified as the total percent of reads that contained deletions anywhere within this window (Table 43). Each LPA-targeting sequence was assessed in 1-3 independent replicates. Table 43, below, provides the mean deletion rate for the tested LPA-targeting sequences.

### Results

[0464] The ability of CasX 515 and gRNA comprising scaffold 316 and an LPA-targeting sequence to reduce secretion of apo (a) was assessed. Table 43, below, provides the relative level of apo (a) produced by primary human hepatocytes with each individual targeting sequence, rounded to the nearest hundredth, the percent change in mRNA by qPCR, and the editing rate measured by NGS as percent indel. These results were used to select the top ten LPA-targeting sequences, based on combined editing rate, mRNA reduction, and protein reduction. Three LPA-targeting sequences (TG-48-280, TG-48-223, TG-48-239) were excluded from this set due to cutting the target gene in multiple locations (data not shown), resulting in the selection of eight LPA-targeting sequences for further evaluation (Table 44).

[0465] The results demonstrate that CasX 515 and an LPA-targeting gRNA were able to edit the LPA locus, reduce mRNA, and reduce apo (a) secretion in primary human hepatocytes.

TABLE 41
LPA-targeting targeting sequences used in this
example.

| Targeting | | SEQ |
|---|---|---|
| sequence ID | Targeting sequence (RNA) | ID NO: |
| TG-48-107 | UCUGCCUUUCUACUGGAUAC | 776 |
| TG-48-178 | UCAGAAGAAGCCUCUGUGCU | 878 |
| TG-48-222 | UGUGAUAGUGGUGGAGAGUG | 817 |
| TG-48-284 | AGGGACAAAUAAAUGGGCAG | 826 |
| TG-48-303 | UUCUAGGUUUGGAAAGCACU | 896 |
| TG-48-305 | AGCAGUGAGCAGCAGUCAGC | 792 |
| TG-48-317 | UGGAGCCCACACAAGCAGAU | 898 |
| TG-48-351 | CAAUAACAAGGAGCUGGGCU | 901 |
| TG-48-005 | AUGGAAGCUUGGCUAUCUUC | 811 |
| TG-48-007 | CUAGAAGUCUCGCUGCUUUC | 809 |
| TG-48-009 | UAUCCCCUGCACUCCCUACA | 771 |
| TG-48-015 | AGAGAACGGUGCUCCCUCAC | 852 |
| TG-48-016 | CUAGAAUCUGCUAUUUGAGC | 851 |
| TG-48-017 | UGGCAACUUGCGGUAGGUUU | 799 |
| TG-48-056 | GACUACCAAGCAUCGGGCAG | 853 |
| TG-48-083 | CAGUUCAAAAUCUUGUAUAU | 805 |
| TG-48-087 | AGCACCGUGACAGUCUUCAC | 806 |
| TG-48-088 | GCCCAUUCAUUCCAGCACCG | 854 |
| TG-48-102 | AGCAUAGAGCAUAUUAAAUU | 807 |
| TG-48-104 | UGCAAAGUCCUUGGCCACAG | 775 |
| TG-48-109 | ACUGGAUACUUGUCAUCGGC | 857 |
| TG-48-111 | CUGCAGUGUGUCAUCUUUCA | 858 |
| TG-48-113 | AGGGAAUACAGGGUCAGGGG | 859 |
| TG-48-118 | UCUGUUUUAAUUUUAGCAGC | 862 |
| TG-48-119 | GUUUUAAUUUUAGCAGCACC | 863 |
| TG-48-124 | GUGGUCCUAUUAUGUUGAUG | 864 |
| TG-48-127 | GCCAUGUUGGGGGAAGCCUC | 865 |
| TG-48-137 | UUUCUUUUCAUUUCAGCACC | 869 |
| TG-48-139 | GUGGUAGCACUCCUGCACCC | 813 |
| TG-48-141 | UGUGACAGUAAUGAAGUAUG | 814 |
| TG-48-142 | UCCUGUGACAGUAAUGAAGU | 871 |
| TG-48-145 | GCAGUAGUUCUUGAUCAAGC | 840 |
| TG-48-151 | GCAUCUGAGCAUCGUGUCAG | 873 |
| TG-48-162 | GUUUUAAUUUCAGCACUGAC | 875 |
| TG-48-169 | GGGGUCCGACUAUGCUGGUG | 876 |
| TG-48-171 | GUCACCAGGCAUUGUGUCAG | 877 |
| TG-48-179 | UACCUUCUUCAGAAGAAGCC | 815 |
| TG-48-193 | GAAACAGCCGUGGACGUCGC | 780 |
| TG-48-196 | CUGAUGCCAGUGUGGUGUCA | 881 |
| TG-48-199 | CUUGGGAGAAAACUCAAAGA | 883 |
| TG-48-223 | UCCUGUGAUAGUGGUGGAGA | 884 |
| TG-48-229 | UUUUAUGGCUAACAUGAUAG | 818 |
| TG-48-235 | AAGCACAGAGGCUCCUUCUG | 819 |
| TG-48-239 | UGUGACAGUGGUGGAGGAUA | 820 |
| TG-48-267 | UGCAGUAGUUCUCGGUCAGG | 824 |
| TG-48-280 | GAAGGAGGCCCUAGGCUUGG | 787 |
| TG-48-281 | AAGCCUAGGGCCUCCUUCUG | 825 |
| TG-48-283 | UUCCAGGGACAAAUAAAUGG | 788 |
| TG-48-286 | UUGUGUAGCACCAGGGACCA | 789 |
| TG-48-288 | UGGAUUCAUUGUGUAGCACC | 890 |
| TG-48-299 | UCAUUGCUCUGAGACUCUUA | 828 |
| TG-48-300 | CCUUCCCCUGAUCCAAGCCU | 829 |
| TG-48-306 | UCAAGCAGUGAGCAGCAGUC | 897 |
| TG-48-324 | GUCCUGGCGGUGACCAUGUA | 793 |
| TG-48-336 | CUCUUAUCAGGAUGUUUGCC | 833 |
| TG-48-341 | GCAGAGCUGCAUGGAGGAAG | 834 |
| TG-48-342 | UCCAUGCAGCUCUGCGGAAG | 835 |
| TG-48-343 | GUGUCAGAAAACUGACACCG | 843 |
| TG-48-358 | CCUACCUCUGUUUAGGGUGA | 836 |
| TG-48-360 | CUCUGUCUCCCGUCCAAUUA | 795 |

TABLE 42
Full-length protein sequence of CasX 515 molecule with NLS.

| | | SEQ ID |
|---|---|---|
| CasX | AA sequence | NO |
| CasX 515 | MAPAAKRVKLDSRQEIKRINKIRRRLVKDSNTKKAGKTGPMKTLLVRVMT | 19757 |
| with | PDLRERLENLRKKPENIPQPISNTSRANLNKLLTDYTEMKKAILHVYWEEF | |
| flanking | QKDPVGLMSRVAQPASKKIDQNKLKPEMDEKGNLTTAGFACSQCGQPLFV | |
| c-MYC | YKLEQVSEKGKAYTNYFGRCNVAEHEKLILLAQLKPEKDSDEAVTYSLGK | |
| NLSes | FGQRALDFYSIHVTKESTHPVKPLAQIAGNRYASGPVGKALSDACMGTIAS | |
| | FLSKYQDIIIEHQKVVKGNQKRLESLRELAGKENLEYPSVTLPPQPHTKEGV | |
| | DAYNEVIARVRMWVNLNLWQKLKLSRDDAKPLLRLKGFPSFPLVERQAN | |
| | EVDWWDMVCNVKKLINEKKEDGKVFWQNLAGYKRQEALRPYLSSEEDR | |
| | KKGKKFARYQLGDLLLHLEKKHGEDWGKVYDEAWERIDKKVEGLSKHIK | |
| | LEEERRSEDAQSKAALTDWLRAKASFVIEGLKEADKDEFCRCELKLQKWY | |
| | GDLRGKPFAIEAENSILDISGFSKQYNCAFIWQKDGVKKLNLYLIINYFKGG | |
| | KLRFKKIKPEAFEANRFYTVINKKSGEIVPMEVNFNFDDPNLIILPLAFGKRQ | |
| | GREFIWNDLLSLETGSLKLANGRVIEKTLYNRRTRQDEPALFVALTFERRE | |
| | VLDSSNIKPMNLIGVDRGENIPAVIALTDPEGCPLSRFKDSLGNPTHILRIGES | |
| | YKEKQRTIQAKKEVEQRRAGGYSRKYASKAKNLADDMVRNTARDLLYY | |
| | AVTQDAMLIFENLSRGFGRQGKRTFMAERQYTRMEDWLTAKLAYEGLPS | |
| | KTYLSKTLAQYTSKTCSNCGFTITSADYDRVLEKLKKTATGWMTTINGKEL | |
| | KVEGQITYYNRYKRQNVVKDLSVELDRLSEESVNNDISSWTKGRSGEALSL | |
| | LKKRFSHRPVQEKFVCLNCGFETHADEQAALNIARSWLFLRSQEYKKYQT | |
| | NKTTGNTDKRAFVETWQSFYRKKLKEVWKPAVGSPAAKRVKLD | |

TABLE 43
Apo(a) levels relative to non-targeting
gRNA in primary human hepatocytes

| | Jess % KD | qPCR % KD | % Indel Adjusted |
|---|---|---|---|
| Targeting sequence ID | (average) | (average) | (Max) |
| TG-48-005 | −13.08 | 6.85 | 0 |
| TG-48-007 | −35.25 | −13.49 | 77.702 |
| TG-48-009 | −36.66 | −12 | 55.442 |
| TG-48-015 | −15.53 | −23.6 | 84.959 |
| TG-48-016 | −22.43 | 10.7 | 63.353 |
| TG-48-017 | −32.23 | −15.72 | 81.131 |
| TG-48-056 | −25.38 | −11.28 | 0 |
| TG-48-083 | −40.17 | −13.27 | 76.422 |
| TG-48-087 | −13.71 | −16.78 | 0 |
| TG-48-088 | −34.15 | −34.43 | 0 |
| TG-48-102 | −29.18 | −18.31 | 37.547 |
| TG-48-104 | −18.48 | −26.3 | 39.935 |
| TG-48-107 | −46.37 | −22.3 | 77.172 |
| TG-48-109 | −34.45 | −18.54 | 48.609 |
| TG-48-111 | −4.66 | 19.2 | 56.251 |
| TG-48-113 | −21.4 | NA | 70.91 |
| TG-48-118 | −7.49 | 7.43 | 2.548 |
| TG-48-119 | 14.72 | −12.09 | 0.742 |
| TG-48-124 | −16.73 | 18.04 | 34.449 |
| TG-48-127 | 0.89 | −3.37 | 0 |
| TG-48-137 | 22.08 | 4.92 | 0.367 |
| TG-48-139 | 3.95 | −13.57 | 41.115 |
| TG-48-141 | −7.48 | −27.86 | 50.719 |
| TG-48-142 | −14.04 | −16.71 | 47.697 |
| TG-48-145 | −9.39 | −8.69 | 22.584 |
| TG-48-151 | 1.29 | −1.81 | 23.147 |
| TG-48-162 | 11.67 | −1.45 | 1.746 |
| TG-48-169 | −27.44 | NA | 35.291 |
| TG-48-171 | −19.71 | −6.65 | 20.113 |
| TG-48-178 | −43.2 | −16.52 | 55.591 |
| TG-48-179 | 4.62 | 8.81 | 32.168 |
| TG-48-193 | −5.54 | 1.18 | 19.604 |
| TG-48-196 | −8.9 | −14.98 | 0.397 |
| TG-48-199 | −12.96 | −36.22 | 43.481 |
| TG-48-222 | −72.66 | −33.87 | 71.82 |
| TG-48-223 | −74.07 | −37.61 | 59.204 |
| TG-48-229 | −11.43 | −9.4 | 29.387 |
| TG-48-235 | −11.05 | −21.96 | 27.207 |
| TG-48-239 | −86.37 | −32.34 | 23.567 |
| TG-48-267 | −5.02 | 14.91 | 0.794 |
| TG-48-280 | −53.24 | −5.95 | 67.553 |
| TG-48-281 | −8.65 | −1.93 | 9.604 |
| TG-48-283 | −36.6 | −11.71 | 27.07 |
| TG-48-284 | −80.34 | −44.9 | 69.564 |
| TG-48-286 | −28.79 | −19.42 | 43.675 |
| TG-48-288 | −35.22 | −14.82 | 23.7 |
| TG-48-299 | −11.38 | −7.09 | 15.948 |
| TG-48-300 | −5.86 | 16.3 | 42.249 |
| TG-48-303 | −66.92 | −10.32 | 66.48 |
| TG-48-305 | −70.13 | −19.84 | 63.031 |
| TG-48-306 | −21.44 | −3.72 | 36.276 |
| TG-48-317 | −78.83 | −19.47 | 76.382 |
| TG-48-324 | −27.78 | −2.5 | 38.185 |
| TG-48-336 | −26.62 | −31.17 | 79.414 |
| TG-48-341 | −20.88 | −16.87 | 80.807 |
| TG-48-342 | −25.89 | −15.4 | 36.205 |
| TG-48-343 | −9.99 | −2.21 | 36.766 |
| TG-48-351 | −79.47 | −11.22 | 77.612 |
| TG-48-358 | −33.46 | −28.15 | 41.522 |
| TG-48-360 | −43.88 | NA | 41.39 |

TABLE 44
LPA-Targeting sequences for further evaluation

| Targeting | | SEQ |
|---|---|---|
| sequence ID | Targeting sequence (RNA) | ID NO: |
| TG-48-107 | UCUGCCUUUCUACUGGAUAC | 776 |
| TG-48-178 | UCAGAAGAAGCCUCUGUGCU | 878 |
| TG-48-222 | UGUGAUAGUGGUGGAGAGUG | 817 |
| TG-48-284 | AGGGACAAAUAAAUGGGCAG | 826 |
| TG-48-303 | UUCUAGGUUUGGAAAGCACU | 896 |
| TG-48-305 | AGCAGUGAGCAGCAGUCAGC | 792 |
| TG-48-317 | UGGAGCCCACACAAGCAGAU | 898 |
| TG-48-351 | CAAUAACAAGGAGCUGGGCU | 901 |

### Example 12: Functional Assessments of CasX: GRNA Systems Targeting the Human LPA Locus

[0466] Experiments were performed to demonstrate that delivery of LNPs encapsulating CasX mRNA and an LPA-targeting gRNA induces editing at the endogenous human LPA locus in primary human hepatocytes (PHH) and thus, induce a reduction of secreted apo (a). CasX 515 (SEQ ID NO: 19755) and guide scaffold 316 (SEQ ID NO: 466) were selected for assessment in this Example.

### Materials and Methods:

[0467] Apo (a) knockdown in primary human hepatocytes, as demonstrated in Example 9, provided an experimental basis for lipofection of eight top editing targeting sequences (Table 48) into PHH cells for assessment of apo (a) secretion reduction. mRNA production:

[0468] Generation of CasX mRNAs encoding CasX 515 was performed by IVT, as disclosed in Example 5. Briefly, constructs encoding a synthetic 5′UTR, a codon-optimized CasX 515 with flanking c-MYC NLSes, and a 3′UTR derived from the mouse hemoglobin alpha (mHBA) were cloned into a plasmid comprising a T7 promoter and 79-nucleotide poly (A) tail. The resulting plasmid was linearized prior to use for IVT reactions, which were carried out with CleanCap® AG and N1-methyl-pseudouridine (as described in Example 5). The DNA sequence encoding the CasX 515 mRNA molecule is provided in Table 45, and the corresponding mRNA sequence showing the chemical modifications is provided in Table 46. The protein sequence for CasX 515 resulting from expression of the IVT mRNA molecule is provided in Table 47.

Synthesis of gRNAs:

[0469] gRNAs targeting the human LPA locus were chemically synthesized by methods known in the art) that, in each case, were converted into the chemically-modified v1 versions (detailed in Example 7) for delivery. The sequences of the 8 LPA-targeting sequences are listed in Table 44 in Example 11.

### Formulation of Lipid Nanoparticles (LNPs):

[0470] CasX 515 mRNA and targeting gRNAs were encapsulated into LNPs made from Ionizable lipid mix containing ALC0315 Ionizable lipid: 18:0 PC (DSPC):Cholesterol:DMG-PEG2000 using an in-house custom-made T-mixer at N/P 6.

Briefly, to formulate LNPs, as a coformulation (containing both mRNA and sgRNA in a single formulation) or split formulations (containing either CasX mRNA or only sgRNA) were diluted at a fixed ratio for coformulation or separately for split formulation in a 25 mM sodium acetate buffer, pH 4.0. ALC315 Ionizable lipid mix at a molar ratio of 50:10:38.5:1.5% of above-mentioned lipids using anhydrous ethanol. The RNA and lipid phases were run through a custom-made T-mixer at a flow rate ratio of 3:1 and a flow rate of 20 mL/min. After formulation, the LNPs were transferred and dialyzed using a 10 KDa membrane dialysis cassette (Thermo Scientific™) and buffer exchanged into 1×PBS to decrease the ethanol concentration and increase the pH to 7.4, leading to formation of a mature and stabilized particles. Following dialysis, the RNA-LNPs were buffer exchanged into 300 mM sucrose in PBS at pH 7.4 storage buffer and concentrated to appropriate concentration using 100 kDa Amicon®-Ultra Centrifugal Filters (Millipore) and sterile-filtered. Formulated LNPs were then subjected to one free-thaw cycle at −80° C. and analyzed on a Stunner (Unchained Labs) to determine their average particle size (d. nm.) and polydispersity index (PDI). Encapsulation efficiency and RNA concentration was determined by RiboGreen™ assay using Invitrogen's Quant-iT™ Ribogreen™ RNA assay kit. LNPs were used in various experiments as described herein to deliver CasX mRNA and gRNA to target cells and tissue by mixing a 1:1 mass ratio of mRNA containing LNP and gRNA containing LNP.
Delivery of LNPs Encapsulating CasX mRNA and Targeting gRNA into Primary Human Hepatocytes:

[0471] A single lot (lot #271) of primary human hepatocytes (Lonza Biologics), was used in these experiments to assess CasX:gRNA-mediated editing at the human LPA locus when delivered by LNPs. Approximately 60,000 cells/well in a collagen coated 96-well plate, cultured in Williams' E media supplemented with FBS, PenStrep, L-glutamine, ITS (insulin, transferrin, sodium selenite), dexamethasone, and Z-VAD-FMK. The next day seeded cells were treated with LNPs, pre-incubated with 10% Human Serum overnight. These LNPs were formulated using a split formulation to encapsulate CasX 515 mRNA and an LPA-targeting gRNA at various doses (7.33e-004 to 19.5 pmol mRNA+gRNA). Media was changed 24 h after LNP treatment, and cells were cultured in a Geltrex-sandwich for five additional days prior to harvesting 1) the media supernatant to measure LPA secretion levels and 2) treated cells for gDNA extraction for editing assessment at the LPA locus by NGS. Briefly, for editing assessment, amplicons were amplified from 200 ng of extracted gDNA with primers targeting the human LPA locus and processed as described in Example 5. Treatment with LNPs encapsulating a non-targeting gRNA and CasX 515 mRNA served as an experimental control.

[0472] Primary human hepatocytes were treated with CasX 515 and an LPA-targeting gRNA comprising a targeting sequence selected from those listed in Table 44 that, in each case, were converted into the chemically-modified v1 versions (detailed in Example 7) for delivery. A non-targeting gRNA was used as a control for these experiments. Apo (a) secretion levels were measured by Western Blot using an automated capillary separation and detection system, Jess (Bio-Techne, “Jess run”).

### Western Blot by Automated Capillary Separation and Detection System, Jess (Bio-Techne):

[0473] Briefly, apo (a) secreted into conditioned media was collected 6 days after treatment, and 72 hours following a media change for a given cell line/sample. Total protein was quantified and diluted to 2 μg/uL prior to Western blotting. Apo (a) was detected using a monoclonal apo (a) antibody (Abcam: Ab208184). Compass software was used to calculate the amount of protein detected, by measuring the area under the curve (AUC) for the apo (a) peak detected at ˜450 kDa. AUC values were compared to a standard curve of fixed apo (a) concentrations to quantify final protein concentrations. While a standard curve was not included for every Jess run, 2 or more calibrator samples were included across multiple Jess runs to 1) calculate protein concentrations based on a previous standard curve and 2) evaluate protein concentrations from multiple Jess runs.

### Assessment of Editing of LPA Gene by Next-Generation Sequencing (NGS):

[0474] Genomic DNA was amplified via PCR with primers specific to the target genomic location of interest to form a target amplicon. These primers contained additional sequence at the 5′ ends to introduce Illumina reads 1 and 2 sequences. Further, they contained a 16-nucleotide random sequence that functioned as a unique molecular identifier (UMI). The quality and quantification of the amplicon was assessed using a Fragment Analyzer DNA analyzer kit (Agilent, dsDNA 35-1500 bp). Amplicons were sequenced on the Illumina MiSeq™ according to the manufacturer's instructions. Raw fastq sequencing files were processed by trimming for quality and adapter sequences and merging read 1 and read 2 into a single insert sequence; insert sequences were then analyzed by the CRISPResso2 program. The percentage of reads modified in a window around the 3′ end of the targeting sequence was determined. The editing activity of the CasX molecule was quantified as the total percent of reads that contained deletions anywhere within this window. Maximum response (Emax) and the concentration producing 50% of Emax (EC₅₀) are reported in Table 49. Each LPA-targeting sequence was assessed in 2-5 independent replicates.

### Results

[0475] The ability of CasX 515 and gRNA comprising scaffold 316 and an LPA-targeting sequence to reduce secretion of apo (a) was assessed. Table 49, below, provides the Maximum response (Emax) and the concentration producing 50% of Emax (EC₅₀) in primary human hepatocytes with each individual LPA-targeting sequence, rounded to the nearest hundredth, for protein reduction by Jess, and editing rate measured by NGS. These results were used to select the top four LPA-targeting sequences (Table 50).

[0476] The results from these experiments demonstrate that delivery of LNPs encapsulating a CasX mRNA and LPA-targeting gRNA induced editing at the endogenous human LPA locus in primary human hepatocytes that resulted in substantial reduction in secreted apo (a) levels.

TABLE 45
DNA sequence encoding the CasX 515 mRNA molecule assessed in this
example*.

| Component | | | SEQ ID |
|---|---|---|---|
| (ID) | Description | DNA sequence | NO |
| 5′UTR + | Synthetic | AAATAAGAGAGAAAAGAAGAGTAAGAAGAAATATA | 19739 |
| Kozak | | AGAGCCACC | |
| sequence | | | |
| (underlined) | | | |
| START | | ATGGCCCCTGCTGCCAAGAGAGTGAAGCTGGATAGC | 19734 |
| codon + c- | | AGA | |
| MYC NLS | | | |
| CasX 515 | | CAGGAGATCAAGCGGATTAATAAAATTCGGAGAAGA | 19751 |
| | | CTGGTGAAGGATTCTAACACAAAGAAGGCTGGCAAG | |
| | | ACAGGCCCTATGAAGACACTGCTGGTGAGAGTGATG | |
| | | ACACCCGACCTGAGAGAAAGACTGGAAAACCTGAGA | |
| | | AAGAAGCCTGAGAATATCCCCCAGCCCATCAGCAAC | |
| | | ACAAGCCGGGCCAACCTGAATAAGCTGCTGACCGAC | |
| | | TACACCGAAATGAAGAAGGCCATCCTGCACGTGTATT | |
| | | GGGAAGAGTTCCAGAAAGACCCAGTCGGCCTGATGA | |
| | | GCAGAGTGGCTCAGCCTGCCAGCAAGAAGATCGATC | |
| | | AGAACAAGCTGAAGCCCGAAATGGACGAGAAGGGGA | |
| | | ACCTGACAACCGCCGGCTTTGCCTGTAGCCAGTGCGG | |
| | | CCAGCCCCTGTTTGTGTACAAACTGGAACAGGTGAGC | |
| | | GAAAAGGGCAAGGCTTACACGAATTACTTCGGCAGA | |
| | | TGCAACGTGGCCGAGCACGAGAAGCTGATCCTGCTG | |
| | | GCCCAGCTGAAGCCTGAGAAGGATAGCGATGAGGCA | |
| | | GTGACATATTCCCTGGGCAAGTTCGGACAGCGGGCCC | |
| | | TGGATTTTTATTCCATTCATGTGACCAAGGAATCCAC | |
| | | CCACCCCGTCAAGCCTCTTGCCCAAATTGCCGGCAAC | |
| | | AGATACGCCAGCGGCCCCGTGGGCAAGGCCCTGAGC | |
| | | GACGCCTGTATGGGCACCATCGCCAGCTTCCTGTCTA | |
| | | AGTACCAGGACATTATCATCGAGCACCAGAAGGTGG | |
| | | TGAAGGGCAACCAGAAGAGACTGGAGAGCCTGCGCG | |
| | | AGCTGGCCGGCAAGGAAAACCTGGAGTATCCTAGCG | |
| | | TGACCCTGCCTCCTCAGCCTCATACAAAGGAGGGCGT | |
| | | GGATGCCTACAACGAAGTGATCGCCCGGGTGCGGAT | |
| | | GTGGGTGAACCTGAATCTGTGGCAGAAGCTGAAGCT | |
| | | GTCTAGAGACGACGCCAAGCCCCTGCTGAGACTGAA | |
| | | GGGCTTCCCCAGCTTCCCTCTGGTGGAGAGACAGGCA | |
| | | AATGAAGTGGACTGGTGGGACATGGTGTGTAACGTG | |
| | | AAGAAGCTGATCAATGAGAAGAAGGAGGACGGCAAA | |
| | | GTGTTCTGGCAGAATCTGGCCGGCTACAAGCGTCAGG | |
| | | AGGCCCTGCGGCCCTACCTGAGCAGCGAGGAAGACA | |
| | | GAAAGAAGGGCAAGAAGTTCGCCCGGTATCAGCTGG | |
| | | GGGACCTGCTGCTGCACCTCGAGAAGAAGCACGGCG | |
| | | AAGACTGGGGGAAGGTGTACGATGAGGCCTGGGAGC | |
| | | GGATCGATAAGAAGGTGGAGGGCCTGAGCAAGCACA | |
| | | TCAAGCTGGAGGAGGAACGGAGATCTGAGGACGCCC | |
| | | AGAGCAAGGCCGCCCTGACCGACTGGCTGAGAGCCA | |
| | | AGGCCAGCTTCGTCATCGAGGGGCTGAAGGAGGCCG | |
| | | ACAAGGACGAGTTCTGCCGGTGCGAACTGAAGCTGC | |
| | | AGAAGTGGTACGGAGATCTGAGAGGCAAACCTTTCG | |
| | | CCATCGAGGCCGAGAACAGCATCCTGGACATCAGCG | |
| | | GCTTCAGCAAGCAGTACAACTGCGCCTTTATTTGGCA | |
| | | GAAGGACGGAGTGAAGAAGCTGAACCTGTACCTGAT | |
| | | CATCAACTATTTCAAGGGCGGCAAGCTGAGATTCAAG | |
| | | AAGATCAAGCCTGAAGCCTTCGAGGCCAACAGATTCT | |
| | | ACACCGTGATTAACAAGAAAAGCGGAGAGATCGTGC | |
| | | CAATGGAAGTGAACTTCAACTTCGACGACCCTAACCT | |
| | | GATCATCCTGCCCCTGGCATTTGGCAAGCGGCAGGGC | |
| | | AGAGAGTTCATCTGGAACGACCTGCTGTCTCTGGAGA | |
| | | CCGGCAGCCTGAAGCTGGCCAACGGCAGAGTGATCG | |
| | | AGAAGACACTGTACAACAGACGAACCAGACAAGACG | |
| | | AGCCCGCCCTGTTTGTGGCCCTGACCTTCGAGAGAAG | |
| | | AGAGGTGCTGGACAGCAGCAATATCAAGCCTATGAA | |
| | | CCTGATCGGCGTGGACCGGGGCGAGAACATCCCTGC | |
| | | CGTGATCGCCCTTACCGACCCCGAGGGATGCCCTCTG | |
| | | AGCCGGTTTAAAGACAGCCTGGGCAACCCTACCCAC | |
| | | ATCCTGAGAATTGGCGAGTCCTACAAGGAGAAGCAG | |
| | | AGAACCATCCAGGCCAAGAAGGAGGTGGAGCAGCGG | |
| | | CGGGCTGGCGGCTACTCCCGGAAGTACGCCAGCAAG | |
| | | GCCAAGAACCTGGCCGACGACATGGTTAGAAATACC | |
| | | GCCAGAGACCTCCTGTACTACGCTGTGACCCAGGACG | |
| | | CCATGCTGATCTTCGAGAACCTGAGCAGAGGCTTCGG | |
| | | CAGACAGGGCAAGAGAACCTTCATGGCCGAGAGACA | |
| | | GTACACCCGGATGGAGGACTGGCTGACCGCCAAGCT | |
| | | GGCCTACGAGGGCCTGCCCTCTAAGACCTACCTGTCC | |
| | | AAGACCTTGGCACAGTACACCAGCAAGACATGCTCT | |
| | | AACTGCGGCTTCACAATCACGAGCGCCGACTACGACC | |
| | | GGGTGCTGGAGAAACTGAAGAAGACCGCCACAGGCT | |
| | | GGATGACCACCATTAACGGCAAGGAGCTGAAGGTGG | |
| | | AGGGCCAGATCACCTACTACAACAGGTACAAACGGC | |
| | | AGAACGTGGTGAAGGACCTGAGCGTGGAACTGGATA | |
| | | GACTGAGCGAGGAAAGCGTAAACAATGACATCAGCA | |
| | | GCTGGACCAAGGGCCGGAGCGGCGAGGCCCTGAGCC | |
| | | TGCTGAAGAAGAGATTCTCCCACAGACCAGTGCAGG | |
| | | AGAAGTTCGTGTGTCTGAACTGCGGCTTCGAGACCCA | |
| | | CGCCGACGAGCAAGCCGCCCTGAACATCGCCCGGTCT | |
| | | TGGCTTTTCCTGCGGAGCCAGGAGTACAAGAAGTACC | |
| | | AGACAAACAAGACCACAGGCAACACAGACAAGAGA | |
| | | GCCTTCGTCGAGACCTGGCAGAGCTTCTACAGAAAGA | |
| | | AGCTGAAGGAGGTGTGGAAGCCTGCCGTG | |
| c-MYC | | GGAAGCCCCGCTGCCAAGAGAGTGAAGCTGGACTAA | 19753 |
| NLS + | | | |
| STOP codon | | | |
| 3′UTR | Mouse HBA | GCTGCCTTCTGCGGGGCTTGCCTTCTGGCCATGCCCTT | 19740 |
| | | CTTCTCTCCCTTGCACCTGTACCTCTTGGTCTTTGAAT | |
| | | AAAGCCTGAGTAGGAAG | |
| XbaI | | TCTAG | 19741 |
| restriction | | | |
| site (partial) | | | |
| Poly(A) tail | | AAAAAAAAAAAAAAAAAAAAAAAAAAAAAAAAAAA | 19826 |
| (79) | | AAAAAAAAAAAAAAAAAAAAAAAAAAAAAAAAAAA | |
| | | AAAAAAAAA | |

*Components are listed in a 5′ to 3′ order within the constructs

TABLE 46
Full-length RNA sequence of chemically modified CasX 515 mRNA molecule
assessed in this example.*

| CasX | | SEQ ID |
|---|---|---|
| mRNA | RNA sequence | NO |
| CasX 515 | AAAmψAAGAGAGAAAAGAAGAGmψAAGAAGAAAmψAmψAAGAGCCACC | 19755 |
| mRNA | AmψGGCCCCmψGCmψGCCAAGAGAGmψGAAGCmψGGAmψAGCAGACAG | |
| | GAGAmψCAAGCGGAmψmψAAmψAAAAmψmψCGGAGAAGACmψGGmψGA | |
| | AGGAmψmψCmψAACACAAAGAAGGCmψGGCAAGACAGGCCCmψAmψGA | |
| | AGACACmψGCmψGGmψGAGAGmψGAmψGACACCCGACCmψGAGAGAAA | |
| | GACmψGGAAAACCmψGAGAAAGAAGCCmψGAGAAmψAmψCCCCCAGCCC | |
| | AmψCAGCAACACAAGCCGGGCCAACCmψGAAmψAAGCmψGCmψGACCGA | |
| | CmψACACCGAAAmψGAAGAAGGCCAmψCCmψGCACGmψGmψAmψmψGG | |
| | GAAGAGmψmψCCAGAAAGACCCAGmψCGGCCmψGAmψGAGCAGAGmψG | |
| | GCmψCAGCCmψGCCAGCAAGAAGAmψCGAmψCAGAACAAGCmψGAAGCC | |
| | CGAAAmψGGACGAGAAGGGGAACCmψGACAACCGCCGGCmψmψmψGCC | |
| | mψGmψAGCCAGmψGCGGCCAGCCCCmψGmψmψmψGmψGmψACAAACmψG | |
| | GAACAGGmψGAGCGAAAAGGGCAAGGCmψmψACACGAAmψmψACmψmψ | |
| | CGGCAGAmψGCAACGmψGGCCGAGCACGAGAAGCmψGAmψCCmψGCmψ | |
| | GGCCCAGCmψGAAGCCmψGAGAAGGAmψAGCGAmψGAGGCAGmψGACA | |
| | mψAmψmψCCCmψGGGCAAGmψmψCGGACAGCGGGCCCmψGGAmψmψmψ | |
| | mψmψAmψmψCCAmψmψCAmψGmψGACCAAGGAAmψCCACCCACCCCGmψ | |
| | CAAGCCmψCmψmψGCCCAAAmψmψGCCGGCAACAGAmψACGCCAGCGGC | |
| | CCCGmψGGGCAAGGCCCmψGAGCGACGCCmψGmψAmψGGGCACCAmψCG | |
| | CCAGCmψmψCCmψGmψCmAAGmψACCAGGACAmψmψAmψCAmψCGAGC | |
| | ACCAGAAGGmψGGmψGAAGGGCAACCAGAAGAGACmψGGAGAGCCmψG | |
| | CGCGAGCmψGGCCGGCAAGGAAAACCmψGGAGmψAmψCCmψAGCGmψG | |
| | ACCCmψGCCmψCCmψCAGCCmψCAmψACAAAGGAGGGCGmψGGAmψGCC | |
| | mψACAACGAAGmψGAmψCGCCCGGGmψGCGGAmψGmψGGGmψGAACCm | |
| | ψGAAmψCmψGmψGGCAGAAGCmψGAAGCmψGmψCmψAGAGACGACGCC | |
| | AAGCCCCmψGCmψGAGACmψGAAGGGCmψmψCCCCAGCmψmψCCCmψCm | |
| | ψGGmψGGAGAGACAGGCAAAmGAAGmψGGACmψGGmψGGGACAmψGG | |
| | mψGmψGmψAACGmψGAAGAAGCmψGAmψCAAmψGAGAAGAAGGAGGAC | |
| | GGCAAAGmψGmψmψCmψGGCAGAAmψCmψGGCCGGCmψACAAGCGmψC | |
| | AGGAGGCCCmψGCGGCCCmψACCmψGAGCAGCGAGGAAGACAGAAAGA | |
| | AGGGCAAGAAGmψmψCGCCCGGmψAmψCAGCmψGGGGGACCmψGCmG | |
| | CmψGCACCmψCGAGAAGAAGCACGGCGAAGACmψGGGGGAAGGmψGmψ | |
| | ACGAmψGAGGCCmψGGGAGCGGAmψCGAmψAAGAAGGmψGGAGGGCCm | |
| | ψGAGCAAGCACAmψCAAGCmψGGAGGAGGAACGGAGAmψCmψGAGGAC | |
| | GCCCAGAGCAAGGCCGCCCmψGACCGACmψGGCmψGAGAGCCAAGGCCA | |
| | GCmψmψCGmψCAmψCGAGGGGCmψGAAGGAGGCCGACAAGGACGAGmψ | |
| | mψCmψGCCGGmψGCGAACmψGAAGCmψGCAGAAGmψGGmψACGGAGAm | |
| | ψCmψGAGAGGCAAACCmψmψmψCGCCAmψCGAGGCCGAGAACAGCAmψC | |
| | CmψGGACAmψCAGCGGCmψmψCAGCAAGCAGmψACAACmψGCGCCmψmψ | |
| | mψAmψmψmψGGCAGAAGGACGGAGmψGAAGAAGCmψGAACCmψGmψAC | |
| | CmψGAmψCAmψCAACmψAmψmψmψCAAGGGCGGCAAGCmψGAGAmψmψ | |
| | CAAGAAGAmψCAAGCCmψGAAGCCmψmψCGAGGCCAACAGAmψmψCmψ | |
| | ACACCGmψGAmψmψAACAAGAAAAGCGGAGAGAmψCGmψGCCAAmψGG | |
| | AAGmψGAACmψmψCAACmψmψCGACGACCCmψAACCmψGAmψCAmψCCm | |
| | ψGCCCCmψGGCAmψmψmψGGCAAGCGGCAGGGCAGAGAGmψmψCAmψCm | |
| | ψGGAACGACCmψGCmψGmψCmψCmψGGAGACCGGCAGCCmψGAAGCmψG | |
| | GCCAACGGCAGAGmψGAmψCGAGAAGACACmψGmψACAACAGACGAAC | |
| | CAGACAAGACGAGCCCGCCCmGmψmψmψGmψGGCCCmψGACCmψmψCG | |
| | AGAGAAGAGAGGmψGCmψGGACAGCAGCAAmψAmψCAAGCCmψAmψGA | |
| | ACCmψGAmψCGGCGmψGGACCGGGGCGAGAACAmψCCCmψGCCGmψGA | |
| | mψCGCCCmψmψACCGACCCCGAGGGAmψGCCCmψCmψGAGCCGGmψmψm | |
| | ψAAAGACAGCCmψGGGCAACCCmψACCCACAmψCCmψGAGAAmψmψGGC | |
| | GAGmψCCmψACAAGGAGAAGCAGAGAACCAmψCCAGGCCAAGAAGGAG | |
| | GmψGGAGCAGCGGCGGGCmψGGCGGCmψACmψCCCGGAAGmψACGCCAG | |
| | CAAGGCCAAGAACCmGGCCGACGACAmGGmψmψAGAAAmψACCGCCA | |
| | GAGACCmψCCmψGmψACmψACGCmψGmψGACCCAGGACGCCAmψGCmψG | |
| | AmψCmψmψCGAGAACCmψGAGCAGAGGCmψmψCGGCAGACAGGGCAAG | |
| | AGAACCmψmψCAmψGGCCGAGAGACAGmψACACCCGGAmψGGAGGACm | |
| | ψmψGGCmψGACCGCCAAGCmψGGCCmψACGAGGGCCmψGCCCmψCmψAAGA | |
| | CCmψACCmψGmψCCAAGACCmψmψGGCACAGmψACACCAGCAAGACAmψ | |
| | GCmψCmAACmψGCGGCmψmψCACAAmψCACGAGCGCCGACmψACGACC | |
| | GGGmψGCmψGGAGAAACmψGAAGAAGACCGCCACAGGCmψGGAmψGAC | |
| | CACCAmψmψAACGGCAAGGAGCmψGAAGGmψGGAGGGCCAGAmψCACC | |
| | mψACmψACAACAGGmψACAAACGGCAGAACGmψGGmψGAAGGACCmψG | |
| | AGCGmψGGAACmψGGAmψAGACmψGAGCGAGGAAAGCGmψAAACAAmψ | |
| | GACAmψCAGCAGCmψGGACCAAGGGCCGGAGCGGCGAGGCCCmψGAGCC | |
| | mψGCmψGAAGAAGAGAmψmψCmmψCCCACAGACCAGmψGCAGGAGAAGm | |
| | ψmψCGmψGmψGmψCmψGAACmψGCGGCmψmψCGAGACCCACGCCGACGA | |
| | GCAAGCCGCCCmψGAACAmψCGCCCGGmψCmψmψGGCmψmψmψmψCCmψ | |
| | GCGGAGCCAGGAGmψACAAGAAGmψACCAGACAAACAAGACCACAGGC | |
| | AACACAGACAAGAGAGCCmψmψCGmψCGAGACCmψGGCAGAGCmψmψC | |
| | mψACAGAAAGAAGCmψGAAGGAGGmψGmψGGAAGCCmψGCCGmψGGGA | |
| | AGCCCCGCmψGCCAAGAGAGmψGAAGCmψGGACmψAAGCmψGCCmψmψC | |
| | mψGCGGGGCmψmGCCmψmψCmψGGCCAmψGCCCmψmψCmψmψCmψCmψ | |
| | CCCmψmψGCACCmψGmψACCmψCmψmψGGmψCmψmψmψGAAmψAAAGCC | |
| | mψGAGmψAGGAAGmψCmψAGAAAAAAAAAAAAAAAAAAAAAAAAAAAA | |
| | AAAAAAAAAAAAAAAAAAAAAAAAAAAAAAAAAAAAAAAAAAAAAAA | |
| | AAAAA | |

The CleanCap ® AG 5′ cap is not shown in the table. Modification ‘mψ’ = N1-methyl-pseudouridine

TABLE 47
Full-length protein sequence of CasX 515 + NLS molecule.

| | | SEQ ID |
|---|---|---|
| CasX | AA sequence | NO |
| CasX 515 | MAPAAKRVKLDSRQEIKRINKIRRRLVKDSNTKKAGKTGPMKTLLVRVMTP | 19757 |
| with | DLRERLENLRKKPENIPQPISNTSRANLNKLLTDYTEMKKAILHVYWEEFQK | |
| flanking | DPVGLMSRVAQPASKKIDQNKLKPEMDEKGNLTTAGFACSQCGQPLFVYK | |
| c-MYC | LEQVSEKGKAYTNYFGRCNVAEHEKLILLAQLKPEKDSDEAVTYSLGKFGQ | |
| NLSes | RALDFYSIHVTKESTHPVKPLAQIAGNRYASGPVGKALSDACMGTIASFLSK | |
| | YQDIIIEHQKVVKGNQKRLESLRELAGKENLEYPSVTLPPQPHTKEGVDAYN | |
| | EVIARVRMWVNLNLWQKLKLSRDDAKPLLRLKGFPSFPLVERQANEVDW | |
| | WDMVCNVKKLINEKKEDGKVFWQNLAGYKRQEALRPYLSSEEDRKKGKK | |
| | FARYQLGDLLLHLEKKHGEDWGKVYDEAWERIDKKVEGLSKHIKLEEERR | |
| | SEDAQSKAALTDWLRAKASFVIEGLKEADKDEFCRCELKLQKWYGDLRGK | |
| | PFAIEAENSILDISGFSKQYNCAFIWQKDGVKKLNLYLIINYFKGGKLRFKKI | |
| | KPEAFEANRFYTVINKKSGEIVPMEVNFNFDDPNLIILPLAFGKRQGREFIWN | |
| | DLLSLETGSLKLANGRVIEKTLYNRRTRQDEPALFVALTFERREVLDSSNIKP | |
| | MNLIGVDRGENIPAVIALTDPEGCPLSRFKDSLGNPTHILRIGESYKEKQRTIQ | |
| | AKKEVEQRRAGGYSRKYASKAKNLADDMVRNTARDLLYYAVTQDAMLIF | |
| | ENLSRGFGRQGKRTFMAERQYTRMEDWLTAKLAYEGLPSKTYLSKTLAQY | |
| | TSKTCSNCGFTITSADYDRVLEKLKKTATGWMTTINGKELKVEGQITYYNR | |
| | YKRQNVVKDLSVELDRLSEESVNNDISSWTKGRSGEALSLLKKRFSHRPVQ | |
| | EKFVCLNCGFETHADEQAALNIARSWLFLRSQEYKKYQTNKTTGNTDKRAF | |
| | VETWQSFYRKKLKEVWKPAVGSPAAKRVKLD | |

TABLE 48
gRNAs with LPA-targeting targeting sequences used in this example*

| | | SEQ ID |
|---|---|---|
| gRNA ID | RNA Sequence | NO. |
| 316-TG-48- | mA*mC*mU*GGCGCUUCUAUCUGAUUACUCUGAGCGCCAUCACCAGCG | 19855 |
| 351 (v1) | ACUAUGUCGUAGUGGGUAAAGCUCCCUCUUCGGAGGGAGCAUCAGAGC | |
| | AAUAACAAGGAGCUGG*mG*mC*mU | |
| 316-TG-48- | mA*mC*mU*GGCGCUUCUAUCUGAUUACUCUGAGCGCCAUCACCAGCG | 19856 |
| 222 (v1) | ACUAUGUCGUAGUGGGUAAAGCUCCCUCUUCGGAGGGAGCAUCAGAGU | |
| | GUGAUAGUGGUGGAGA*mG*mU*mG | |
| 316-TG-48- | mA*mC*mU*GGCGCUUCUAUCUGAUUACUCUGAGCGCCAUCACCAGCG | 19857 |
| 317 (v1) | ACUAUGUCGUAGUGGGUAAAGCUCCCUCUUCGGAGGGAGCAUCAGAGU | |
| | GGAGCCCACACAAGCA*mG*mA*mU | |
| 316-TG-48- | mA*mC*mU*GGCGCUUCUAUCUGAUUACUCUGAGCGCCAUCACCAGCG | 19858 |
| 284 (v1) | ACUAUGUCGUAGUGGGUAAAGCUCCCUCUUCGGAGGGAGCAUCAGAGA | |
| | GGGACAAAUAAAUGGG*mC*mA*mG | |
| 316-TG-48- | mA*mC*mU*GGCGCUUCUAUCUGAUUACUCUGAGCGCCAUCACCAGCG | 19859 |
| 107 (v1) | ACUAUGUCGUAGUGGGUAAAGCUCCCUCUUCGGAGGGAGCAUCAGAGU | |
| | CUGCCUUUCUACUGGA*mU*mA*mC | |
| 316-TG-48- | mA*mC*mU*GGCGCUUCUAUCUGAUUACUCUGAGCGCCAUCACCAGCG | 19860 |
| 178 (v1) | ACUAUGUCGUAGUGGGUAAAGCUCCCUCUUCGGAGGGAGCAUCAGAGU | |
| | CAGAAGAAGCCUCUGU*mG*mC*mU | |
| 316-TG-48- | mA*mC*mU*GGCGCUUCUAUCUGAUUACUCUGAGCGCCAUCACCAGCG | 19861 |
| 303 (v1) | ACUAUGUCGUAGUGGGUAAAGCUCCCUCUUCGGAGGGAGCAUCAGAGU | |
| | UCUAGGUUUGGAAAGC*mA*mC*mU | |
| 316-TG-48- | mA*mC*mU*GGCGCUUCUAUCUGAUUACUCUGAGCGCCAUCACCAGCG | 19862 |
| 305 (v1) | ACUAUGUCGUAGUGGGUAAAGCUCCCUCUUCGGAGGGAGCAUCAGAGA | |
| | GCAGUGAGCAGCAGUC*mA*mG*mC | |

*each targeting sequence was modified at the 3′ terminal end with phosphorothioate bonds and 2′OMe modification of the 3 terminal nucleotides

TABLE 49
Apo(a) levels relative to non-targeting
gRNA in primary human hepatocytes

| Targeting | Emax | Emax Protein | EC₅₀ Protein | EC₅₀ |
|---|---|---|---|---|
| sequence ID | Editing | (Jess) | (Jess) | Editing |
| TG-48-351 | 90.96 | 87.75 | 0.072 | 0.053 |
| TG-48-317 | 80.86 | 73.36 | 0.065 | 0.062 |
| TG-48-284 | 80.54 | 82.38 | 0.106 | 0.109 |
| TG-48-222 | 79.29 | 81.31 | 0.143 | 0.122 |
| TG-48-239 | 67.21 | 95.4 | 0.045 | 0.117 |
| TG-48-303 | 77.82 | 82.34 | 3.510 | 1.976 |
| TG-48-178 | 55.98 | 43.66 | 0.081 | 0.161 |
| TG-48-107 | 89.51 | 55.76 | 0.062 | 0.024 |

TABLE 50
Top 4 LPA-targeting sequences

| Targeting | | SEQ |
|---|---|---|
| sequence ID | Targeting sequence (RNA) | ID NO: |
| TG-48-351 | CAAUAACAAGGAGCUGGGCU | 901 |
| TG-48-222 | UGUGAUAGUGGUGGAGAGUG | 817 |
| TG-48-317 | UGGAGCCCACACAAGCAGAU | 898 |
| TG-48-284 | AGGGACAAAUAAAUGGGCAG | 826 |

### Example 13: Evaluation of LPA Targeting in a Mouse Model

[0477] Experiments are performed to assess editing rates and protein production upon treatment with a CasX:gRNA system when delivered in vivo in a mouse model. Four LPA-targeting spacers are evaluated for editing rate at the LPA locus, LPA transcript knockdown, and apo (a) protein production using the CasX 515 protein.

### Materials and Methods

### Lnp Preparation:

[0478] CasX 515 mRNA and gRNA is encapsulated into LNPs using ALC-0315 based lipid mix. After formulation, the LNPs are dialyzed into PBS, pH 7.4, to decrease the ethanol concentration and increase the pH, which increases the stability of the particles. Buffer exchange of the mRNA/gRNA-LNPs is achieved by overnight dialysis into PBS, pH 7.4, at 4° C. using 10k Slide-A-Lyzer™ Dialysis or Cassettes (Thermo Scientific™) or 12-14 kDa dialysis tubing (Repligen). Formulated LNPs are analyzed on a Malvern Zetasizer to determine their diameter and polydispersity index (PDI). Encapsulation efficiency and RNA concentration is determined by RiboGreen™ assay using Invitrogen's Quant-iT™ RiboGreen™ RNA assay kit. The LNPs described above are used to deliver CasX 515 mRNA and gRNA for delivery to target tissues in vivo.

Delivery of LNPs Encapsulating CasX mRNA and Targeting gRNA In Vivo:

[0479] To assess the effects of LPA targeting in vivo, LPA-targeting gRNA using scaffold 316 with spacers from Table 50 are encapsulated within the same LNP using a 1:1 mass ratio for mRNA:gRNA. Formulated LNPs are buffer-exchanged to PBS for in vivo injection. Briefly, LNPs are administered intravenously through the tail-vein into 20-week-old Pxb mice at 3 mg/Kg. Naïve, uninjected animals serve as negative experimental controls. Fourteen days post-administration, mice are euthanized, and the blood and liver tissue are harvested. Blood serum is collected for apo (a) Western blot via Jess, liver tissue is homogenized for apo (a) protein Western blot, mRNA extraction and for gDNA extraction using the Zymo Research Quick DNA/RNA Miniprep kit following the manufacturer's instructions.

### NGS Processing and Analysis:

[0480] Extracted gDNA is processed and analyzed as described in Example 12. qPCR assay for LPA mRNA knockdown:

[0481] Extracted mRNA is processed and analyzed RT-qPCR. Measurement of LPA mRNA expression is performed using a single-step RT-qPCR approach. 25-50 uL of sample lysate is used for RNA extraction. GAPDH primers/probe are used for normalizing transcript levels (IDT; Hs.PT.39a.22214836). Percent change in mRNA is calculated by comparing to samples treated with a non-targeting sequence.

### Western Blot by Automated Capillary Separation and Detection System, Jess (Bio-Techne):

[0482] Serum and liver tissue from animal samples is assayed as described in Example 12.

[0483] The experiments are expected to provide results quantifying editing, mRNA knockdown, and therapeutic levels of apo (a) reduction in a mouse model.

The application's sequence listing, which the Patent Office published only in electronic form, follows.

SEQUENCE LISTING (20040 sequences)

SEQ ID NO: 1 - protein, 986 aa, unidentified
  source 1..986: note = Deltaproteobacteria sp.
MEKRINKIRKKLSADNATKPVSRSGPMKTLLVRVMTDDLKKRLEKRRKKPEVMPQVISNNAANNLRMLLDDYTKMKEAILQVYWQEFKDDHVGLMCKFAQPASKKIDQNKLKPEMDEKGNLTTAGFACSQCGQPLFVYKLEQVSEKGKAYTNYFGRCNVAEHEKLILLAQLKPEKDSDEAVTYSLGKFGQRALDFYSIHVTKESTHPVKPLAQIAGNRYASGPVGKALSDACMGTIASFLSKYQDIIIEHQKVVKGNQKRLESLRELAGKENLEYPSVTLPPQPHTKEGVDAYNEVIARVRMWVNLNLWQKLKLSRDDAKPLLRLKGFPSFPVVERRENEVDWWNTINEVKKLIDAKRDMGRVFWSGVTAEKRNTILEGYNYLPNENDHKKREGSLENPKKPAKRQFGDLLLYLEKKYAGDWGKVFDEAWERIDKKIAGLTSHIEREEARNAEDAQSKAVLTDWLRAKASFVLERLKEMDEKEFYACEIQLQKWYGDLRGNPFAVEAENRVVDISGFSIGSDGHSIQYRNLLAWKYLENGKREFYLLMNYGKKGRIRFTDGTDIKKSGKWQGLLYGGGKAKVIDLTFDPDDEQLIILPLAFGTRQGREFIWNDLLSLETGLIKLANGRVIEKTIYNKKIGRDEPALFVALTFERREVVDPSNIKPVNLIGVDRGENIPAVIALTDPEGCPLPEFKDSSGGPTDILRIGEGYKEKQRAIQAAKEVEQRRAGGYSRKFASKSRNLADDMVRNSARDLFYHAVTHDAVLVFENLSRGFGRQGKRTFMTERQYTKMEDWLTAKLAYEGLTSKTYLSKTLAQYTSKTCSNCGFTITTADYDGMLVRLKKTSDGWATTLNNKELKAEGQITYYNRYKRQTVEKELSAELDRLSEESGNNDISKWTKGRRDEALFLLKKRFSHRPVQEQFVCLDCGHEVHADEQAALNIARSWLFLNSNSTEFKSYKSGKQPFVGAWQAFYKRRLKEVWKPNA

SEQ ID NO: 2 - protein, 978 aa, unidentified
  source 1..978: note = Planctomycetes sp.
MQEIKRINKIRRRLVKDSNTKKAGKTGPMKTLLVRVMTPDLRERLENLRKKPENIPQPISNTSRANLNKLLTDYTEMKKAILHVYWEEFQKDPVGLMSRVAQPAPKNIDQRKLIPVKDGNERLTSSGFACSQCCQPLYVYKLEQVNDKGKPHTNYFGRCNVSEHERLILLSPHKPEANDELVTYSLGKFGQRALDFYSIHVTRESNHPVKPLEQIGGNSCASGPVGKALSDACMGAVASFLTKYQDIILEHQKVIKKNEKRLANLKDIASANGLAFPKITLPPQPHTKEGIEAYNNVVAQIVIWVNLNLWQKLKIGRDEAKPLQRLKGFPSFPLVERQANEVDWWDMVCNVKKLINEKKEDGKVFWQNLAGYKRQEALLPYLSSEEDRKKGKKFARYQFGDLLLHLEKKHGEDWGKVYDEAWERIDKKVEGLSKHIKLEEERRSEDAQSKAALTDWLRAKASFVIEGLKEADKDEFCRCELKLQKWYGDLRGKPFAIEAENSILDISGFSKQYNCAFIWQKDGVKKLNLYLIINYFKGGKLRFKKIKPEAFEANRFYTVINKKSGEIVPMEVNFNFDDPNLIILPLAFGKRQGREFIWNDLLSLETGSLKLANGRVIEKTLYNRRTRQDEPALFVALTFERREVLDSSNIKPMNLIGIDRGENIPAVIALTDPEGCPLSRFKDSLGNPTHILRIGESYKEKQRTIQAAKEVEQRRAGGYSRKYASKAKNLADDMVRNTARDLLYYAVTQDAMLIFENLSRGFGRQGKRTFMAERQYTRMEDWLTAKLAYEGLPSKTYLSKTLAQYTSKTCSNCGFTITSADYDRVLEKLKKTATGWMTTINGKELKVEGQITYYNRYKRQNVVKDLSVELDRLSEESVNNDISSWTKGRSGEALSLLKKRFSHRPVQEKFVCLNCGFETHADEQAALNIARSWLFLRSQEYKKYQTNKTTGNTDKRAFVETWQSFYRKKLKEVWKPAV

SEQ ID NO: 3 - protein, 855 aa, unidentified
  source 1..855: note = Candidatus Sungbacteria sp.
MDNANKPSTKSLVNTTRISDHFGVTPGQVTRVFSFGIIPTKRQYAIIERWFAAVEAARERLYGMLYAHFQENPPAYLKEKFSYETFFKGRPVLNGLRDIDPTIMTSAVFTALRHKAEGAMAAFHTNHRRLFEEARKKMREYAECLKANEALLRGAADIDWDKIVNALRTRLNTCLAPEYDAVIADFGALCAFRALIAETNALKGAYNHALNQMLPALVKVDEPEEAEESPRLRFFNGRINDLPKFPVAERETPPDTETIIRQLEDMARVIPDTAEILGYIHRIRHKAARRKPGSAVPLPQRVALYCAIRMERNPEEDPSTVAGHFLGEIDRVCEKRRQGLVRTPFDSQIRARYMDIISFRATLAHPDRWTEIQFLRSNAASRRVRAETISAPFEGFSWTSNRTNPAPQYGMALAKDANAPADAPELCICLSPSSAAFSVREKGGDLIYMRPTGGRRGKDNPGKEITWVPGSFDEYPASGVALKLRLYFGRSQARRMLTNKTWGLLSDNPRVFAANAELVGKKRNPQDRWKLFFHMVISGPPPVEYLDFSSDVRSRARTVIGINRGEVNPLAYAVVSVEDGQVLEEGLLGKKEYIDQLIETRRRISEYQSREQTPPRDLRQRVRHLQDTVLGSARAKIHSLIAFWKGILAIERLDDQFHGREQKIIPKKTYLANKTGFMNALSFSGAVRVDKKGNPWGGMIEIYPGGISRTCTQCGTVWLARRPKNPGHRDAMVVIPDIVDDAAATGFDNVDCDAGTVDYGELFTLSREWVRLTPRYSRVMRGTLGDLERAIRQGDDRKSRQMLELALEPQPQWGQFFCHRCGFNGQSDVLAATNLARRAISLIRRLPDTDTPPTP

SEQ ID NO: 4 - protein, 977 aa, synthetic construct
QEIKRINKIRRRLVKDSNTKKAGKTGPMKTLLVRVMTPDLRERLENLRKKPENIPQPISNTSRANLNKLLTDYTEMKKAILHVYWEEFQKDPVGLMSRVAQPASKKIDQNKLKPEMDEKGNLTTAGFACSQCGQPLFVYKLEQVSEKGKAYTNYFGRCNVAEHEKLILLAQLKPEKDSDEAVTYSLGKFGQRALDFYSIHVTKESTHPVKPLAQIAGNRYASGPVGKALSDACMGTIASFLSKYQDIIIEHQKVVKGNQKRLESLRELAGKENLEYPSVTLPPQPHTKEGVDAYNEVIARVRMWVNLNLWQKLKLSRDDAKPLLRLKGFPSFPLVERQANEVDWWDMVCNVKKLINEKKEDGKVFWQNLAGYKRQEALRPYLSSEEDRKKGKKFARYQLGDLLLHLEKKHGEDWGKVYDEAWERIDKKVEGLSKHIKLEEERRSEDAQSKAALTDWLRAKASFVIEGLKEADKDEFCRCELKLQKWYGDLRGKPFAIEAENSILDISGFSKQYNCAFIWQKDGVKKLNLYLIINYFKGGKLRFKKIKPEAFEANRFYTVINKKSGEIVPMEVNFNFDDPNLIILPLAFGKRQGREFIWNDLLSLETGSLKLANGRVIEKTLYNRRTRQDEPALFVALTFERREVLDSSNIKPMNLIGVDRGENIPAVIALTDPEGCPLSRFKDSLGNPTHILRIGESYKEKQRTIQAKKEVEQRRAGGYSRKYASKAKNLADDMVRNTARDLLYYAVTQDAMLIFENLSRGFGRQGKRTFMAERQYTRMEDWLTAKLAYEGLSKTYLSKTLAQYTSKTCSNCGFTITSADYDRVLEKLKKTATGWMTTINGKELKVEGQITYYNRYKRQNVVKDLSVELDRLSEESVNNDISSWTKGRSGEALSLLKKRFSHRPVQEKFVCLNCGFETHADEQAALNIARSWLFLRSQEYKKYQTNKTTGNTDKRAFVETWQSFYRKKLKEVWKPAV

SEQ ID NO: 5 - protein, 978 aa, synthetic construct
QEIKRINKIRRRLVKDSNTKKAGKTGPMKTLLVRVMTPDLRERLENLRKKPENIPQPISNTSRANLNKLLTDYTEMKKAILHVYWEEFQKDPVGLMSRVAQPASKKIDQNKLKPEMDEKGNLTTAGFACSQCGQPLFVYKLEQVSEKGKAYTNYFGRCNVAEHEKLILLAQLKPEKDSDEAVTYSLGKFGQRALDFYSIHVTKESTHPVKPLAQIAGNRYASGPVGKALSDACMGTIASFLSKYQDIIIEHQKVVKGNQKRLESLRELAGKENLEYPSVTLPPQPHTKEGVDAYNEVIARVRMWVNLNLWQKLKLSRDDAKPLLRLKGFPSFPLVERQANEVDWWDMVCNVKKLINEKKEDGKVFWQNLAGYKRQEALRPYLSSEEDRKKGKKFARYQLGDLLLHLEKKHGEDWGKVYDEAWERIDKKVEGLSKHIKLEEERRSEDAQSKAALTDWLRAKASFVIEGLKEADKDEFCRCELKLQKWYGDLRGKPFAIEAENSILDISGFSKQYNCAFIWQKDGVKKLNLYLIINYFKGGKLRFKKIKPEAFEANRFYTVINKKSGEIVPMEVNFNFDDPNLIILPLAFGKRQGREFIWNDLLSLETGSLKLANGRVIEKTLYNRRTRQDEPALFVALTFERREVLDSSNIKPMNLIGVDRGENIPAVIALTDPEGCPLSRFKDSLGNPTHILRIGESYKEKQRTIQAKKEVEQRRAGGYSRKYASKAKNLADDMVRNTARDLLYYAVTQDAMLIFENLSRGFGRQGKRTFMAERQYTRMEDWLTAKLAYEGLPSKTYLSKTLAQYTSKTCSNCGFTITSADYDRVLEKLKKTATGWMTTINGKELKVEGQITYYNRYKRQNVVKDLSVELDRLSEESVNNDISSWTKGRSGEALSLLKKRFSHRPVQEKFVCLNCGFETHADEQAALNIARSWLFLRSQEYKKYQTNKTTGNTDKRAFVETWQSFYRKKLKEVWKPAV

SEQ ID NO: 6 - protein, 979 aa, synthetic construct
QEIKRINKIRRRLVKDSNTKKAGKTRGPMKTLLVRVMTPDLRERLENLRKKPENIPQPISNTSRANLNKLLTDYTEMKKAILHVYWEEFQKDPVGLMSRVAQPASKKIDQNKLKPEMDEKGNLTTAGFACSQCGQPLFVYKLEQVSEKGKAYTNYFGRCNVAEHEKLIKLAQLKPEKDSDEAVTYSLGKFGQRALDFYSIHVTKESTHPVKPLAQIAGNRYASSPVGKALSDACMGTIASFLSKYQDIIIEHQKVVKGNQKRLESLRELAGKENLEYPSVTLPPQPHTKEGVDAYNEVIARVRMWVNLNLWQKLKLSRDDAKPLLRLKGFPSFPLVERQANEVDWWDMVCNVKKLINEKKEDGKVFWQNLAGYKRQEALRPYLSSEEDRKKGKKFARYQLGDLLLHLEKKHGEDWGKVYDEAWERIDKKVEGLSKHIKLEEERRSEDAQSKAALTDWLRAKASFVIEGLKEADKDEFCRCELKLQKWYGDLRGKPFAIEAENSILDISGFSKQYNCAFIWQKDGVKKLNLYLIINYFKGGKLRFKKIKPEAFEANRFYTVINKKSGEIVPMEVNFNFDDPNLIILPLAFGKRQGREFIWNDLLSLETGSLKLANGRVIEKTLYNRRTRQDEPALFVALTFERREVLDSSNIKPMNLIGVDRGENIPAVIALTDPEGCPLSRFKDSLGNPTHILRIGESYKEKQRTIQAKKEVEQRRAGGYSRKYASKAKNLADDMVRNTARDLLYYAVTQDAMLIFENLSRGFGRQGKRTFMAERQYTRMEDWLTAKLAYEGLPSKTYLSKTLAQYTSKTCSNCGFTITSADYDRVLEKLKKTATGWMTTINGKELKVEGQITYYNRYKRQNVVKDLSVELDRLSEESVNNDISSWTKGRSGEALSLLKKRFSHRPVQEKFVCLNCGFETHADEQAALNIARSWLFLRSQEYKKYQTNKTTGNTDKRAFVETWQSFYRKKLKEVWKPAV

SEQ ID NO: 7 - protein, 978 aa, synthetic construct
QEIKRINKIRRRLVKDSNTKKAGKTGPMKTLLVRVMTPDLRERLENLRKKPENIPQPISNTSRANLNKLLTDYTEMKKAILHVYWEEFQKDPVGLMSRVAQPASKKIDQNKLKPEMDEKGNLTTAGFACSQCGQPLFVYKLEQVSEKGKAYTNYFGRCNVAEHEKLILLAQLKPEKDSDEAVTYSLGKFGQRALDFYSIHVTKESTHPVKPLAQIAGNRYASGPVGKALSDACMGTIASFLSKYQDIIIEHQKVVKGNQKRLESLRELAGKENLEYPSVTLPPQPHTKEGVDAYNEVIARVRMWVNLNLWQKLKLSRDDAKPLLRLKKFPSFPLVERQANEVDWWDMVCNVKKLINEKKEDGKVFWQNLAGYKRQEALRPYLSSEEDRKKGKKFARYQLGDLLLHLEKKHGEDWGKVYDEAWERIDKKVEGLSKHIKLEEERRSEDAQSKAALTDWLRAKASFVIEGLKEADKDEFCRCELKLQKWYGDLRGKPFAIEAENSILDISGFSKQYNCAFIWQKDGVKKLNLYLIINYFKGGKLRFKKIKPEAFEANRFYTVINKKSGEIVPMEVNFNFDDPNLIILPLAFGKRQGREFIWNDLLSLETGSLKLANGRVIEKTLYNRRTRQDEPALFVALTFERREVLDSSNIKPMNLIGVDRGENIPAVIALTDPEGCPLSRFKDSLGNPTHILRIGESYKEKQRTIQAKKEVEQRRAGGYSRKYASKAKNLADDMVRNTARDLLYYAVTQDAMLIFENLSRGFGRQGKRTFMAERQYTRMEDWLTAKLAYEGLPSKTYLSKTLAQYTSKTCSNCGFTITSADYDRVLEKLKKTATGWMTTINGKELKVEGQITYYNRYKRQNVVKDLSVELDRLSEESVNNDISSWTKGRSGEALSLLKKRFSHRPVQEKFVCLNCGFETHADEQAALNIARSWLFLRSQEYKKYQTNKTTGNTDKRAFVETWQSFYRKKLKEVWKPAV

SEQ ID NO: 8 - protein, 976 aa, synthetic construct
QEIKRINKIRRRLVKDSNTKKAGKTGPMKTLLVRVMTPDLRERLENLRKKPENIPQPISNTSRANLNKLLTDYTEMKKAILHVYWEEFQKDPVGLMSRVAQPAPKNIDQRKLIPVKDGNERLTSSGFACSQCCQPLYVYKLEQVNDKGKPHTNYFGRCNVSEHERLILLSPHKPEANDELVTYSLGKFGQRALDFYSIHVTRESNHPVKPLEQIGGNSCASGPVGKALSDACMGAVASFLTKYQDIILEHQKVIKKNEKRLANLKDIASANGLAFPKITLPPQPHTKEGIEAYNNVVAQIVIWVNLNLWQKLKIGRDEAKPLQRLKGFPSFPLVERQANEVDWWDMVCNVKKLINEKKEDGKVFWQNLAGYKRQEALRPYLSSEEDRKKGKKFARYQFGDLLLHLEKKHGEDWGKVYDEAWERIDKKVEGLSKHIKLEEERRSEDAQSKAALTDWLRAKASFVIEGLKEADKDEFCRCELKLQKWYGDLRGKPFAIEAENSILDISGFSKQYNCAFIWQKDGVKKLNLYLIINYFKGGKLRFKKIKPEAFEANRFYTVINKKSGEIVPMEVNFNFDDPNLIILPLAFGKRQGREFIWNDLLSLETGSLKLANGRVIEKTLYNRRTRQDEPALFVALTFERREVLDSSNIKPMNLIGIDRGENIPAVIALTDPEGCPLSRFKDSLGNPTHILRIGESYKEKQRTIQAKKEVEQRRAGGYSRKYASKAKNLADDMVRNTARDLLYYAVTQDAMLIFENLSRGFGRQGKRTFMAERQYTRMEDWLTAKLAYEGLSKTYLSKTLAQYTSKTCSNCGFTITSADYDRVLEKLKKTATGWMTTINGKELKVEGQITYYNRYKRQNVVKDLSVELDRLSEESVNNDISSWTKGRSGEALSLLKKRFSHRPVQEKFVCLNCGFETHADEQAALNIARSWLFLRSQEYKKYQTNKTTGNTDKRAFVETWQSFYRKKLKEVWKPAV

SEQ ID NO: 9 - protein, 976 aa, synthetic construct
QEIKRINKIRRRLVKDSNTKKAGKTGPMKTLLVRVMTPDLRERLENLRKKPENIPQPISNTSRANLNKLLTDYTEMKKAILHVYWEEFQKDPVGLMSRVAQPAPKNIDQRKLIPVKDGNERLTSSGFACSQCCQPLYVYKLEQVNDKGKPHTNYFGRCNVSEHERLILLSPHKPEANDELVTYSLGKFGQRALDFYSIHVTRESNHPVKPLEQIGGNSCASGPVGKALSDACMGAVASFLTKYQDIILEHQKVIKKNEKRLANLKDIASANGLAFPKITLPPQPHTKEGIEAYNNVVAQIVIWVNLNLWQKLKIGRDEAKPLQRLKGFPSFPLVERQANEVDWWDMVCNVKKLINEKKEDGKVFWQNLAGYKRQEALRPYLSSEEDRKKGKKFARYQFGDLLLHLEKKHGEDWGKVYDEAWERIDKKVEGLSKHIKLEEERRSEDAQSKAALTDWLRAKASFVIEGLKEADKDEFCRCELKLQKWYGDLRGKPFAIEAENSILDISGFSKQYNCAFIWQKDGVKKLNLYLIINYFKGGKLRFKKIKPEAFEANRFYTVINKKSGEIVPMEVNFNFDDPNLIILPLAFGKRQGREFIWNDLLSLETGSLKLANGRVIEKTLYNRRTRQDEPALFVALTFERREVLDSSNIKPMNLIGIDRGENIPAVIALTDPEGCPLSRFKDSLGNPTHILRIGESYKEKQRTIQAKKEVEQRRAGGYSRKYASKAKNLADDMVRNTARDLLYYAVTQDAMLIFENLSRGFGRQGKRTFMAERQYTRMEDWLTAKLAYEGLSKTYLSKTLAQYTSKTCSCPKCAAVWSNPIELKLANGSFTLTYRDELRENIKALKLERDVSGVWHGSWLADGKKIQSFTPKSLKELNSLTNKLATAKGDERRKLERDMLELFKHRHRNTYDRFYCLFCDEQAALNIARSWLFLRSQEYKKYQTNKTTGNTDKRAFVETWQSFYRKKLKEVWKPAV

SEQ ID NO: 10 - protein, 966 aa, synthetic construct
QEIKRINKIRRRLVKDSNTKKAGKTGPMKTLLVRVMTPDLRERLENLRKKPENIPQPISNTSRANLNKLLTDYTEMKKAILHVYWEEFQKDPVGLMSRVAQPAPKNIDQRKLIPVKDGNERLTSSGFACSQCCQPLYVYKLEQVNDKGKPHTNYFGRCNVSEHERLILLSPHKPEANDELVTYSLGKFGQRALDFYSIHVTRESNHPVKPLEQIGGNSCASGPVGKALSDACMGAVASFLTKYQDIILEHQKVIKKNEKRLANLKDIASANGLAFPKITLPPQPHTKEGIEAYNNVVAQIVIWVNLNLWQKLKIGRDEAKPLQRLKGFPSFPLVERQANEVDWWDMVCNVKKLINEKKEDGKVFWQNLAGYKRQEALRPYLSSEEDRKKGKKFARYQFGDLLLHLEKKHGEDWGKVYDEAWERIDKKVEGLSKHIKLEEERRSEDAQSKAALTDWLRAKASFVIEGLKEADKDEFCRCELKLQKWYGDLRGKPFAIEAENSILDISGFSKQYNCAFIWQKDGVKKLNLYLIINYFKGGKLRFKKIKPEAFEANRFYTVINKKSGEIVPMEVNFNFDDPNLIILPLAFGKRQGREFIWNDLLSLETGSLKLANGRVIEKTLYNRRTRQDEPALFVALTFERREVLDSSNIKPMNLIGIDRGENIPAVIALTDPEGCPLSRFKDSLGNPTHILRIGESYKEKQRTIQAKKEVEQRRAGGYSRKYASKAKNLADDMVRNTARDLLYYAVTQDAMLIFENLSRGFGRQGKRTFMAERQYTRMEDWLTAKLAYEGLSKTYLSKTLAQYTSKTCSCINCRTVWNSKLKQDICDYSISNNFKNMDFAKSLLEYKKDKFKLNEDFTIFNFRNRQSEKKNLKDLKQAVDNKKTEEAFRYLKLALGPRVKQQTFICPKCDEQAALNIARSWLFLRSQEYKKYQTNKTTGNTDKRAFVETWQSFYRKKLKEVWKPAV

SEQ ID NO: 11 - protein, 969 aa, synthetic construct
QEIKRINKIRRRLVKDSNTKKAGKTGPMKTLLVRVMTPDLRERLENLRKKPENIPQPISNTSRANLNKLLTDYTEMKKAILHVYWEEFQKDPVGLMSRVAQPAPKNIDQRKLIPVKDGNERLTSSGFACSQCCQPLYVYKLEQVNDKGKPHTNYFGRCNVSEHERLILLSPHKPEANDELVTYSLGKFGQRALDFYSIHVTRESNHPVKPLEQIGGNSCASGPVGKALSDACMGAVASFLTKYQDIILEHQKVIKKNEKRLANLKDIASANGLAFPKITLPPQPHTKEGIEAYNNVVAQIVIWVNLNLWQKLKIGRDEAKPLQRLKGFPSFPLVERQANEVDWWDMVCNVKKLINEKKEDGKVFWQNLAGYKRQEALRPYLSSEEDRKKGKKFARYQFGDLLLHLEKKHGEDWGKVYDEAWERIDKKVEGLSKHIKLEEERRSEDAQSKAALTDWLRAKASFVIEGLKEADKDEFCRCELKLQKWYGDLRGKPFAIEAENSILDISGFSKQYNCAFIWQKDGVKKLNLYLIINYFKGGKLRFKKIKPEAFEANRFYTVINKKSGEIVPMEVNFNFDDPNLIILPLAFGKRQGREFIWNDLLSLETGSLKLANGRVIEKTLYNRRTRQDEPALFVALTFERREVLDSSNIKPMNLIGIDRGENIPAVIALTDPEGCPLSRFKDSLGNPTHILRIGESYKEKQRTIQAKKEVEQRRAGGYSRKYASKAKNLADDMVRNTARDLLYYAVTQDAMLIFENLSRGFGRQGKRTFMAERQYTRMEDWLTAKLAYEGLSKTYLSKTLAQYTSKTCSCPKCDFNFNKEIRREKINKMNQEEMIEIINNLITKENFYYSPQLSILIPQKWVSYNENEKYPEEISIESIKKYIKENKLEEALRYFKTITPRITQDKFVCLKCDEQAALNIARSWLFLRSQEYKKYQTNKTTGNTDKRAFVETWQSFYRKKLKEVWKPAV

SEQ ID NO: 12 - protein, 972 aa, synthetic construct
QEIKRINKIRRRLVKDSNTKKAGKTGPMKTLLVRVMTPDLRERLENLRKKPENIPQPISNTSRANLNKLLTDYTEMKKAILHVYWEEFQKDPVGLMSRVAQPAPKNIDQRKLIPVKDGNERLTSSGFACSQCCQPLYVYKLEQVNDKGKPHTNYFGRCNVSEHERLILLSPHKPEANDELVTYSLGKFGQRALDFYSIHVTRESNHPVKPLEQIGGNSCASGPVGKALSDACMGAVASFLTKYQDIILEHQKVIKKNEKRLANLKDIASANGLAFPKITLPPQPHTKEGIEAYNNVVAQIVIWVNLNLWQKLKIGRDEAKPLQRLKGFPSFPLVERQANEVDWWDMVCNVKKLINEKKEDGKVFWQNLAGYKRQEALRPYLSSEEDRKKGKKFARYQFGDLLLHLEKKHGEDWGKVYDEAWERIDKKVEGLSKHIKLEEERRSEDAQSKAALTDWLRAKASFVIEGLKEADKDEFCRCELKLQKWYGDLRGKPFAIEAENSILDISGFSKQYNCAFIWQKDGVKKLNLYLIINYFKGGKLRFKKIKPEAFEANRFYTVINKKSGEIVPMEVNFNFDDPNLIILPLAFGKRQGREFIWNDLLSLETGSLKLANGRVIEKTLYNRRTRQDEPALFVALTFERREVLDSSNIKPMNLIGIDRGENIPAVIALTDPEGCPLSRFKDSLGNPTHILRIGESYKEKQRTIQAKKEVEQRRAGGYSRKYASKAKNLADDMVRNTARDLLYYAVTQDAMLIFENLSRGFGRQGKRTFMAERQYTRMEDWLTAKLAYEGLSKTYLSKTLAQYTSKTCSCSNCGFVITNAHYEDMFNKLSKMQSGWKTFLNGRELEVSGDIKYYSRIKKQDVTKNLIEEFNRLAEESGTTDIKAWSKKRKEFAVFLLKKKFNHRPEQERFVCVDCDEQAALNIARSWLFLRSQEYKKYQTNKTTGNTDKRAFVETWQSFYRKKLKEVWKPAV

SEQ ID NO: 13 - protein, 972 aa, synthetic construct
QEIKRINKIRRRLVKDSNTKKAGKTGPMKTLLVRVMTPDLRERLENLRKKPENIPQPISNTSRANLNKLLTDYTEMKKAILHVYWEEFQKDPVGLMSRVAQPAPKNIDQRKLIPVKDGNERLTSSGFACSQCCQPLYVYKLEQVNDKGKPHTNYFGRCNVSEHERLILLSPHKPEANDELVTYSLGKFGQRALDFYSIHVTRESNHPVKPLEQIGGNSCASGPVGKALSDACMGAVASFLTKYQDIILEHQKVIKKNEKRLANLKDIASANGLAFPKITLPPQPHTKEGIEAYNNVVAQIVIWVNLNLWQKLKIGRDEAKPLQRLKGFPSFPLVERQANEVDWWDMVCNVKKLINEKKEDGKVFWQNLAGYKRQEALRPYLSSEEDRKKGKKFARYQFGDLLLHLEKKHGEDWGKVYDEAWERIDKKVEGLSKHIKLEEERRSEDAQSKAALTDWLRAKASFVIEGLKEADKDEFCRCELKLQKWYGDLRGKPFAIEAENSILDISGFSKQYNCAFIWQKDGVKKLNLYLIINYFKGGKLRFKKIKPEAFEANRFYTVINKKSGEIVPMEVNFNFDDPNLIILPLAFGKRQGREFIWNDLLSLETGSLKLANGRVIEKTLYNRRTRQDEPALFVALTFERREVLDSSNIKPMNLIGIDRGENIPAVIALTDPEGCPLSRFKDSLGNPTHILRIGESYKEKQRTIQAKKEVEQRRAGGYSRKYASKAKNLADDMVRNTARDLLYYAVTQDAMLIFENLSRGFGRQGKRTFMAERQYTRMEDWLTAKLAYEGLSKTYLSKTLAQYTSKTCSCANCGFVITNAHYGNMFENLSKTQSEWKTFLNDKGLEVSGDIKYYSRIKKQDVTKNLIEEFNRLAEESGTTDIKAWSKKRKEFAIFLLKKKFNHRPVQERFVCIDCDEQAALNIARSWLFLRSQEYKKYQTNKTTGNTDKRAFVETWQSFYRKKLKEVWKPAV

SEQ ID NO: 14 - protein, 970 aa, synthetic construct
QEIKRINKIRRRLVKDSNTKKAGKTGPMKTLLVRVMTPDLRERLENLRKKPENIPQPISNTSRANLNKLLTDYTEMKKAILHVYWEEFQKDPVGLMSRVAQPAPKNIDQRKLIPVKDGNERLTSSGFACSQCCQPLYVYKLEQVNDKGKPHTNYFGRCNVSEHERLILLSPHKPEANDELVTYSLGKFGQRALDFYSIHVTRESNHPVKPLEQIGGNSCASGPVGKALSDACMGAVASFLTKYQDIILEHQKVIKKNEKRLANLKDIASANGLAFPKITLPPQPHTKEGIEAYNNVVAQIVIWVNLNLWQKLKIGRDEAKPLQRLKGFPSFPLVERQANEVDWWDMVCNVKKLINEKKEDGKVFWQNLAGYKRQEALRPYLSSEEDRKKGKKFARYQFGDLLLHLEKKHGEDWGKVYDEAWERIDKKVEGLSKHIKLEEERRSEDAQSKAALTDWLRAKASFVIEGLKEADKDEFCRCELKLQKWYGDLRGKPFAIEAENSILDISGFSKQYNCAFIWQKDGVKKLNLYLIINYFKGGKLRFKKIKPEAFEANRFYTVINKKSGEIVPMEVNFNFDDPNLIILPLAFGKRQGREFIWNDLLSLETGSLKLANGRVIEKTLYNRRTRQDEPALFVALTFERREVLDSSNIKPMNLIGIDRGENIPAVIALTDPEGCPLSRFKDSLGNPTHILRIGESYKEKQRTIQAKKEVEQRRAGGYSRKYASKAKNLADDMVRNTARDLLYYAVTQDAMLIFENLSRGFGRQGKRTFMAERQYTRMEDWLTAKLAYEGLSKTYLSKTLAQYTSKTCSCSGCGEPHASANGSFYFENLIREDSGFRTRLTNGKEVSLDFEYQYWAREERKMRTANVSERLREILGDREANDVAATTREKAQSLLRRALSPRVRQADYRCPNCDEQAALNIARSWLFLRSQEYKKYQTNKTTGNTDKRAFVETWQSFYRKKLKEVWKPAV

SEQ ID NO: 15 - protein, 1073 aa, synthetic construct
QEIKRINKIRRRLVKDSNTKKAGKTGPMKTLLVRVMTPDLRERLENLRKKPENIPQPISNTSRANLNKLLTDYTEMKKAILHVYWEEFQKDPVGLMSRVAQPAPKNIDQRKLIPVKDGNERLTSSGFACSQCCQPLYVYKLEQVNDKGKPHTNYFGRCNVSEHERLILLSPHKPEANDELVTYSLGKFGQRALDFYSIHVTRESNHPVKPLEQIGGNSCASGPVGKALSDACMGAVASFLTKYQDIILEHQKVIKKNEKRLANLKDIASANGLAFPKITLPPQPHTKEGIEAYNNVVAQIVIWVNLNLWQKLKIGRDEAKPLQRLKGFPSFPLVERQANEVDWWDMVCNVKKLINEKKEDGKVFWQNLAGYKRQEALRPYLSSEEDRKKGKKFARYQFGDLLLHLEKKHGEDWGKVYDEAWERIDKKVEGLSKHIKLEEERRSEDAQSKAALTDWLRAKASFVIEGLKEADKDEFCRCELKLQKWYGDLRGKPFAIEAENSILDISGFSKQYNCAFIWQKDGVKKLNLYLIINYFKGGKLRFKKIKPEAFEANRFYTVINKKSGEIVPMEVNFNFDDPNLIILPLAFGKRQGREFIWNDLLSLETGSLKLANGRVIEKTLYNRRTRQDEPALFVALTFERREVLDSSNIKPMNLIGIDRGENIPAVIALTDPEGCPLSRFKDSLGNPTHILRIGESYKEKQRTIQAKKEVEQRRAGGYSRKYASKAKNLADDMVRNTARDLLYYAVTQDAMLIFENLSRGFGRQGKRTFMAERQYTRMEDWLTAKLAYEGLSKTYLSKTLAQYTSKTCSCSGCGEPHASANGSFYFENLIREDSGFRTRLTNGKEVSLDFEYQYWAREERKMRTANVSERLREILGDREANDVAATTREKAQSLLRRALSPRVRQADYRCPNCCSSCGEVFSSAWYNKVTTTIQKHDGRWQVILGTGKHLQLPDTYKTYMRGRGEKTCNTAERLEELFKGRPLQDLPPTSRKDVDSLVKKLIHHRPKRGEFVCPCCDEQAALNIARSWLFLRSQEYKKYQTNKTTGNTDKRAFVETWQSFYRKKLKEVWKPAV

SEQ ID NO: 16 - protein, 966 aa, synthetic construct
QEIKRINKIRRRLVKDSNTKKAGKTGPMKTLLVRVMTPDLRERLENLRKKPENIPQPISNTSRANLNKLLTDYTEMKKAILHVYWEEFQKDPVGLMSRVAQPAPKNIDQRKLIPVKDGNERLTSSGFACSQCCQPLYVYKLEQVNDKGKPHTNYFGRCNVSEHERLILLSPHKPEANDELVTYSLGKFGQRALDFYSIHVTRESNHPVKPLEQIGGNSCASGPVGKALSDACMGAVASFLTKYQDIILEHQKVIKKNEKRLANLKDIASANGLAFPKITLPPQPHTKEGIEAYNNVVAQIVIWVNLNLWQKLKIGRDEAKPLQRLKGFPSFPLVERQANEVDWWDMVCNVKKLINEKKEDGKVFWQNLAGYKRQEALRPYLSSEEDRKKGKKFARYQFGDLLLHLEKKHGEDWGKVYDEAWERIDKKVEGLSKHIKLEEERRSEDAQSKAALTDWLRAKASFVIEGLKEADKDEFCRCELKLQKWYGDLRGKPFAIEAENSILDISGFSKQYNCAFIWQKDGVKKLNLYLIINYFKGGKLRFKKIKPEAFEANRFYTVINKKSGEIVPMEVNFNFDDPNLIILPLAFGKRQGREFIWNDLLSLETGSLKLANGRVIEKTLYNRRTRQDEPALFVALTFERREVLDSSNIKPMNLIGIDRGENIPAVIALTDPEGCPLSRFKDSLGNPTHILRIGESYKEKQRTIQAKKEVEQRRAGGYSRKYASKAKNLADDMVRNTARDLLYYAVTQDAMLIFENLSRGFGRQGKRTFMAERQYTRMEDWLTAKLAYEGLSKTYLSKTLAQYTSKTCSCSNCGFVASSEKLKNVSLELKNIDGKDIWFANLDGKEISLDINYEAYVKKEGHNKTFNANEEITRLKQKNTKKNKELIEKALLNALNPRKTQAEYICPICDEQAALNIARSWLFLRSQEYKKYQTNKTTGNTDKRAFVETWQSFYRKKLKEVWKPAV

SEQ ID NO: 17 - protein, 971 aa, synthetic construct
QEIKRINKIRRRLVKDSNTKKAGKTGPMKTLLVRVMTPDLRERLENLRKKPENIPQPISNTSRANLNKLLTDYTEMKKAILHVYWEEFQKDPVGLMSRVAQLPAGFNKPLAMETEDGQPVQSGFLCSQCGEPIFVHRYIWKSDRGKENISYVGKCSDPVHVRLIRLEQNKPKDEPITYSLGKFGKRALDFYSIHVTRESNHPVKPLEQIGGNSCASGPVGKALSDACMGAVASFLTKYQDIILEHQKVIKKNEKRLANLKDIASANGLAFPKITLPPQPHTKEGIEAYNNVVAQIVIWVNLNLWQKLKIGRDEAKPLQRLKGFPSFPLVERQANEVDWWDMVCNVKKLINEKKEDGKVFWQNLAGYKRQEALRPYLSSEEDRKKGKKFARYQFGDLLLHLEKKHGEDWGKVYDEAWERIDKKVEGLSKHIKLEEERRSEDAQSKAALTDWLRAKASFVIEGLKEADKDEFCRCELKLQKWYGDLRGKPFAIEAENSILDISGFSKQYNCAFIWQKDGVKKLNLYLIINYFKGGKLRFKKIKPEAFEANRFYTVINKKSGEIVPMEVNFNFDDPNLIILPLAFGKRQGREFIWNDLLSLETGSLKLANGRVIEKTLYNRRTRQDEPALFVALTFERREVLDSSNIKPMNLIGIDRGENIPAVIALTDPEGCPLSRFKDSLGNPTHILRIGESYKEKQRTIQAKKEVEQRRAGGYSRKYASKAKNLADDMVRNTARDLLYYAVTQDAMLIFENLSRGFGRQGKRTFMAERQYTRMEDWLTAKLAYEGLSKTYLSKTLAQYTSKTCSNCGFTITSADYDRVLEKLKKTATGWMTTINGKELKVEGQITYYNRYKRQNVVKDLSVELDRLSEESVNNDISSWTKGRSGEALSLLKKRFSHRPVQEKFVCLNCGFETHADEQAALNIARSWLFLRSQEYKKYQTNKTTGNTDKRAFVETWQSFYRKKLKEVWKPAV

SEQ ID NO: 18 - protein, 971 aa, synthetic construct
QEIKRINKIRRRLVKDSNTKKAGKTGPMKTLLVRVMTPDLRERLENLRKKPENIPQPISNTSRANLNKLLTDYTEMKKAILHVYWEEFQKDPVGLMSRVAQLPAGFNKPLTEETENEQPVQSGFSCNQCGKPIFVHNYIWKSDTGKEHTSYVGRCSDPEHNRLIRLEQNKPKDEPILYSLGKFSKRALDFYSIHVTRESNHPVKPLEQIGGNSCASGPVGKALSDACMGAVASFLTKYQDIILEHQKVIKKNEKRLANLKDIASANGLAFPKITLPPQPHTKEGIEAYNNVVAQIVIWVNLNLWQKLKIGRDEAKPLQRLKGFPSFPLVERQANEVDWWDMVCNVKKLINEKKEDGKVFWQNLAGYKRQEALRPYLSSEEDRKKGKKFARYQFGDLLLHLEKKHGEDWGKVYDEAWERIDKKVEGLSKHIKLEEERRSEDAQSKAALTDWLRAKASFVIEGLKEADKDEFCRCELKLQKWYGDLRGKPFAIEAENSILDISGFSKQYNCAFIWQKDGVKKLNLYLIINYFKGGKLRFKKIKPEAFEANRFYTVINKKSGEIVPMEVNFNFDDPNLIILPLAFGKRQGREFIWNDLLSLETGSLKLANGRVIEKTLYNRRTRQDEPALFVALTFERREVLDSSNIKPMNLIGIDRGENIPAVIALTDPEGCPLSRFKDSLGNPTHILRIGESYKEKQRTIQAKKEVEQRRAGGYSRKYASKAKNLADDMVRNTARDLLYYAVTQDAMLIFENLSRGFGRQGKRTFMAERQYTRMEDWLTAKLAYEGLSKTYLSKTLAQYTSKTCSNCGFTITSADYDRVLEKLKKTATGWMTTINGKELKVEGQITYYNRYKRQNVVKDLSVELDRLSEESVNNDISSWTKGRSGEALSLLKKRFSHRPVQEKFVCLNCGFETHADEQAALNIARSWLFLRSQEYKKYQTNKTTGNTDKRAFVETWQSFYRKKLKEVWKPAV

SEQ ID NO: 19 - protein, 986 aa, synthetic construct
QEIKRINKIRRRLVKDSNTKKAGKTGPMKTLLVRVMTPDLRERLENLRKKPENIPQPISNTSRANLNKLLTDYTEMKKAILHVYWEEFQKDPVGLMSRVAQPAPKNIDQRKLIPVKDGNERLTSSGFACSQCCQPLYVYKLEQVNDKGKPHTNYFGRCNVSEHERLILLSPHKPEANDELVTYSLGKFGQRALDFYSIHVTRESNHPVKPLEQIGGNSCASGPVGKALSDACMGAVASFLTKYQDIILEHQKVIKKNEKRLANLKDIASANGLAFPKITLPPQPHTKEGIEAYNNVVAQIVIWVNLNLWQKLKIGRDEAKPLQRLKGFPSFPLVERQANEVDWWDMVCNVKKLINEKKEDGKVFWQNLAGYKRQEALRPYLSSEEDRKKGKKFARYQFGDLLLHLEKKHGEDWGKVYDEAWERIDKKVEGLSKHIKLEEERRSEDAQSKAALTDWLRAKASFVIEGLKEADKDEFCRCELKLQKWYGDLRGKPFAIEAENSILDISGFSKQYNCAFIWQKDGVKKLNLYLIINYFKGGKLRFKKIKPEAFEANRFYTVINKKSGEIVPMEVNFNFDDPNLIILPLAFGKRQGREFIWNDLLSLETGSLKLANGRVIEKTLYNRRTRQDEPALFVALTFERREVLDSSNIKPMNLIGIDRGENIPAVIALTDPEGCPLSRFKDSLGNPTHILRIGESYKEKQRTIQAKKEVEQRRAGGYSRKYASKAKNLADDMVRNTARDLLYYAVTQDAMLIFENLSRGFGRQGKRTFMAERQYTRMEDWLTAKLAYEGLWTHKGKLPVHSKTYLSKTLAQYTSKTCSNCGFTITSADYDRVLEKLKKTATGWMTTINGKELKVEGQITYYNRYKRQNVVKDLSVELDRLSEESVNNDISSWTKGRSGEALSLLKKRFSHRPVQEKFVCLNCGFETHADEQAALNIARSWLFLRSQEYKKYQTNKTTGNTDKRAFVETWQSFYRKKLKEVWKPAV

SEQ ID NO: 20 - protein, 986 aa, synthetic construct
QEIKRINKIRRRLVKDSNTKKAGKTGPMKTLLVRVMTPDLRERLENLRKKPENIPQPISNTSRANLNKLLTDYTEMKKAILHVYWEEFQKDPVGLMSRVAQPAPKNIDQRKLIPVKDGNERLTSSGFACSQCCQPLYVYKLEQVNDKGKPHTNYFGRCNVSEHERLILLSPHKPEANDELVTYSLGKFGQRALDFYSIHVTRESNHPVKPLEQIGGNSCASGPVGKALSDACMGAVASFLTKYQDIILEHQKVIKKNEKRLANLKDIASANGLAFPKITLPPQPHTKEGIEAYNNVVAQIVIWVNLNLWQKLKIGRDEAKPLQRLKGFPSFPLVERQANEVDWWDMVCNVKKLINEKKEDGKVFWQNLAGYKRQEALRPYLSSEEDRKKGKKFARYQFGDLLLHLEKKHGEDWGKVYDEAWERIDKKVEGLSKHIKLEEERRSEDAQSKAALTDWLRAKASFVIEGLKEADKDEFCRCELKLQKWYGDLRGKPFAIEAENSILDISGFSKQYNCAFIWQKDGVKKLNLYLIINYFKGGKLRFKKIKPEAFEANRFYTVINKKSGEIVPMEVNFNFDDPNLIILPLAFGKRQGREFIWNDLLSLETGSLKLANGRVIEKTLYNRRTRQDEPALFVALTFERREVLDSSNIKPMNLIGIDRGENIPAVIALTDPEGCPLSRFKDSLGNPTHILRIGESYKEKQRTIQAKKEVEQRRAGGYSRKYASKAKNLADDMVRNTARDLLYYAVTQDAMLIFENLSRGFGRQGKRTFMAERQYTRMEDWLTAKLAYEGLWTYKGKLKAHSKTYLSKTLAQYTSKTCSNCGFTITSADYDRVLEKLKKTATGWMTTINGKELKVEGQITYYNRYKRQNVVKDLSVELDRLSEESVNNDISSWTKGRSGEALSLLKKRFSHRPVQEKFVCLNCGFETHADEQAALNIARSWLFLRSQEYKKYQTNKTTGNTDKRAFVETWQSFYRKKLKEVWKPAV

SEQ ID NO: 21 - protein, 976 aa, synthetic construct
QEIKRINKIRRRLVKDSNTKKAGKTGPMKTLLVRVMTPDLRERLENLRKKPENIPQPISNTSRANLNKLLTDYTEMKKAILHVYWEEFQKDPVGLMSRVAQPAPKNIDQRKLIPVKDGNERLTSSGFACSQCCQPLYVYKLEQVNDKGKPHTNYFGRCNVSEHERLILLSPHKPEANDELVTYSLGKFGQRALDFYSIHVTRESNHPVKPLEQIGGNSCASGPVGKALSDACMGAVASFLTKYQDIILEHQKVIKKNEKRLANLKDIASANGLAFPKITLPPQPHTKEGIEAYNNVVAQIVIWVNLNLWQKLKIGRDEAKPLQRLKGFPSFPLVERQANEVDWWDMVCNVKKLINEKKEDGKVFWQNLAGYKRQEALRPYLSSEEDRKKGKKFARYQLGDLLLHLEKKHGEDWGKVYDEAWERIDKKVEGLSKHIKLEEERRSEDAQSKAALTDWLRAKASFVIEGLKEADKDEFCRCELKLQKWYGDLRGKPFAIEAENSILDISGFSKQYNCAFIWQKDGVKKLNLYLIINYFKGGKLRFKKIKPEAFEANRFYTVINKKSGEIVPMEVNFNFDDPNLIILPLAFGKRQGREFIWNDLLSLETGSLKLANGRVIEKTLYNRRTRQDEPALFVALTFERREVLDSSNIKPMNLIGVDRGENIPAVIALTDPEGCPLSRFKDSLGNPTHILRIGESYKEKQRTIQAKKEVEQRRAGGYSRKYASKAKNLADDMVRNTARDLLYYAVTQDAMLIFENLSRGFGRQGKRTFMAERQYTRMEDWLTAKLAYEGLSKTYLSKTLAQYTSKTCSNCGFTITSADYDRVLEKLKKTATGWMTTINGKELKVEGQITYYNRYKRQNVVKDLSVELDRLSEESVNNDISSWTKGRSGEALSLLKKRFSHRPVQEKFVCLNCGFETHADEQAALNIARSWLFLRSQEYKKYQTNKTTGNTDKRAFVETWQSFYRKKLKEVWKPAV

SEQ ID NO: 22 - protein, 976 aa, synthetic construct
QEIKRINKIRRRLVKDSNTKKAGKTGPMKTLLVRVMTPDLRERLENLRKKPENIPQPISNTSRANLNKLLTDYTEMKKAILHVYWEEFQKDPVGLMSRVAQPAPKNIDQRKLIPVKDGNERLTSSGFACSQCCQPLYVYKLEQVNDKGKPHTNYFGRCNVSEHERLILLSPHKPEANDELVTYSLGKFGQRALDFYSIHVTKESTHPVKPLAQIAGNRYASGPVGKALSDACMGTIASFLSKYQDIIIEHQKVVKGNQKRLESLRELAGKENLEYPSVTLPPQPHTKEGVDAYNEVIARVRMWVNLNLWQKLKLSRDDAKPLLRLKGFPSFPLVERQANEVDWWDMVCNVKKLINEKKEDGKVFWQNLAGYKRQEALRPYLSSEEDRKKGKKFARYQLGDLLLHLEKKHGEDWGKVYDEAWERIDKKVEGLSKHIKLEEERRSEDAQSKAALTDWLRAKASFVIEGLKEADKDEFCRCELKLQKWYGDLRGKPFAIEAENSILDISGFSKQYNCAFIWQKDGVKKLNLYLIINYFKGGKLRFKKIKPEAFEANRFYTVINKKSGEIVPMEVNFNFDDPNLIILPLAFGKRQGREFIWNDLLSLETGSLKLANGRVIEKTLYNRRTRQDEPALFVALTFERREVLDSSNIKPMNLIGVDRGENIPAVIALTDPEGCPLSRFKDSLGNPTHILRIGESYKEKQRTIQAKKEVEQRRAGGYSRKYASKAKNLADDMVRNTARDLLYYAVTQDAMLIFENLSRGFGRQGKRTFMAERQYTRMEDWLTAKLAYEGLSKTYLSKTLAQYTSKTCSNCGFTITSADYDRVLEKLKKTATGWMTTINGKELKVEGQITYYNRRKRQNVVKDLSVELDRLSEESVNNDISSWTKGRSGEALSLLKKRFSHRPVQEKFVCLNCGFETHADEQAALNIARSWLFLRSQEYKKYQTNKTTGNTDKRAFVETWQSFYRKKLKEVWKPAV

SEQ ID NO: 23 - protein, 976 aa, synthetic construct
QEIKRINKIRRRLVKDSNTKKAGKTGPMKTLLVRVMTPDLRERLENLRKKPENIPQPISNTSRANLNKLLTDYTEMKKAILHVYWEEFQKDPVGLMSRVAQPAPKNIDQRKLIPVKDGNERLTSSGFACSQCCQPLYVYKLEQVNDKGKPHTNYFGRCNVSEHERLILLSPHKPEANDELVTYSLGKFGQRALDFYSIHVTKESTHPVKPLAQIAGNRYASGPVGKALSDACMGTIASFLSKYQDIIIEHQKVVKGNQKRLESLRELAGKENLEYPSVTLPPQPHTKEGVDAYNEVIARVRMWVNLNLWQKLKLSRDDAKPLLRLKGFPSFPLVERQANEVDWWDMVCNVKKLINEKKEDGKVFWQNLAGYKRQEALRPYLSSEEDRKKGKKFARYQLGDLLKHLEKKHGEDWGKVYDEAWERIDKKVEGLSKHIKLEEERRSEDAQSKAALTDWLRAKASFVIEGLKEADKDEFCRCELKLQKWYGDLRGKPFAIEAENSILDISGFSKQYNCAFIWQKDGVKKLNLYLIINYFKGGKLRFKKIKPEAFEANRFYTVINKKSGEIVPMEVNFNFDDPNLIILPLAFGKRQGREFIWNDLLSLETGSLKLANGRVIEKTLYNRRTRQDEPALFVALTFERREVLDSSNIKPMNLIGVDRGENIPAVIALTDPEGCPLSRFKDSLGNPTHILRIGESYKEKQRTIQAKKEVEQRRAGGYSRKYASKAKNLADDMVRNTARDLLYYAVTQDAMLIFENLSRGFGRQGKRTFMAERQYTRMEDWLTAKLAYEGLSKTYLSKTLAQYTSKTCSNCGFTITSADYDRVLEKLKKTATGWMTTINGKELKVEGQITYYNRRKRQNVVKDLSVELDRLSEESVNNDISSWTKGRSGEALSLLKKRFSHRPVQEKFVCLNCGFETHADEQAALNIARSWLFLRSQEYKKYQTNKTTGNTDKRAFVETWQSFYRKKLKEVWKPAV

SEQ ID NO: 24 - protein, 976 aa, synthetic construct
QEIKRINKIRRRLVKDSNTKKAGKTGPMKTLLVRVMTPDLRERLENLRKKPENIPQPISNTSRANLNKLLTDYTEMKKAILHVYWEEFQKDPVGLMSRVAQPAPKNIDQRKLIPVKDGNERLTSSGFACSQCCQPLYVYKLEQVNDKGKPHTNYFGRCNVSEHERLILLSPHKPEANDELVTYSLGKFGQRALDFYSIHVTKESTHPVKPLAQIAGNRYASGPVGKALSDACMGTIASFLSKYQDIIIEHQKVVKGNQKRLESLRELAGKENLEYPSVTLPPQPHTKEGVDAYNEVIARVRMWVNLNLWQKLKLSRDDAKPLLRLKGFPSFPLVERQANEVDWWDMVCNVKKLINEKKEDGKVFWQNLAGYKRQEALRPYLSSEEDRKKGKKFARYQLGDLLLHLEKKHGEDWGKVYDEAWERIDKKVEGLSKHIKLEEERRSEDAQSKAALTDWLRAKASFVIEGLKEADKDEFCRCELKLQKWYGDLRGKPFAIEAENSILDISGFSKQYNCAFIWQKDGVKKLNLYLIINYFKGGKLRFKKIKPEAFEANRFYTVINKKSGEIVPMEVNFNFDDPNLIILPLAFGKRQGREFIWNDLLSLETGSLKLANGRVIEKTLYNRRTRQDEPALFVALTFERREVLDSSNIKPMNLIGVDRGENIPAVIALTDPEGCPLSRFKDSLGNPTHILRIGESYKEKQRTIQAKKEVEQRRAGGYSRKYASKAKNLADDMVRNTARDLLYYAVTQDAMLIFENLSRGFGRQGKRTFMAERQYTRMEDWLTAKLAYEGLSKTYLSKTLAQYTSKTCSNCGFTITSADYDRVLEKLKKTATGWMTTINGKELKVEGQITYYNRYKRQNVVKDLSVELDRLSEESVNNDISSWTKGRSGEALSLLKKRFSHRPVQEKFVCLNCGFETHADEQAALNIARSWLFLRSQEYKKYQTNKTTGNTDKRAFVETWQSFYRKKLKEVWKPAV

SEQ ID NO: 25 - protein, 977 aa, synthetic construct
QEIKRINKIRRRLVKDSNTKKAGKTGPMKTLLVRVMTPDLRERLENLRKKPENIPQPISNTSRANLNKLLTDYTEMKKAILHVYWEEFQKDPVGLMSRVAQPASKKIDQNKLKPEMDEKGNLTTAGFACSQCGQPLFVYKLEQVSEKGKAYTNYFGRCNVAEHEKLILLAQLKPEKDSDEAVTYSLGKFGQRALDFYSIHVTKESTHPVKPLAQIAGNRYASGPVGKALSDACMGTIASFLSKYQDIIIEHQKVVKGNQKRLESLRELAGKENLEYPSVTLPPQPHTKEGVDAYNEVIARVRMWVNLNLWQKLKLSRDDAKPLLRLKGFPSFPLVERQANEVDWWDMVCNVKKLINEKKEDGKVFWQNLAGYKRQEALRPYLSSEEDRKKGKKFARYQFGDLLLHLEKKHGEDWGKVYDEAWERIDKKVEGLSKHIKLEEERRSEDAQSKAALTDWLRAKASFVIEGLKEADKDEFCRCELKLQKWYGDLRGKPFAIEAENSILDISGFSKQYNCAFIWQKDGVKKLNLYLIINYFKGGKLRFKKIKPEAFEANRFYTVINKKSGEIVPMEVNFNFDDPNLIILPLAFGKRQGREFIWNDLLSLETGSLKLANGRVIEKTLYNRRTRQDEPALFVALTFERREVLDSSNIKPMNLIGIDRGENIPAVIALTDPEGCPLSRFKDSLGNPTHILRIGESYKEKQRTIQAKKEVEQRRAGGYSRKYASKAKNLADDMVRNTARDLLYYAVTQDAMLIFENLSRGFGRQGKRTFMAERQYTRMEDWLTAKLAYEGLSKTYLSKTLAQYTSKTCSNCGFTITSADYDRVLEKLKKTATGWMTTINGKELKVEGQITYYNRYKRQNVVKDLSVELDRLSEESVNNDISSWTKGRSGEALSLLKKRFSHRPVQEKFVCLNCGFETHADEQAALNIARSWLFLRSQEYKKYQTNKTTGNTDKRAFVETWQSFYRKKLKEVWKPAV

SEQ ID NO: 26 - protein, 977 aa, synthetic construct
QEIKRINKIRRRLVKDSNTKKAGKTGPMKTLLVRVMTPDLRERLENLRKKPENIPQPISNTSRANLNKLLTDYTEMKKAILHVYWEEFQKDPVGLMSRVAQPASKKIDQNKLKPEMDEKGNLTTAGFACSQCGQPLFVYKLEQVSEKGKAYTNYFGRCNVAEHEKLILLAQLKPEKDSDEAVTYSLGKFGQRALDFYSIHVTKESTHPVKPLAQIAGNRYASGPVGKALSDACMGTIASFLSKYQDIIIEHQKVVKGNQKRLESLRELAGKENLEYPSVTLPPQPHTKEGVDAYNEVIARVRMWVNLNLWQKLKLSRDDAKPLLRLKGFPSFPLVERQANEVDWWDMVCNVKKLINEKKEDGKVFWQNLAGYKRQEALRPYLSSEEDRKKGKKFARYQLGDLLLHLEKKHGEDWGKVYDEAWERIDKKVEGLSKHIKLEEERRSEDAQSKAALTDWLRAKASFVIEGLKEADKDEFCRCELKLQKWYGDLRGKPFAIEAENSILDISGFSKQYNCAFIWQKDGVKKLNLYLIINYFKGGKLRFKKIKPEAFEANRFYTVINKKSGEIVPMEVNFNFDDPNLIILPLAFGKRQGREFIWNDLLSLETGSLKLANGRVIEKTLYNRRTRQDEPALFVALTFERREVLDSSNIKPMNLIGVDRGENIPAVIALTDPEGCPLSRFKDSLGNPTHILRIGESYKEKQRTIQAKKEVEQRRAGGYSRKYASKAKNLADDMVRNTARDLLYYAVTQDAMLIFENLSRGFGRQGKRTFMAERQYTRMEDWLTAKLAYEGLSKTYLSKTLAQYTSKTCSNCGFTITSADYDRVLEKLKKTATGWMTTINGKELKVEGQITYYNRRKRQNVVKDLSVELDRLSEESVNNDISSWTKGRSGEALSLLKKRFSHRPVQEKFVCLNCGFETHADEQAALNIARSWLFLRSQEYKKYQTNKTTGNTDKRAFVETWQSFYRKKLKEVWKPAV

SEQ ID NO: 27 - protein, 977 aa, synthetic construct
QEIKRINKIRRRLVKDSNTKKAGKTGPMKTLLVRVMTPDLRERLENLRKKPENIPQPISNTSRANLNKLLTDYTEMKKAILHVYWEEFQKDPVGLMSRVAQPASKKIDQNKLKPEMDEKGNLTTAGFACSQCGQPLFVYKLEQVSEKGKAYTNYFGRCNVAEHEKLILLAQLKPEKDSDEAVTYSLGKFGQRALDFYSIHVTKESTHPVKPLAQIAGNRYASGPVGKALSDACMGTIASFLSKYQDIIIEHQKVVKGNQKRLESLRELAGKENLEYPSVTLPPQPHTKEGVDAYNEVIARVRMWVNLNLWQKLKLSRDDAKPLLRLKGFPSFPLVERQANEVDWWDMVCNVKKLINEKKEDGKVFWQNLAGYKRQEALRPYLSSEEDRKKGKKFARYQLGDLLKHLEKKHGEDWGKVYDEAWERIDKKVEGLSKHIKLEEERRSEDAQSKAALTDWLRAKASFVIEGLKEADKDEFCRCELKLQKWYGDLRGKPFAIEAENSILDISGFSKQYNCAFIWQKDGVKKLNLYLIINYFKGGKLRFKKIKPEAFEANRFYTVINKKSGEIVPMEVNFNFDDPNLIILPLAFGKRQGREFIWNDLLSLETGSLKLANGRVIEKTLYNRRTRQDEPALFVALTFERREVLDSSNIKPMNLIGVDRGENIPAVIALTDPEGCPLSRFKDSLGNPTHILRIGESYKEKQRTIQAKKEVEQRRAGGYSRKYASKAKNLADDMVRNTARDLLYYAVTQDAMLIFENLSRGFGRQGKRTFMAERQYTRMEDWLTAKLAYEGLSKTYLSKTLAQYTSKTCSNCGFTITSADYDRVLEKLKKTATGWMTTINGKELKVEGQITYYNRRKRQNVVKDLSVELDRLSEESVNNDISSWTKGRSGEALSLLKKRFSHRPVQEKFVCLNCGFETHADEQAALNIARSWLFLRSQEYKKYQTNKTTGNTDKRAFVETWQSFYRKKLKEVWKPAV

SEQ ID NO: 28 - protein, 977 aa, synthetic construct
QEIKRINKIRRRLVKDSNTKKAGKTGPMKTLLVRVMTPDLRERLENLRKKPENIPQPISNTSRANLNKLLTDYTEMKKAILHVYWEEFQKDPVGLMSRVAQPASKKIDQNKLKPEMDEKGNLTTAGFACSQCGQPLFVYKLEQVSEKGKAYTNYFGRCNVAEHEKLILLAQLKPEKDSDEAVTYSLGKFGQRALDFYSIHVTRESNHPVKPLEQIGGNSCASGPVGKALSDACMGAVASFLTKYQDIILEHQKVIKKNEKRLANLKDIASANGLAFPKITLPPQPHTKEGIEAYNNVVAQIVIWVNLNLWQKLKIGRDEAKPLQRLKGFPSFPLVERQANEVDWWDMVCNVKKLINEKKEDGKVFWQNLAGYKRQEALRPYLSSEEDRKKGKKFARYQLGDLLLHLEKKHGEDWGKVYDEAWERIDKKVEGLSKHIKLEEERRSEDAQSKAALTDWLRAKASFVIEGLKEADKDEFCRCELKLQKWYGDLRGKPFAIEAENSILDISGFSKQYNCAFIWQKDGVKKLNLYLIINYFKGGKLRFKKIKPEAFEANRFYTVINKKSGEIVPMEVNFNFDDPNLIILPLAFGKRQGREFIWNDLLSLETGSLKLANGRVIEKTLYNRRTRQDEPALFVALTFERREVLDSSNIKPMNLIGVDRGENIPAVIALTDPEGCPLSRFKDSLGNPTHILRIGESYKEKQRTIQAKKEVEQRRAGGYSRKYASKAKNLADDMVRNTARDLLYYAVTQDAMLIFENLSRGFGRQGKRTFMAERQYTRMEDWLTAKLAYEGLSKTYLSKTLAQYTSKTCSNCGFTITSADYDRVLEKLKKTATGWMTTINGKELKVEGQITYYNRYKRQNVVKDLSVELDRLSEESVNNDISSWTKGRSGEALSLLKKRFSHRPVQEKFVCLNCGFETHADEQAALNIARSWLFLRSQEYKKYQTNKTTGNTDKRAFVETWQSFYRKKLKEVWKPAV

SEQ ID NO: 29 - protein, 978 aa, synthetic construct
QEIKRINKIRRRLVKDSNTKKAGKTGPMKTLLVRVMTPDLRERLENLRKKPENIPQPISNTSRANLNKLLTDYTEMKKAILHVYWEEFQKDPVGLMSRVAQPASKKIDQNKLKPEMDEKGNLTTAGFACSQCGQPLFVYKLEQVSEKGKAYTNYFGRCNVAEHEKLILLAQLKPEKDSDEAVTYSLGKFGQRALDFYSIHVTKESTHPVKPLAQIAGNRYASGPVGKALSDACMGTIASFLSKYQDIIIEHQKVVKGNQKRLESLRELAGKENLEYPSVTLPPQPHTKEGVDAYNEVIARVRMWVNLNLWQKLKLSRDDAKPLLRLKGFPSFPLVERQANEVDWWDMVCNVKKLINEKKEDGKVFWQNLAGYKRQEALRPYLSSEEDRKKGKKFARYQLGDLLLHLEKKHGEDWGKVYDEAWERIDKKVEGLSKHIKLEEERRSEDAQSKAALTDWLRAKASFVIEGLKEADKDEFCRCELKLQKWYGDLRGKPFAIEAENSILDISGFSKQYNCAFIWQKDGVKKLNLYLIINYFKGGKLRFKKIKPEAFEANRFYTVINKKSGEIVPMEVNFNFDDPNLIILPLAFGKRQGREFIWNDLLSLETGSLKLANGRVIEKTLYNRRTRQDEPALFVALTFERREVLDSSNIKPMNLIGVDRGENIPAVIALTDPEGCPLSRFKDSLGNPTHILRIGESYKEKQRTIQAKKEVEQRRAGGYSRKYASKAKNLADDMVRNTARDLLYYAVTQDAMLIFENLSRGFGRQGKRTFMAERQYTRMEDWLTAKLAYEGLSKTYLSKTLAQYTSKTCSNCGFTIHTSADYDRVLEKLKKTATGWMTTINGKELKVEGQITYYNRYKRQNVVKDLSVELDRLSEESVNNDISSWTKGRSGEALSLLKKRFSHRPVQEKFVCLNCGFETHADEQAALNIARSWLFLRSQEYKKYQTNKTTGNTDKRAFVETWQSFYRKKLKEVWKPAV

SEQ ID NO: 30 - protein, 977 aa, synthetic construct
QEIKRINKIRRRLVKDSNTKKAGKTGPMKTLLVRVMTPDLRERLENLRKKPENIPQPISNTSRANLNKLLTDYTEMKKAILHVYWEEFQKDPVGLMSRVAQPASKKIDQNKLKPEMDEKGNLTTAGFACSQCGQPLFVYKLEQVSEKGKAYTNYFGRCNVAEHEKLILLAQLKPEKDSDEAVTYSLGKFGQRALDFYSIHVTKESTHPVKPLAQIAGNRYASGPVGKALSDACMGTIASFLSKYQDIIIEHQKVVKGNQKRLESLRELAGKENLEYPSVTLPPQPHTKEGVDAYNEVIARVRMWVNHNLWQKLKLSRDDAKPLLRLKGFPSFPLVERQANEVDWWDMVCNVKKLINEKKEDGKVFWQNLAGYKRQEALRPYLSSEEDRKKGKKFARYQLGDLLLHLEKKHGEDWGKVYDEAWERIDKKVEGLSKHIKLEEERRSEDAQSKAALTDWLRAKASFVIEGLKEADKDEFCRCELKLQKWYGDLRGKPFAIEAENSILDISGFSKQYNCAFIWQKDGVKKLNLYLIINYFKGGKLRFKKIKPEAFEANRFYTVINKKSGEIVPMEVNFNFDDPNLIILPLAFGKRQGREFIWNDLLSLETGSLKLANGRVIEKTLYNRRTRQDEPALFVALTFERREVLDSSNIKPMNLIGVDRGENIPAVIALTDPEGCPLSRFKDSLGNPTHILRIGESYKEKQRTIQAKKEVEQRRAGGYSRKYASKAKNLADDMVRNTARDLLYYAVTQDAMLIFENLSRGFGRQGKRTFMAERQYTRMEDWLTAKLAYEGLSKTYLSKTLAQYTSKTCSNCGFTITSADYDRVLEKLKKTATGWMTTINGKELKVEGQITYYNRYKRQNVVKDLSVELDRLSEESVNNDISSWTKGRSGEALSLLKKRFSHRPVQEKFVCLNCGFETHADEQAALNIARSWLFLRSQEYKKYQTNKTTGNTDKRAFVETWQSFYRKKLKEVWKPAV

SEQ ID NO: 31 - protein, 978 aa, synthetic construct
QEIKRINKIRRRLVKDSNTKKAGKTGPMKTLLVRVMTPDLRERLENLRKKPENIPQPISNTSRANLNKLLTDYTEMKKAILHVYWEEFQKDPVGLMSRVAQPASKKIDQNKLKPEMDEKGNLTTAGFACSQCGQPLFVYKLEQVSEKGKAYTNYFGRCNVAEHEKLILLAQLKPEKDSDEAVTYSLGKFGQRALDFYSIHVTKESTHPVKPLAQIAGNRYASGAPVGKALSDACMGTIASFLSKYQDIIIEHQKVVKGNQKRLESLRELAGKENLEYPSVTLPPQPHTKEGVDAYNEVIARVRMWVNLNLWQKLKLSRDDAKPLLRLKGFPSFPLVERQANEVDWWDMVCNVKKLINEKKEDGKVFWQNLAGYKRQEALRPYLSSEEDRKKGKKFARYQLGDLLLHLEKKHGEDWGKVYDEAWERIDKKVEGLSKHIKLEEERRSEDAQSKAALTDWLRAKASFVIEGLKEADKDEFCRCELKLQKWYGDLRGKPFAIEAENSILDISGFSKQYNCAFIWQKDGVKKLNLYLIINYFKGGKLRFKKIKPEAFEANRFYTVINKKSGEIVPMEVNFNFDDPNLIILPLAFGKRQGREFIWNDLLSLETGSLKLANGRVIEKTLYNRRTRQDEPALFVALTFERREVLDSSNIKPMNLIGVDRGENIPAVIALTDPEGCPLSRFKDSLGNPTHILRIGESYKEKQRTIQAKKEVEQRRAGGYSRKYASKAKNLADDMVRNTARDLLYYAVTQDAMLIFENLSRGFGRQGKRTFMAERQYTRMEDWLTAKLAYEGLSKTYLSKTLAQYTSKTCSNCGFTITSADYDRVLEKLKKTATGWMTTINGKELKVEGQITYYNRYKRQNVVKDLSVELDRLSEESVNNDISSWTKGRSGEALSLLKKRFSHRPVQEKFVCLNCGFETHADEQAALNIARSWLFLRSQEYKKYQTNKTTGNTDKRAFVETWQSFYRKKLKEVWKPAV

SEQ ID NO: 32 - protein, 978 aa, synthetic construct
RQEIKRINKIRRRLVKDSNTKKAGKTGPMKTLLVRVMTPDLRERLENLRKKPENIPQPISNTSRANLNKLLTDYTEMKKAILHVYWEEFQKDPVGLMSRVAQPASKKIDQNKLKPEMDEKGNLTTAGFACSQCGQPLFVYKLEQVSEKGKAYTNYFGRCNVAEHEKLILLAQLKPEKDSDEAVTYSLGKFGQRALDFYSIHVTKESTHPVKPLAQIAGNRYASGPVGKALSDACMGTIASFLSKYQDIIIEHQKVVKGNQKRLESLRELAGKENLEYPSVTLPPQPHTKEGVDAYNEVIARVRMWVNLNLWQKLKLSRDDAKPLLRLKGFPSFPLVERQANEVDWWDMVCNVKKLINEKKEDGKVFWQNLAGYKRQEALRPYLSSEEDRKKGKKFARYQLGDLLLHLEKKHGEDWGKVYDEAWERIDKKVEGLSKHIKLEEERRSEDAQSKAALTDWLRAKASFVIEGLKEADKDEFCRCELKLQKWYGDLRGKPFAIEAENSILDISGFSKQYNCAFIWQKDGVKKLNLYLIINYFKGGKLRFKKIKPEAFEANRFYTVINKKSGEIVPMEVNFNFDDPNLIILPLAFGKRQGREFIWNDLLSLETGSLKLANGRVIEKTLYNRRTRQDEPALFVALTFERREVLDSSNIKPMNLIGVDRGENIPAVIALTDPEGCPLSRFKDSLGNPTHILRIGESYKEKQRTIQAKKEVEQRRAGGYSRKYASKAKNLADDMVRNTARDLLYYAVTQDAMLIFENLSRGFGRQGKRTFMAERQYTRMEDWLTAKLAYEGLSKTYLSKTLAQYTSKTCSNCGFTITSADYDRVLEKLKKTATGWMTTINGKELKVEGQITYYNRYKRQNVVKDLSVELDRLSEESVNNDISSWTKGRSGEALSLLKKRFSHRPVQEKFVCLNCGFETHADEQAALNIARSWLFLRSQEYKKYQTNKTTGNTDKRAFVETWQSFYRKKLKEVWKPAV

SEQ ID NO: 33 - protein, 978 aa, synthetic construct
QEIKRINKIRRRLVKDSNTKKAGKTGPMKTLLVRVMTPDLRERLENLRKKPENIPQPISNTSRANLNKLLTDYTEMKKAILHVYWEEFQKDPVGLMSRVAQPASKKIDQNKLKPEMDEKGNLTTAGFACSQCGQPLFVYKLEQVSEKGKAYTNYFGRCNVAEHEKLILLAQLKPEKDSDEAVTYSLGKFGQRALDFYSIHVTKESTHPVKPLAQIAGNRYASGPVGKALSDACMGTIASFLSKYQDIIIEHQKVVKGNQKRLESLRELAGKENLEYPSVTLPPQPHTKEGVDAYNEVIARVRMWVNLNLWQKLKLSRDDAKPLLRLKGFPSFPLVERQANEVDWWDMVCNVKKLINEKKEDGKVFWQNLAGYKRQEALRPYLSSEEDRKKGKKFARYQLGDLLLHLEKKHGEDWGKVYDEAWERIDKKVEGLSKHIKLEEERRSEDAQSKAALTDWLRAKASFVIEGLKEADKDEFCRCELKLQKWYGDLRGKPFAIEAENSILDISGFSKQYNCAFIWQKDGVKKLNLYLIINYFKGGKLRFKKIKPEAFEANRFYTVINKKSGEIVPMEVNFNFDDPNLIILPLAFGKRQGREFIWNDLLSLETGSLKLANGRVIEKTLYNRRTRQDEPALFVALTFERREVLDSSNIKPMNLIGVDRGENIPAVIALTDPEGCPLSRFKDSLGNPTHIQLRIGESYKEKQRTIQAKKEVEQRRAGGYSRKYASKAKNLADDMVRNTARDLLYYAVTQDAMLIFENLSRGFGRQGKRTFMAERQYTRMEDWLTAKLAYEGLSKTYLSKTLAQYTSKTCSNCGFTITSADYDRVLEKLKKTATGWMTTINGKELKVEGQITYYNRYKRQNVVKDLSVELDRLSEESVNNDISSWTKGRSGEALSLLKKRFSHRPVQEKFVCLNCGFETHADEQAALNIARSWLFLRSQEYKKYQTNKTTGNTDKRAFVETWQSFYRKKLKEVWKPAV

SEQ ID NO: 34 - protein, 977 aa, synthetic construct
QEIKRINKIRRRLVKDSNTKKAGKTGPMKTLLVRVMTPDLRERLENLRKKPENIPQPISNTSRANLNKLLTDYTEMKKAILHVYWEEFQKDPVGLMSRVAQPASKKIDQNKLKPEMDEKGNLTTAGFACSQCGQPLFVYKLEQVSEKGKAYTNYFGRCNVAEHEKLILLAQLKPEKDSDEAVTYSLGKFGQRALDFYSIHVTKESTHPVKPLAQIAGNRYASGPVGKALSDACMGTIASFLSKYQDIIIEHQKVVKGNQKRLESLRELAGKENLEYPSVTLPPQPHTKEGVDAYNEVIARVRMWVNLNLWQKLKLSRDDAKPLLRLKGFPSFPLVERQANEVDWWDMVCNVKKLINEKKEDGKVFWQNLAGYKRQEALRPYLSSEEDRKKGKKFARYQLGDLLLHLEKKHGEDWGKVYDEAWERIDKKVEGLSKHIKLEEERRSEDAQSKAALTDWLRAKASFVIEGLKEADKDEFCRCELKLQKWYGDLRGKPFAIEAENSILDISGFSKQYNCAFIWQKDGVKKLNLYLIINYFKGGKLRFKKIKPEAFEANRFYTVINKKSGEIVPMEVNFNFDDPNLIILPLAFGKRQGREFIWNDLLSLETGSLKLANGRVIEKTLYNRRTRQDEPALFVALTFERREVLDSSNIKPMNLIGVDRGENIPAVIALTDPEGCPLSRFKDSLGNPTHILRIGESYKEKQRTTQAKKEVEQRRAGGYSRKYASKAKNLADDMVRNTARDLLYYAVTQDAMLIFENLSRGFGRQGKRTFMAERQYTRMEDWLTAKLAYEGLSKTYLSKTLAQYTSKTCSNCGFTITSADYDRVLEKLKKTATGWMTTINGKELKVEGQITYYNRYKRQNVVKDLSVELDRLSEESVNNDISSWTKGRSGEALSLLKKRFSHRPVQEKFVCLNCGFETHADEQAALNIARSWLFLRSQEYKKYQTNKTTGNTDKRAFVETWQSFYRKKLKEVWKPAV

SEQ ID NO: 35 - protein, 977 aa, synthetic construct
QEIKRINKIRRRLVKDSNTKKAGKTGPMKTLLVRVMTPDLRERLENLRKKPENIPQPISNTSRANLNKLLTDYTEMKKAILHVYWEEFQKDPVGLMSRVAQPASKKIDQNKLKPEMDEKGNLTTAGFACSQCGQPLFVYKLEQVSEKGKAYTNYFGRCNVAEHEKLILLAQLKPEKDSDEAVTYSLGKFGQRALDFYSIHVTKESTHPVKPLAQIAGNRYASGPVGKALSDACMGTIASFLSKYQDIIIEHQKVVKGNQKRLESLRELAGKENLEYPSVTLPPQPHTKEGVDAYNEVIARVRMWVNLNLWQKLKLSRDDAKPLLRLKGFPSFPLVERQANEVDWWDMVCNVKKLINEKKEDGKVFWQNLAGYKRQEALRPYLSSEEDRKKGKKFARYQLGDLLLHLEKKHGEDWGKVYDEAWERIDKKVEGLSKHIKLEEERRSEDAQSKAALTDWLRAKASFVIEGLKEADKDEFCRCELKLQKWYGDLRGKPFAIEAENSILDISGFSKQYNCAFIWQKDGVKKLNLYLIINYFKGGKLRFKKIKPEAFEANRFYTVINKKSGEIVPMEVNFNFDDPNLIILPLAFGKRQGREFIWNDLLSLETGSLKLANGRVIEKTLYNRRTRQDEPALFVALTFERREVLDSSNIKPMNLIGVDRGENIPAVIALTDPEGCPLSRFKRSLGNPTHILRIGESYKEKQRTIQAKKEVEQRRAGGYSRKYASKAKNLADDMVRNTARDLLYYAVTQDAMLIFENLSRGFGRQGKRTFMAERQYTRMEDWLTAKLAYEGLSKTYLSKTLAQYTSKTCSNCGFTITSADYDRVLEKLKKTATGWMTTINGKELKVEGQITYYNRYKRQNVVKDLSVELDRLSEESVNNDISSWTKGRSGEALSLLKKRFSHRPVQEKFVCLNCGFETHADEQAALNIARSWLFLRSQEYKKYQTNKTTGNTDKRAFVETWQSFYRKKLKEVWKPAV

SEQ ID NO: 36 - protein, 977 aa, synthetic construct
QEIKRINKIRRRLVKDSNTKKAGKTYPMKTLLVRVMTPDLRERLENLRKKPENIPQPISNTSRANLNKLLTDYTEMKKAILHVYWEEFQKDPVGLMSRVAQPASKKIDQNKLKPEMDEKGNLTTAGFACSQCGQPLFVYKLEQVSEKGKAYTNYFGRCNVAEHEKLILLAQLKPEKDSDEAVTYSLGKFGQRALDFYSIHVTKESTHPVKPLAQIAGNRYASGPVGKALSDACMGTIASFLSKYQDIIIEHQKVVKGNQKRLESLRELAGKENLEYPSVTLPPQPHTKEGVDAYNEVIARVRMWVNLNLWQKLKLSRDDAKPLLRLKGFPSFPLVERQANEVDWWDMVCNVKKLINEKKEDGKVFWQNLAGYKRQEALRPYLSSEEDRKKGKKFARYQLGDLLLHLEKKHGEDWGKVYDEAWERIDKKVEGLSKHIKLEEERRSEDAQSKAALTDWLRAKASFVIEGLKEADKDEFCRCELKLQKWYGDLRGKPFAIEAENSILDISGFSKQYNCAFIWQKDGVKKLNLYLIINYFKGGKLRFKKIKPEAFEANRFYTVINKKSGEIVPMEVNFNFDDPNLIILPLAFGKRQGREFIWNDLLSLETGSLKLANGRVIEKTLYNRRTRQDEPALFVALTFERREVLDSSNIKPMNLIGVDRGENIPAVIALTDPEGCPLSRFKDSLGNPTHILRIGESYKEKQRTIQAKKEVEQRRAGGYSRKYASKAKNLADDMVRNTARDLLYYAVTQDAMLIFENLSRGFGRQGKRTFMAERQYTRMEDWLTAKLAYEGLSKTYLSKTLAQYTSKTCSNCGFTITSADYDRVLEKLKKTATGWMTTINGKELKVEGQITYYNRYKRQNVVKDLSVELDRLSEESVNNDISSWTKGRSGEALSLLKKRFSHRPVQEKFVCLNCGFETHADEQAALNIARSWLFLRSQEYKKYQTNKTTGNTDKRAFVETWQSFYRKKLKEVWKPAV

SEQ ID NO: 37 - protein, 977 aa, synthetic construct
QEIKRINKIRRRLVKDSNTKKAGKTGPMKTLLVRVMTPDLRERLENLRKKPENIPQPISNTSRANLNKLLTDYTEMKKAILHVYWEEFQKDPVGLMSRVAQPASKKIDQNKLKPEMDEKGNLTTAGFACSQCGQPLFVYKLEQVSEKGKAYTNYFGRCNVAEHEKLILLAQLKPEKDSDEAVTYSLGKFGQRALDFYSIHVTKESTHPVKPLAQIAGNRYASGPVGKALSDACMGTIASFLSKYQDIIIEHQKVVKGNQKRLESLRELAGKENLEYPSVTLPPQPHTKEGVDAYNEVIARVRMWVNLNLWQKLKLSRDDAKPLLRLKGFPSFPLVERQANEVDWWDMVCNVKKLINEKKEDGKVFWQNLAGYKRQEALRPYLSSEEDRKKGKKFARYQLGDLLLHLEKKHGEDWGKVYDEAWERIDKKVEGLSKHIKLEEERRSEDAQSKAALTDWLRAKASFVIEGLKEADKDEFCRCELKLQKWYGDLRGKPFAIEAENSILDISGFSKQYNCAFIWQKDGVKKLNLYLIINYFKGGKLRFKKIKPEAFEANRFYTVINKKSGEIVPMEVNFNFDDPNLIILPLAFGKRQGREFIWNDLLSLETGSLKLANGRVIEKTLYNRRTRQDEPALFVALTFERREVLDSSNIKPMNLIGVDRGENIPAVIALTDPEGCPLSRFKDSLGNPTHILRIGESYKEKQRTIQAKKEVEQRRAGGYSRKYASKAKNLADDMVRNTARDLLYYAVTQDAMLIFENLSRGFGRQGKRTFMAERQYTRMEDWLTAKLAYEGLSKTYLSKTLAQYTSKTCSNCGFTIHSADYDRVLEKLKKTATGWMTTINGKELKVEGQITYYNRYKRQNVVKDLSVELDRLSEESVNNDISSWTKGRSGEALSLLKKRFSHRPVQEKFVCLNCGFETHADEQAALNIARSWLFLRSQEYKKYQTNKTTGNTDKRAFVETWQSFYRKKLKEVWKPAV

SEQ ID NO: 38 - protein, 977 aa, synthetic construct
QEIKRINKIRRRLVKDSNTKKAGKTGPMKTLLVRVMTPDLRERLENLRKKPENIPQPISNTSRANLNKLLTDYTEMKKAILHVYWEEFQKDPVGLMSRVAQPASKKIDQNKLKPEMDEKGNLTTAGFACSQCGQPLFVYKLEQVSEKGKAYTNYFGRCNVAEHEKLILLAQLKPEKDSDEAVTYSLGKFGQRALDFYSIHVTKESTHPVKPLAQIAGNRYASGPVGKALSDACMGTIASFLSKYQDIIIEHQKVVKGNQKRLESLRELAGKENLEYPSVTLPPQPHTKEGVDAYNEVIARVRMWVNLNLWQKLKLSRDDAKPLLRLKGFPSFPLVERQANEVDWWDMVCNVKKLINEKKEDGKVFWQNLAGYKRQEALRPYLSSEEDRKKGKKFARYQLGDLLLHLEKKHGEDWGKVYDEAWERIDKKVEGLSKHIKLEEERRSEDAQSKAALTDWLRAKASFVIEGLKEADKDEFCRCELKLQKWYGDLRGKPFAIEAENSILDISGFSKQYNCAFIWQKDGVKKLNLYLIINYFKGGKLRFKKIKPEAFEANRFYTVINKKSGEIVPMEVNFNFDDPNLIILPLAFGKRQGREFIWNDLLSLETGSLKLANGRVIEKTLYNRRTRQDEPALFVALTFERREVLDSSNIKPMNLIGVDRGENIPAVIALTDPEGCPLSRFKDSLGNPTHILRIGESYKEKQRTIQAKKEVEQRRAGGYSRKYASKAKNLADDMVRNTARDLLYYAATQDAMLIFENLSRGFGRQGKRTFMAERQYTRMEDWLTAKLAYEGLSKTYLSKTLAQYTSKTCSNCGFTITSADYDRVLEKLKKTATGWMTTINGKELKVEGQITYYNRYKRQNVVKDLSVELDRLSEESVNNDISSWTKGRSGEALSLLKKRFSHRPVQEKFVCLNCGFETHADEQAALNIARSWLFLRSQEYKKYQTNKTTGNTDKRAFVETWQSFYRKKLKEVWKPAV

SEQ ID NO: 39 - protein, 977 aa, synthetic construct
QEIKRINKIRRRLVKDSNTKKAGKTGPMKTLLVRVMTPDLRERLENLRKKPENIPQPISNTSRANLNKLLTDYTEMKKAILHVYWEEFQKDPVGLMSRVAQPASKKIDQNKLKPEMDEKGNLTTAGFACSQCGQPLFVYKLEQVSEKGKAYTNYFGRCNVAEHEKLILLAQLKPEKDSDEAVTYSLGKFGQRALDFYSIHVTKESTHPVKPLAQIAGNRYASGPVGKALSDACMGTIASFLSKYQDIIIEHQKVVKGNQKRLESLRELAGKENLEYPSVTLPPQPHTKEGVDAYNEVIARVRMWVNLNLWQKLKLSRDDAKPLLRLKGFPSFPLVERQANEVDWWDMVCNVKKLINEKKEDGKVFWQNLAGYKRQEALRPYLSSEEDRKKGKKFARYQLGDLLLHLEKKHGEDWGKVYDEAWERIDKKVEGLSKHIKLEEERRSEDAQSKAALTDWLRAKASFVIEGLKEADKDEFCRCELKLQKWYGDLRGKPFAIEAENSILDISGFSKQYNCAFIWQKDGVKKLNLYLIINYFKGGKLRFKKIKPEAFEANRFYTVINKKSGEIVPMEVNFNFDDPNLIILPLAFGKRQGREFIWNDLLSLETGSLKLANGRVIEKTLYNRRTRQDEPALFVALTFERREVLDSSNIKPMNLIGVDRGENIPAVIALTDPEGCPLSRFKDSLGNPTHILRIGESYKEKQRTIQAAKEVEQRRAGGYSRKYASKAKNLADDMVRNTARDLLYYAVTQDAMLIFENLSRGFGRQGKRTFMAERQYTRMEDWLTAKLAYEGLSKTYLSKTLAQYTSKTCSNCGFTITSADYDRVLEKLKKTATGWMTTINGKELKVEGQITYYNRYKRQNVVKDLSVELDRLSEESVNNDISSWTKGRSGEALSLLKKRFSHRPVQEKFVCLNCGFETHADEQAALNIARSWLFLRSQEYKKYQTNKTTGNTDKRAFVETWQSFYRKKLKEVWKPAV

SEQ ID NO: 40 - protein, 978 aa, synthetic construct
QEIKRINKIRRRLVKDSNTKKAGKTRGPMKTLLVRVMTPDLRERLENLRKKPENIPQPISNTSRANLNKLLTDYTEMKKAILHVYWEEFQKDPVGLMSRVAQPASKKIDQNKLKPEMDEKGNLTTAGFACSQCGQPLFVYKLEQVSEKGKAYTNYFGRCNVAEHEKLILLAQLKPEKDSDEAVTYSLGKFGQRALDFYSIHVTKESTHPVKPLAQIAGNRYASGPVGKALSDACMGTIASFLSKYQDIIIEHQKVVKGNQKRLESLRELAGKENLEYPSVTLPPQPHTKEGVDAYNEVIARVRMWVNLNLWQKLKLSRDDAKPLLRLKGFPSFPLVERQANEVDWWDMVCNVKKLINEKKEDGKVFWQNLAGYKRQEALRPYLSSEEDRKKGKKFARYQLGDLLLHLEKKHGEDWGKVYDEAWERIDKKVEGLSKHIKLEEERRSEDAQSKAALTDWLRAKASFVIEGLKEADKDEFCRCELKLQKWYGDLRGKPFAIEAENSILDISGFSKQYNCAFIWQKDGVKKLNLYLIINYFKGGKLRFKKIKPEAFEANRFYTVINKKSGEIVPMEVNFNFDDPNLIILPLAFGKRQGREFIWNDLLSLETGSLKLANGRVIEKTLYNRRTRQDEPALFVALTFERREVLDSSNIKPMNLIGVDRGENIPAVIALTDPEGCPLSRFKDSLGNPTHILRIGESYKEKQRTIQAKKEVEQRRAGGYSRKYASKAKNLADDMVRNTARDLLYYAVTQDAMLIFENLSRGFGRQGKRTFMAERQYTRMEDWLTAKLAYEGLSKTYLSKTLAQYTSKTCSNCGFTITSADYDRVLEKLKKTATGWMTTINGKELKVEGQITYYNRYKRQNVVKDLSVELDRLSEESVNNDISSWTKGRSGEALSLLKKRFSHRPVQEKFVCLNCGFETHADEQAALNIARSWLFLRSQEYKKYQTNKTTGNTDKRAFVETWQSFYRKKLKEVWKPAV

SEQ ID NO: 41 - protein, 978 aa, synthetic construct
QEIKRINKIRRRLVKDSNTKKAGKTGPMKTLLVRVMTPDLRERLENLRKKPENIPQPISNTSRANLNKLLTDYTEMKKAILHVYWEEFQKDPVGLMSRVAQPASKKIDQNKLKPEMDEKGNLTTAGFACSQCGQPLFVYKLEQVSEKGKAYTNYFGRCNVAEHEKLILLAQLKPEKDSDEAVTYSLGKFGQRALDFYSIHVTKESTHPVKPLAQIAGNRYASYPVGKALSDACMGTIASFLSKYQDIIIEHQKVVKGNQKRLESLRELAGKENLEYPSVTLPPQPHTKEGVDAYNEVIARVRMWVNLNLWQKLKLSRDDAKPLLRLKGFPSFPLVERQANEVDWWDMVCNVKKLINEKKEDGKVFWQNLAGYKRQEALRPYLSSEEDRKKGKKFARYQLGDLLLHLEKKHGEDWGKVYDEAWERIDKKVEGLSKHIKLEEERRSEDAQSKAALTDWLRAKASFVIEGLKEADKDEFCRCELKLQKWYGDLRGKPFAIEAENSILDISGFSKQYNCAFIWQKDGVKKLNLYLIINYFKGGKLRFKKIKPEAFEANRFYTVINKKSGEIVPMEVNFNFDDPNLIILPLAFGKRQGREFIWNDLLSLETGSLKLANGRVIEKTLYNRRTRQDEPALFVALTFERREVLDSSNIKPMNLIGVDRGENIPAVIALTDPEGCPLSRFKDSLGNPTHILRIGESYKEKQRTIQAKKEVEQRRAGGYSRKYASKAKNLADDMVRNTARDLLYYAVTQDAMLIFENLSRGFGRQGKRTFMAERQYTRMEDWLTAKLAYEGLPSKTYLSKTLAQYTSKTCSNCGFTITSADYDRVLEKLKKTATGWMTTINGKELKVEGQITYYNRYKRQNVVKDLSVELDRLSEESVNNDISSWTKGRSGEALSLLKKRFSHRPVQEKFVCLNCGFETHADEQAALNIARSWLFLRSQEYKKYQTNKTTGNTDKRAFVETWQSFYRKKLKEVWKPAV

SEQ ID NO: 42 - protein, 978 aa, synthetic construct
QEIKRINKIRRRLVKDSNTKKAGKTGPMKTLLVRVMTPDLRERLENLRKKPENIPQPISNTSRANLNKLLTDYTEMKKAILHVYWEEFQKDPVGLMSRVAQPASKKIDQNKLKPEMDEKGNLTTAGFACSQCGQPLFVYKLEQVSEKGKAYTNYFGRCNVAEHEKLILLAQLKPEKDSDEAVTYSLGKFGQRALDFYSIHVTKESTHPVKPLAQIAGNRYASNPVGKALSDACMGTIASFLSKYQDIIIEHQKVVKGNQKRLESLRELAGKENLEYPSVTLPPQPHTKEGVDAYNEVIARVRMWVNLNLWQKLKLSRDDAKPLLRLKGFPSFPLVERQANEVDWWDMVCNVKKLINEKKEDGKVFWQNLAGYKRQEALRPYLSSEEDRKKGKKFARYQLGDLLLHLEKKHGEDWGKVYDEAWERIDKKVEGLSKHIKLEEERRSEDAQSKAALTDWLRAKASFVIEGLKEADKDEFCRCELKLQKWYGDLRGKPFAIEAENSILDISGFSKQYNCAFIWQKDGVKKLNLYLIINYFKGGKLRFKKIKPEAFEANRFYTVINKKSGEIVPMEVNFNFDDPNLIILPLAFGKRQGREFIWNDLLSLETGSLKLANGRVIEKTLYNRRTRQDEPALFVALTFERREVLDSSNIKPMNLIGVDRGENIPAVIALTDPEGCPLSRFKDSLGNPTHILRIGESYKEKQRTIQAKKEVEQRRAGGYSRKYASKAKNLADDMVRNTARDLLYYAVTQDAMLIFENLSRGFGRQGKRTFMAERQYTRMEDWLTAKLAYEGLPSKTYLSKTLAQYTSKTCSNCGFTITSADYDRVLEKLKKTATGWMTTINGKELKVEGQITYYNRYKRQNVVKDLSVELDRLSEESVNNDISSWTKGRSGEALSLLKKRFSHRPVQEKFVCLNCGFETHADEQAALNIARSWLFLRSQEYKKYQTNKTTGNTDKRAFVETWQSFYRKKLKEVWKPAV

SEQ ID NO: 43 - protein, 979 aa, synthetic construct
QEIKRINKIRRRLVKDSNTKKAGKTGPMKTLLVRVMTPDLRERLENLRKKPENIPQPISNTSRANLNKLLTDYTEMKKAILHVYWEEFQKDPVGLMSRVAQPASKKIDQNKLKPEMDEKGNLTTAGFACSQCGQPLFVYKLEQVSEKGKAYTNYFGRCNVAEHEKLILLAQLKPEKDSDEAVTYSLGKFGQRALDFYSIHVTKESTHPVKPLAQIAGNRYASGPVGKALSDACMGTIASFLSKYQDIIIEHQKVVKGNQKRLESLRELAGKENLEYPSVTLPPQPHTKEGVDAYNEVIARVRMWVNLNLWQKLKLSRDDAKPLLRLKGFPSFPLVERQANEVDWWDMVCNVKKLINEKKEDGKVFWQNLAGYKRQEALRPYLSSEEDRKKGKKFARYQLGDLLLHLEKKHGEDWGKVYDEAWERIDKKVEGLSKHIKLEEERRSEDAQSKAALTDWLRAKASFVIEGLKEADKDEFCRCELKLQKWYGDLRGKPFAIEAENSILDISGFSKQYNCAFIWQKDGVKKLNLYLIINYFKGWGKLRFKKIKPEAFEANRFYTVINKKSGEIVPMEVNFNFDDPNLIILPLAFGKRQGREFIWNDLLSLETGSLKLANGRVIEKTLYNRRTRQDEPALFVALTFERREVLDSSNIKPMNLIGVDRGENIPAVIALTDPEGCPLSRFKDSLGNPTHILRIGESYKEKQRTIQAKKEVEQRRAGGYSRKYASKAKNLADDMVRNTARDLLYYAVTQDAMLIFENLSRGFGRQGKRTFMAERQYTRMEDWLTAKLAYEGLPSKTYLSKTLAQYTSKTCSNCGFTITSADYDRVLEKLKKTATGWMTTINGKELKVEGQITYYNRYKRQNVVKDLSVELDRLSEESVNNDISSWTKGRSGEALSLLKKRFSHRPVQEKFVCLNCGFETHADEQAALNIARSWLFLRSQEYKKYQTNKTTGNTDKRAFVETWQSFYRKKLKEVWKPAV

SEQ ID NO: 44 - protein, 979 aa, synthetic construct
QEIKRINKIRRRLVKDSNTKKAGKTGPMKTLLVRVMTPDLRERLENLRKKPENIPQPISNTSRANLNKLLTDYTEMKKAILHVYWEEFQKDPVGLMSRVAQPASKKIDQNKLKPEMDEKGNLTTAGFACSQCGQPLFVYKLEQVSEKGKAYTNYFGRCNVAEHEKLILLAQLKPEKDSDEAVTYSLGKFGQRALDFYSIHVTKESTHPVKPLAQIAGNRYASGPVGKALSDACMGTIASFLSKYQDIIIEHQKVVKGNQKRLESLRELAGKENLEYPSVTLPPQPHTKEGVDAYNEVIARVRMWVNLNLWQKLKLSRDDAKPLLRLKGFPSFPLVERQANEVDWWDMVCNVKKLINEKKEDGKVFWQNLAGYKRQEALRPYLSSEEDRKKGKKFARYQLGDLLLHLEKKHGEDWGKVYDEAWERIDKKVEGLSKHIKLEEERRSEDAQSKAALTDWLRAKASFVIEGLKEADKDEFCRCELKLQKWYGDLRGKPFAIEAENSILDISGFSKQYNCAFIWQKDGVKKLNLYLIINYFKGYGKLRFKKIKPEAFEANRFYTVINKKSGEIVPMEVNFNFDDPNLIILPLAFGKRQGREFIWNDLLSLETGSLKLANGRVIEKTLYNRRTRQDEPALFVALTFERREVLDSSNIKPMNLIGVDRGENIPAVIALTDPEGCPLSRFKDSLGNPTHILRIGESYKEKQRTIQAKKEVEQRRAGGYSRKYASKAKNLADDMVRNTARDLLYYAVTQDAMLIFENLSRGFGRQGKRTFMAERQYTRMEDWLTAKLAYEGLPSKTYLSKTLAQYTSKTCSNCGFTITSADYDRVLEKLKKTATGWMTTINGKELKVEGQITYYNRYKRQNVVKDLSVELDRLSEESVNNDISSWTKGRSGEALSLLKKRFSHRPVQEKFVCLNCGFETHADEQAALNIARSWLFLRSQEYKKYQTNKTTGNTDKRAFVETWQSFYRKKLKEVWKPAV

SEQ ID NO: 45 - protein, 979 aa, synthetic construct
QEIKRINKIRRRLVKDSNTKKAGKTRGPMKTLLVRVMTPDLRERLENLRKKPENIPQPISNTSRANLNKLLTDYTEMKKAILHVYWEEFQKDPVGLMSRVAQPASKKIDQNKLKPEMDEKGNLTTAGFACSQCGQPLFVYKLEQVSEKGKAYTNYFGRCNVAEHEKLILLAQLKPEKDSDEAVTYSLGKFGQRALDFYSIHVTKESTHPVKPLAQIAGNRYASGPVGKALSDACMGTIASFLSKYQDIIIEHQKVVKGNQKRLESLRELAGKENLEYPSVTLPPQPHTKEGVDAYNEVIARVRMWVNLNLWQKLKLSRDDAKPLLRLKGFPSFPLVERQANEVDWWDMVCNVKKLINEKKEDGKVFWQNLAGYKRQEALRPYLSSEEDRKKGKKFARYQLGDLLLHLEKKHGEDWGKVYDEAWERIDKKVEGLSKHIKLEEERRSEDAQSKAALTDWLRAKASFVIEGLKEADKDEFCRCELKLQKWYGDLRGKPFAIEAENSILDISGFSKQYNCAFIWQKDGVKKLNLYLIINYFKGGKLRFKKIKPEAFEANRFYTVINKKSGEIVPMEVNFNFDDPNLIILPLAFGKRQGREFIWNDLLSLETGSLKLANGRVIEKTLYNRRTRQDEPALFVALTFERREVLDSSNIKPMNLIGVDRGENIPAVIALTDPEGCPLSRFKDSLGNPTHILRIGESYKEKQRTIQAKKEVEQRRAGGYSRKYASKAKNLADDMVRNTARDLLYYAVTQDAMLIFENLSRGFGRQGKRTFMAERQYTRMEDWLTAKLAYEGLPSKTYLSKTLAQYTSKTCSNCGFTITSADYDRVLEKLKKTATGWMTTINGKELKVEGQITYYNRYKRQNVVKDLSVELDRLSEESVNNDISSWTKGRSGEALSLLKKRFSHRPVQEKFVCLNCGFETHADEQAALNIARSWLFLRSQEYKKYQTNKTTGNTDKRAFVETWQSFYRKKLKEVWKPAV

SEQ ID NO: 46 - protein, 979 aa, synthetic construct
QEIKRINKIRRRLVKDSNTKKAGKTRGPMKTLLVRVMTPDLRERLENLRKKPENIPQPISNTSRANLNKLLTDYTEMKKAILHVYWEEFQKDPVGLMSRVAQPASKKIDQNKLKPEMDEKGNLTTAGFACSQCGQPLFVYKLEQVSEKGKAYTNYFGRCNVAEHEKLILLAQLKPEKDSDEAVTYSLGKFGQRALDFYSIHVTKESTHPVKPLAQIAGNRYASYPVGKALSDACMGTIASFLSKYQDIIIEHQKVVKGNQKRLESLRELAGKENLEYPSVTLPPQPHTKEGVDAYNEVIARVRMWVNLNLWQKLKLSRDDAKPLLRLKGFPSFPLVERQANEVDWWDMVCNVKKLINEKKEDGKVFWQNLAGYKRQEALRPYLSSEEDRKKGKKFARYQLGDLLLHLEKKHGEDWGKVYDEAWERIDKKVEGLSKHIKLEEERRSEDAQSKAALTDWLRAKASFVIEGLKEADKDEFCRCELKLQKWYGDLRGKPFAIEAENSILDISGFSKQYNCAFIWQKDGVKKLNLYLIINYFKGGKLRFKKIKPEAFEANRFYTVINKKSGEIVPMEVNFNFDDPNLIILPLAFGKRQGREFIWNDLLSLETGSLKLANGRVIEKTLYNRRTRQDEPALFVALTFERREVLDSSNIKPMNLIGVDRGENIPAVIALTDPEGCPLSRFKDSLGNPTHILRIGESYKEKQRTIQAKKEVEQRRAGGYSRKYASKAKNLADDMVRNTARDLLYYAVTQDAMLIFENLSRGFGRQGKRTFMAERQYTRMEDWLTAKLAYEGLPSKTYLSKTLAQYTSKTCSNCGFTITSADYDRVLEKLKKTATGWMTTINGKELKVEGQITYYNRYKRQNVVKDLSVELDRLSEESVNNDISSWTKGRSGEALSLLKKRFSHRPVQEKFVCLNCGFETHADEQAALNIARSWLFLRSQEYKKYQTNKTTGNTDKRAFVETWQSFYRKKLKEVWKPAV

SEQ ID NO: 47 - protein, 978 aa, synthetic construct
QEIKRINKIRRRLVKDSNTKKAGKTGPMKTLLVRVMTPDLRERLENLRKKPENIPQPISNTSRANLNKLLTDYTEMKKAILHVYWEEFQKDPVGLMSRVAQPASKKIDQNKLKPEMDEKGNLTTAGFACSQCGQPLFVYKLEQVSEKGKAYTNYFGRCNVAEHEKLILLAQLKPEKDSDEAVTYSLGKFGQRALDFYSIHVTKESTHPVKPLAQIAGNRYASHPVGKALSDACMGTIASFLSKYQDIIIEHQKVVKGNQKRLESLRELAGKENLEYPSVTLPPQPHTKEGVDAYNEVIARVRMWVNLNLWQKLKLSRDDAKPLLRLKGFPSFPLVERQANEVDWWDMVCNVKKLINEKKEDGKVFWQNLAGYKRQEALRPYLSSEEDRKKGKKFARYQLGDLLLHLEKKHGEDWGKVYDEAWERIDKKVEGLSKHIKLEEERRSEDAQSKAALTDWLRAKASFVIEGLKEADKDEFCRCELKLQKWYGDLRGKPFAIEAENSILDISGFSKQYNCAFIWQKDGVKKLNLYLIINYFKGGKLRFKKIKPEAFEANRFYTVINKKSGEIVPMEVNFNFDDPNLIILPLAFGKRQGREFIWNDLLSLETGSLKLANGRVIEKTLYNRRTRQDEPALFVALTFERREVLDSSNIKPMNLIGVDRGENIPAVIALTDPEGCPLSRFKDSLGNPTHILRIGESYKEKQRTIQAKKEVEQRRAGGYSRKYASKAKNLADDMVRNTARDLLYYAVTQDAMLIFENLSRGFGRQGKRTFMAERQYTRMEDWLTAKLAYEGLPSKTYLSKTLAQYTSKTCSNCGFTITSADYDRVLEKLKKTATGWMTTINGKELKVEGQITYYNRYKRQNVVKDLSVELDRLSEESVNNDISSWTKGRSGEALSLLKKRFSHRPVQEKFVCLNCGFETHADEQAALNIARSWLFLRSQEYKKYQTNKTTGNTDKRAFVETWQSFYRKKLKEVWKPAV

SEQ ID NO: 48 - protein, 978 aa, synthetic construct
QEIKRINKIRRRLVKDSNTKKAGKTGPMKTLLVRVMTPDLRERLENLRKKPENIPQPISNTSRANLNKLLTDYTEMKKAILHVYWEEFQKDPVGLMSRVAQPASKKIDQNKLKPEMDEKGNLTTAGFACSQCGQPLFVYKLEQVSEKGKAYTNYFGRCNVAEHEKLILLAQLKPEKDSDEAVTYSLGKFGQRALDFYSIHVTKESTHPVKPLAQIAGNRYASSPVGKALSDACMGTIASFLSKYQDIIIEHQKVVKGNQKRLESLRELAGKENLEYPSVTLPPQPHTKEGVDAYNEVIARVRMWVNLNLWQKLKLSRDDAKPLLRLKGFPSFPLVERQANEVDWWDMVCNVKKLINEKKEDGKVFWQNLAGYKRQEALRPYLSSEEDRKKGKKFARYQLGDLLLHLEKKHGEDWGKVYDEAWERIDKKVEGLSKHIKLEEERRSEDAQSKAALTDWLRAKASFVIEGLKEADKDEFCRCELKLQKWYGDLRGKPFAIEAENSILDISGFSKQYNCAFIWQKDGVKKLNLYLIINYFKGGKLRFKKIKPEAFEANRFYTVINKKSGEIVPMEVNFNFDDPNLIILPLAFGKRQGREFIWNDLLSLETGSLKLANGRVIEKTLYNRRTRQDEPALFVALTFERREVLDSSNIKPMNLIGVDRGENIPAVIALTDPEGCPLSRFKDSLGNPTHILRIGESYKEKQRTIQAKKEVEQRRAGGYSRKYASKAKNLADDMVRNTARDLLYYAVTQDAMLIFENLSRGFGRQGKRTFMAERQYTRMEDWLTAKLAYEGLPSKTYLSKTLAQYTSKTCSNCGFTITSADYDRVLEKLKKTATGWMTTINGKELKVEGQITYYNRYKRQNVVKDLSVELDRLSEESVNNDISSWTKGRSGEALSLLKKRFSHRPVQEKFVCLNCGFETHADEQAALNIARSWLFLRSQEYKKYQTNKTTGNTDKRAFVETWQSFYRKKLKEVWKPAV

SEQ ID NO: 49 - protein, 978 aa, synthetic construct
QEIKRINKIRRRLVKDSNTKKAGKTGPMKTLLVRVMTPDLRERLENLRKKPENIPQPISNTSRANLNKLLTDYTEMKKAILHVYWEEFQKDPVGLMSRVAQPASKKIDQNKLKPEMDEKGNLTTAGFACSQCGQPLFVYKLEQVSEKGKAYTNYFGRCNVAEHEKLILLAQLKPEKDSDEAVTYSLGKFGQRALDFYSIHVTKESTHPVKPLAQIAGNRYASTPVGKALSDACMGTIASFLSKYQDIIIEHQKVVKGNQKRLESLRELAGKENLEYPSVTLPPQPHTKEGVDAYNEVIARVRMWVNLNLWQKLKLSRDDAKPLLRLKGFPSFPLVERQANEVDWWDMVCNVKKLINEKKEDGKVFWQNLAGYKRQEALRPYLSSEEDRKKGKKFARYQLGDLLLHLEKKHGEDWGKVYDEAWERIDKKVEGLSKHIKLEEERRSEDAQSKAALTDWLRAKASFVIEGLKEADKDEFCRCELKLQKWYGDLRGKPFAIEAENSILDISGFSKQYNCAFIWQKDGVKKLNLYLIINYFKGGKLRFKKIKPEAFEANRFYTVINKKSGEIVPMEVNFNFDDPNLIILPLAFGKRQGREFIWNDLLSLETGSLKLANGRVIEKTLYNRRTRQDEPALFVALTFERREVLDSSNIKPMNLIGVDRGENIPAVIALTDPEGCPLSRFKDSLGNPTHILRIGESYKEKQRTIQAKKEVEQRRAGGYSRKYASKAKNLADDMVRNTARDLLYYAVTQDAMLIFENLSRGFGRQGKRTFMAERQYTRMEDWLTAKLAYEGLPSKTYLSKTLAQYTSKTCSNCGFTITSADYDRVLEKLKKTATGWMTTINGKELKVEGQITYYNRYKRQNVVKDLSVELDRLSEESVNNDISSWTKGRSGEALSLLKKRFSHRPVQEKFVCLNCGFETHADEQAALNIARSWLFLRSQEYKKYQTNKTTGNTDKRAFVETWQSFYRKKLKEVWKPAV

SEQ ID NO: 50 - protein, 978 aa, synthetic construct
QEIKRINKIRRRLVKDSNTKKAGKTGPMKTLLVRVMTPDLRERLENLRKKPENIPQPISNTSRANLNKLLTDYTEMKKAILHVYWEEFQKDPVGLMSRVAQPASKKIDQNKLKPEMDEKGNLTTAGFACSQCGQPLFVYKLEQVSEKGKAYTNYFGRCNVAEHEKLILLAQLKPEKDSDEAVTYSLGKFGQRALDFYSIHVTKESTHPVKPLAQIAGNRYASAPVGKALSDACMGTIASFLSKYQDIIIEHQKVVKGNQKRLESLRELAGKENLEYPSVTLPPQPHTKEGVDAYNEVIARVRMWVNLNLWQKLKLSRDDAKPLLRLKGFPSFPLVERQANEVDWWDMVCNVKKLINEKKEDGKVFWQNLAGYKRQEALRPYLSSEEDRKKGKKFARYQLGDLLLHLEKKHGEDWGKVYDEAWERIDKKVEGLSKHIKLEEERRSEDAQSKAALTDWLRAKASFVIEGLKEADKDEFCRCELKLQKWYGDLRGKPFAIEAENSILDISGFSKQYNCAFIWQKDGVKKLNLYLIINYFKGGKLRFKKIKPEAFEANRFYTVINKKSGEIVPMEVNFNFDDPNLIILPLAFGKRQGREFIWNDLLSLETGSLKLANGRVIEKTLYNRRTRQDEPALFVALTFERREVLDSSNIKPMNLIGVDRGENIPAVIALTDPEGCPLSRFKDSLGNPTHILRIGESYKEKQRTIQAKKEVEQRRAGGYSRKYASKAKNLADDMVRNTARDLLYYAVTQDAMLIFENLSRGFGRQGKRTFMAERQYTRMEDWLTAKLAYEGLPSKTYLSKTLAQYTSKTCSNCGFTITSADYDRVLEKLKKTATGWMTTINGKELKVEGQITYYNRYKRQNVVKDLSVELDRLSEESVNNDISSWTKGRSGEALSLLKKRFSHRPVQEKFVCLNCGFETHADEQAALNIARSWLFLRSQEYKKYQTNKTTGNTDKRAFVETWQSFYRKKLKEVWKPAV

SEQ ID NO: 51 - protein, 978 aa, synthetic construct
QEIKRINKIRRRLVKDSNTKKAGKTGPMKTLLVRVMTPDLRERLENLRKKPENIPQPISNTSRANLNKLLTDYTEMKKAILHVYWEEFQKDPVGLMSRVAQPASKKIDQNKLKPEMDEKGNLTTAGFACSQCGQPLFVYKLEQVSEKGKAYTNYFGRCNVAEHEKLILLAQLKPEKDSDEAVTYSLGKFGQRALDFYSIHVTKESTHPVKPLAQIAGNRYASVPVGKALSDACMGTIASFLSKYQDIIIEHQKVVKGNQKRLESLRELAGKENLEYPSVTLPPQPHTKEGVDAYNEVIARVRMWVNLNLWQKLKLSRDDAKPLLRLKGFPSFPLVERQANEVDWWDMVCNVKKLINEKKEDGKVFWQNLAGYKRQEALRPYLSSEEDRKKGKKFARYQLGDLLLHLEKKHGEDWGKVYDEAWERIDKKVEGLSKHIKLEEERRSEDAQSKAALTDWLRAKASFVIEGLKEADKDEFCRCELKLQKWYGDLRGKPFAIEAENSILDISGFSKQYNCAFIWQKDGVKKLNLYLIINYFKGGKLRFKKIKPEAFEANRFYTVINKKSGEIVPMEVNFNFDDPNLIILPLAFGKRQGREFIWNDLLSLETGSLKLANGRVIEKTLYNRRTRQDEPALFVALTFERREVLDSSNIKPMNLIGVDRGENIPAVIALTDPEGCPLSRFKDSLGNPTHILRIGESYKEKQRTIQAKKEVEQRRAGGYSRKYASKAKNLADDMVRNTARDLLYYAVTQDAMLIFENLSRGFGRQGKRTFMAERQYTRMEDWLTAKLAYEGLPSKTYLSKTLAQYTSKTCSNCGFTITSADYDRVLEKLKKTATGWMTTINGKELKVEGQITYYNRYKRQNVVKDLSVELDRLSEESVNNDISSWTKGRSGEALSLLKKRFSHRPVQEKFVCLNCGFETHADEQAALNIARSWLFLRSQEYKKYQTNKTTGNTDKRAFVETWQSFYRKKLKEVWKPAV

SEQ ID NO: 52 - protein, 978 aa, synthetic construct
QEIKRINKIRRRLVKDSNTKKAGKTGPMKTLLVRVMTPDLRERLENLRKKPENIPQPISNTSRANLNKLLTDYTEMKKAILHVYWEEFQKDPVGLMSRVAQPASKKIDQNKLKPEMDEKGNLTTAGFACSQCGQPLFVYKLEQVSEKGKAYTNYFGRCNVAEHEKLILLAQLKPEKDSDEAVTYSLGKFGQRALDFYSIHVTKESTHPVKPLAQIAGNRYASGPVGKALSLACMGTIASFLSKYQDIIIEHQKVVKGNQKRLESLRELAGKENLEYPSVTLPPQPHTKEGVDAYNEVIARVRMWVNLNLWQKLKLSRDDAKPLLRLKGFPSFPLVERQANEVDWWDMVCNVKKLINEKKEDGKVFWQNLAGYKRQEALRPYLSSEEDRKKGKKFARYQLGDLLLHLEKKHGEDWGKVYDEAWERIDKKVEGLSKHIKLEEERRSEDAQSKAALTDWLRAKASFVIEGLKEADKDEFCRCELKLQKWYGDLRGKPFAIEAENSILDISGFSKQYNCAFIWQKDGVKKLNLYLIINYFKGGKLRFKKIKPEAFEANRFYTVINKKSGEIVPMEVNFNFDDPNLIILPLAFGKRQGREFIWNDLLSLETGSLKLANGRVIEKTLYNRRTRQDEPALFVALTFERREVLDSSNIKPMNLIGVDRGENIPAVIALTDPEGCPLSRFKDSLGNPTHILRIGESYKEKQRTIQAKKEVEQRRAGGYSRKYASKAKNLADDMVRNTARDLLYYAVTQDAMLIFENLSRGFGRQGKRTFMAERQYTRMEDWLTAKLAYEGLPSKTYLSKTLAQYTSKTCSNCGFTITSADYDRVLEKLKKTATGWMTTINGKELKVEGQITYYNRYKRQNVVKDLSVELDRLSEESVNNDISSWTKGRSGEALSLLKKRFSHRPVQEKFVCLNCGFETHADEQAALNIARSWLFLRSQEYKKYQTNKTTGNTDKRAFVETWQSFYRKKLKEVWKPAV

SEQ ID NO: 53 - protein, 978 aa, synthetic construct
QEIKRINKIRRRLVKDSNTKKAGKTGPMKTLLVRVMTPDLRERLENLRKKPENIPQPISNTSRANLNKLLTDYTEMKKAILHVYWEEFQKDPVGLMSRVAQPASKKIDQNKLKPEMDEKGNLTTAGFACSQCGQPLFVYKLEQVSEKGKAYTNYFGRCNVAEHEKLILLAQLKPEKDSDEAVTYSLGKFGQRALDFYSIHVTKESTHPVKPLAQIAGNRYASGPVGKALSNACMGTIASFLSKYQDIIIEHQKVVKGNQKRLESLRELAGKENLEYPSVTLPPQPHTKEGVDAYNEVIARVRMWVNLNLWQKLKLSRDDAKPLLRLKGFPSFPLVERQANEVDWWDMVCNVKKLINEKKEDGKVFWQNLAGYKRQEALRPYLSSEEDRKKGKKFARYQLGDLLLHLEKKHGEDWGKVYDEAWERIDKKVEGLSKHIKLEEERRSEDAQSKAALTDWLRAKASFVIEGLKEADKDEFCRCELKLQKWYGDLRGKPFAIEAENSILDISGFSKQYNCAFIWQKDGVKKLNLYLIINYFKGGKLRFKKIKPEAFEANRFYTVINKKSGEIVPMEVNFNFDDPNLIILPLAFGKRQGREFIWNDLLSLETGSLKLANGRVIEKTLYNRRTRQDEPALFVALTFERREVLDSSNIKPMNLIGVDRGENIPAVIALTDPEGCPLSRFKDSLGNPTHILRIGESYKEKQRTIQAKKEVEQRRAGGYSRKYASKAKNLADDMVRNTARDLLYYAVTQDAMLIFENLSRGFGRQGKRTFMAERQYTRMEDWLTAKLAYEGLPSKTYLSKTLAQYTSKTCSNCGFTITSADYDRVLEKLKKTATGWMTTINGKELKVEGQITYYNRYKRQNVVKDLSVELDRLSEESVNNDISSWTKGRSGEALSLLKKRFSHRPVQEKFVCLNCGFETHADEQAALNIARSWLFLRSQEYKKYQTNKTTGNTDKRAFVETWQSFYRKKLKEVWKPAV

SEQ ID NO: 54 - protein, 978 aa, synthetic construct
QEIKRINKIRRRLVKDSNTKKAGKTGPMKTLLVRVMTPDLRERLENLRKKPENIPQPISNTSRANLNKLLTDYTEMKKAILHVYWEEFQKDPVGLMSRVAQPASKKIDQNKLKPEMDEKGNLTTAGFACSQCGQPLFVYKLEQVSEKGKAYTNYFGRCNVAEHEKLILLAQLKPEKDSDEAVTYSLGKFGQRALDFYSIHVTKESTHPVKPLAQIAGNRYASGPVGKALSQACMGTIASFLSKYQDIIIEHQKVVKGNQKRLESLRELAGKENLEYPSVTLPPQPHTKEGVDAYNEVIARVRMWVNLNLWQKLKLSRDDAKPLLRLKGFPSFPLVERQANEVDWWDMVCNVKKLINEKKEDGKVFWQNLAGYKRQEALRPYLSSEEDRKKGKKFARYQLGDLLLHLEKKHGEDWGKVYDEAWERIDKKVEGLSKHIKLEEERRSEDAQSKAALTDWLRAKASFVIEGLKEADKDEFCRCELKLQKWYGDLRGKPFAIEAENSILDISGFSKQYNCAFIWQKDGVKKLNLYLIINYFKGGKLRFKKIKPEAFEANRFYTVINKKSGEIVPMEVNFNFDDPNLIILPLAFGKRQGREFIWNDLLSLETGSLKLANGRVIEKTLYNRRTRQDEPALFVALTFERREVLDSSNIKPMNLIGVDRGENIPAVIALTDPEGCPLSRFKDSLGNPTHILRIGESYKEKQRTIQAKKEVEQRRAGGYSRKYASKAKNLADDMVRNTARDLLYYAVTQDAMLIFENLSRGFGRQGKRTFMAERQYTRMEDWLTAKLAYEGLPSKTYLSKTLAQYTSKTCSNCGFTITSADYDRVLEKLKKTATGWMTTINGKELKVEGQITYYNRYKRQNVVKDLSVELDRLSEESVNNDISSWTKGRSGEALSLLKKRFSHRPVQEKFVCLNCGFETHADEQAALNIARSWLFLRSQEYKKYQTNKTTGNTDKRAFVETWQSFYRKKLKEVWKPAV

SEQ ID NO: 55 - protein, 978 aa, synthetic construct
QEIKRINKIRRRLVKDSNTKKAGKTGPMKTLLVRVMTPDLRERLENLRKKPENIPQPISNTSRANLNKLLTDYTEMKKAILHVYWEEFQKDPVGLMSRVAQPASKKIDQNKLKPEMDEKGNLTTAGFACSQCGQPLFVYKLEQVSEKGKAYTNYFGRCNVAEHEKLILLAQLKPEKDSDEAVTYSLGKFGQRALDFYSIHVTKESTHPVKPLAQIAGNRYASGPVGKALSSACMGTIASFLSKYQDIIIEHQKVVKGNQKRLESLRELAGKENLEYPSVTLPPQPHTKEGVDAYNEVIARVRMWVNLNLWQKLKLSRDDAKPLLRLKGFPSFPLVERQANEVDWWDMVCNVKKLINEKKEDGKVFWQNLAGYKRQEALRPYLSSEEDRKKGKKFARYQLGDLLLHLEKKHGEDWGKVYDEAWERIDKKVEGLSKHIKLEEERRSEDAQSKAALTDWLRAKASFVIEGLKEADKDEFCRCELKLQKWYGDLRGKPFAIEAENSILDISGFSKQYNCAFIWQKDGVKKLNLYLIINYFKGGKLRFKKIKPEAFEANRFYTVINKKSGEIVPMEVNFNFDDPNLIILPLAFGKRQGREFIWNDLLSLETGSLKLANGRVIEKTLYNRRTRQDEPALFVALTFERREVLDSSNIKPMNLIGVDRGENIPAVIALTDPEGCPLSRFKDSLGNPTHILRIGESYKEKQRTIQAKKEVEQRRAGGYSRKYASKAKNLADDMVRNTARDLLYYAVTQDAMLIFENLSRGFGRQGKRTFMAERQYTRMEDWLTAKLAYEGLPSKTYLSKTLAQYTSKTCSNCGFTITSADYDRVLEKLKKTATGWMTTINGKELKVEGQITYYNRYKRQNVVKDLSVELDRLSEESVNNDISSWTKGRSGEALSLLKKRFSHRPVQEKFVCLNCGFETHADEQAALNIARSWLFLRSQEYKKYQTNKTTGNTDKRAFVETWQSFYRKKLKEVWKPAV

SEQ ID NO: 56 - protein, 978 aa, synthetic construct
QEIKRINKIRRRLVKDSNTKKAGKTGPMKTLLVRVMTPDLRERLENLRKKPENIPQPISNTSRANLNKLLTDYTEMKKAILHVYWEEFQKDPVGLMSRVAQPASKKIDQNKLKPEMDEKGNLTTAGFACSQCGQPLFVYKLEQVSEKGKAYTNYFGRCNVAEHEKLILLAQLKPEKDSDEAVTYSLGKFGQRALDFYSIHVTKESTHPVKPLAQIAGNRYASGPVGKALSAACMGTIASFLSKYQDIIIEHQKVVKGNQKRLESLRELAGKENLEYPSVTLPPQPHTKEGVDAYNEVIARVRMWVNLNLWQKLKLSRDDAKPLLRLKGFPSFPLVERQANEVDWWDMVCNVKKLINEKKEDGKVFWQNLAGYKRQEALRPYLSSEEDRKKGKKFARYQLGDLLLHLEKKHGEDWGKVYDEAWERIDKKVEGLSKHIKLEEERRSEDAQSKAALTDWLRAKASFVIEGLKEADKDEFCRCELKLQKWYGDLRGKPFAIEAENSILDISGFSKQYNCAFIWQKDGVKKLNLYLIINYFKGGKLRFKKIKPEAFEANRFYTVINKKSGEIVPMEVNFNFDDPNLIILPLAFGKRQGREFIWNDLLSLETGSLKLANGRVIEKTLYNRRTRQDEPALFVALTFERREVLDSSNIKPMNLIGVDRGENIPAVIALTDPEGCPLSRFKDSLGNPTHILRIGESYKEKQRTIQAKKEVEQRRAGGYSRKYASKAKNLADDMVRNTARDLLYYAVTQDAMLIFENLSRGFGRQGKRTFMAERQYTRMEDWLTAKLAYEGLPSKTYLSKTLAQYTSKTCSNCGFTITSADYDRVLEKLKKTATGWMTTINGKELKVEGQITYYNRYKRQNVVKDLSVELDRLSEESVNNDISSWTKGRSGEALSLLKKRFSHRPVQEKFVCLNCGFETHADEQAALNIARSWLFLRSQEYKKYQTNKTTGNTDKRAFVETWQSFYRKKLKEVWKPAV

SEQ ID NO: 57 - protein, 978 aa, synthetic construct
QEIKRINKIRRRLVKDSNTKKAGKTGPMKTLLVRVMTPDLRERLENLRKKPENIPQPISNTSRANLNKLLTDYTEMKKAILHVYWEEFQKDPVGLMSRVAQPASKKIDQNKLKPEMDEKGNLTTAGFACSQCGQPLFVYKLEQVSEKGKAYTNYFGRCNVAEHEKLILLAQLKPEKDSDEAVTYSLGKFGQRALDFYSIHVTKESTHPVKPLAQIAGNRYASGPVGKALSGACMGTIASFLSKYQDIIIEHQKVVKGNQKRLESLRELAGKENLEYPSVTLPPQPHTKEGVDAYNEVIARVRMWVNLNLWQKLKLSRDDAKPLLRLKGFPSFPLVERQANEVDWWDMVCNVKKLINEKKEDGKVFWQNLAGYKRQEALRPYLSSEEDRKKGKKFARYQLGDLLLHLEKKHGEDWGKVYDEAWERIDKKVEGLSKHIKLEEERRSEDAQSKAALTDWLRAKASFVIEGLKEADKDEFCRCELKLQKWYGDLRGKPFAIEAENSILDISGFSKQYNCAFIWQKDGVKKLNLYLIINYFKGGKLRFKKIKPEAFEANRFYTVINKKSGEIVPMEVNFNFDDPNLIILPLAFGKRQGREFIWNDLLSLETGSLKLANGRVIEKTLYNRRTRQDEPALFVALTFERREVLDSSNIKPMNLIGVDRGENIPAVIALTDPEGCPLSRFKDSLGNPTHILRIGESYKEKQRTIQAKKEVEQRRAGGYSRKYASKAKNLADDMVRNTARDLLYYAVTQDAMLIFENLSRGFGRQGKRTFMAERQYTRMEDWLTAKLAYEGLPSKTYLSKTLAQYTSKTCSNCGFTITSADYDRVLEKLKKTATGWMTTINGKELKVEGQITYYNRYKRQNVVKDLSVELDRLSEESVNNDISSWTKGRSGEALSLLKKRFSHRPVQEKFVCLNCGFETHADEQAALNIARSWLFLRSQEYKKYQTNKTTGNTDKRAFVETWQSFYRKKLKEVWKPAV

SEQ ID NO: 58 - protein, 978 aa, synthetic construct
QEIKRINKIRRRLVKDSNTKKAGKTGPMKTLLVRVMTPDLRERLENLRKKPENIPQPISNTSRANLNKLLTDYTEMKKAILHVYWEEFQKDPVGLMSRVAQPASKKIDQNKLKPEMDEKGNLTTAGFACSQCGQPLFVYKLEQVSEKGKAYTNYFGRCNVAEHEKLILLAQLKPEKDSDEAVTYSLGKFGQRALDFYSIHVTKESTHPVKPLAQIAGNRYASGPVGKALSTACMGTIASFLSKYQDIIIEHQKVVKGNQKRLESLRELAGKENLEYPSVTLPPQPHTKEGVDAYNEVIARVRMWVNLNLWQKLKLSRDDAKPLLRLKGFPSFPLVERQANEVDWWDMVCNVKKLINEKKEDGKVFWQNLAGYKRQEALRPYLSSEEDRKKGKKFARYQLGDLLLHLEKKHGEDWGKVYDEAWERIDKKVEGLSKHIKLEEERRSEDAQSKAALTDWLRAKASFVIEGLKEADKDEFCRCELKLQKWYGDLRGKPFAIEAENSILDISGFSKQYNCAFIWQKDGVKKLNLYLIINYFKGGKLRFKKIKPEAFEANRFYTVINKKSGEIVPMEVNFNFDDPNLIILPLAFGKRQGREFIWNDLLSLETGSLKLANGRVIEKTLYNRRTRQDEPALFVALTFERREVLDSSNIKPMNLIGVDRGENIPAVIALTDPEGCPLSRFKDSLGNPTHILRIGESYKEKQRTIQAKKEVEQRRAGGYSRKYASKAKNLADDMVRNTARDLLYYAVTQDAMLIFENLSRGFGRQGKRTFMAERQYTRMEDWLTAKLAYEGLPSKTYLSKTLAQYTSKTCSNCGFTITSADYDRVLEKLKKTATGWMTTINGKELKVEGQITYYNRYKRQNVVKDLSVELDRLSEESVNNDISSWTKGRSGEALSLLKKRFSHRPVQEKFVCLNCGFETHADEQAALNIARSWLFLRSQEYKKYQTNKTTGNTDKRAFVETWQSFYRKKLKEVWKPAV

SEQ ID NO: 59 - protein, 978 aa, synthetic construct
QEIKRINKIRRRLVKDSNTKKAGKRGPMKTLLVRVMTPDLRERLENLRKKPENIPQPISNTSRANLNKLLTDYTEMKKAILHVYWEEFQKDPVGLMSRVAQPASKKIDQNKLKPEMDEKGNLTTAGFACSQCGQPLFVYKLEQVSEKGKAYTNYFGRCNVAEHEKLILLAQLKPEKDSDEAVTYSLGKFGQRALDFYSIHVTKESTHPVKPLAQIAGNRYASGPVGKALSDACMGTIASFLSKYQDIIIEHQKVVKGNQKRLESLRELAGKENLEYPSVTLPPQPHTKEGVDAYNEVIARVRMWVNLNLWQKLKLSRDDAKPLLRLKGFPSFPLVERQANEVDWWDMVCNVKKLINEKKEDGKVFWQNLAGYKRQEALRPYLSSEEDRKKGKKFARYQLGDLLLHLEKKHGEDWGKVYDEAWERIDKKVEGLSKHIKLEEERRSEDAQSKAALTDWLRAKASFVIEGLKEADKDEFCRCELKLQKWYGDLRGKPFAIEAENSILDISGFSKQYNCAFIWQKDGVKKLNLYLIINYFKGGKLRFKKIKPEAFEANRFYTVINKKSGEIVPMEVNFNFDDPNLIILPLAFGKRQGREFIWNDLLSLETGSLKLANGRVIEKTLYNRRTRQDEPALFVALTFERREVLDSSNIKPMNLIGVDRGENIPAVIALTDPEGCPLSRFKDSLGNPTHILRIGESYKEKQRTIQAKKEVEQRRAGGYSRKYASKAKNLADDMVRNTARDLLYYAVTQDAMLIFENLSRGFGRQGKRTFMAERQYTRMEDWLTAKLAYEGLPSKTYLSKTLAQYTSKTCSNCGFTITSADYDRVLEKLKKTATGWMTTINGKELKVEGQITYYNRYKRQNVVKDLSVELDRLSEESVNNDISSWTKGRSGEALSLLKKRFSHRPVQEKFVCLNCGFETHADEQAALNIARSWLFLRSQEYKKYQTNKTTGNTDKRAFVETWQSFYRKKLKEVWKPAV

SEQ ID NO: 60 - protein, 978 aa, synthetic construct
QEIKRINKIRRRLVKDSNTKKAGKTGPMKTLLVRVMTPDLRERLENLRKKPENIPQPISNTSRANLNKLLTDYTEMKKAILHVYWEEFQKDPVGLMSRVAQPASKKIDQNKLKPEMDEKGNLTTAGFACSQCGQPLFVYKLEQVSEKGKAYTNYFGRCNVAEHEKLILLAQLKPEKDSDEAVTYSLGKFGQRALDFYSIHVTKESTHPVKPLAQIAGNRYASGPVGKALSDACMGTIASFLSKYQDIIIEHQKVVKGNQKRLESLRELAGKENLEYPSVTLPPQPHTKEGVDAYNEVIARVRMWVNLNLWQKLKLSRDDAKPLLRLKGFPSFPLVERQANEVDWWDMVCNVKKLINEKKEDGKVFWQNLAGYKRQEALRPYLSSEEDRKKGKKFARYQLHDLLLHLEKKHGEDWGKVYDEAWERIDKKVEGLSKHIKLEEERRSEDAQSKAALTDWLRAKASFVIEGLKEADKDEFCRCELKLQKWYGDLRGKPFAIEAENSILDISGFSKQYNCAFIWQKDGVKKLNLYLIINYFKGGKLRFKKIKPEAFEANRFYTVINKKSGEIVPMEVNFNFDDPNLIILPLAFGKRQGREFIWNDLLSLETGSLKLANGRVIEKTLYNRRTRQDEPALFVALTFERREVLDSSNIKPMNLIGVDRGENIPAVIALTDPEGCPLSRFKDSLGNPTHILRIGESYKEKQRTIQAKKEVEQRRAGGYSRKYASKAKNLADDMVRNTARDLLYYAVTQDAMLIFENLSRGFGRQGKRTFMAERQYTRMEDWLTAKLAYEGLPSKTYLSKTLAQYTSKTCSNCGFTITSADYDRVLEKLKKTATGWMTTINGKELKVEGQITYYNRYKRQNVVKDLSVELDRLSEESVNNDISSWTKGRSGEALSLLKKRFSHRPVQEKFVCLNCGFETHADEQAALNIARSWLFLRSQEYKKYQTNKTTGNTDKRAFVETWQSFYRKKLKEVWKPAV

SEQ ID NO: 61 - protein, 979 aa, synthetic construct
QEIKRINKIRRRLVKDSNTKKAGKTGPMKTLLVRVMTPDLRERLENLRKKPENIPQPISNTSRANLNKLLTDYTEMKKAILHVYWEEFQKDPVGLMSRVAQPASKKIDQNKLKPEMDEKEGNLTTAGFACSQCGQPLFVYKLEQVSEKGKAYTNYFGRCNVAEHEKLILLAQLKPEKDSDEAVTYSLGKFGQRALDFYSIHVTKESTHPVKPLAQIAGNRYASGPVGKALSDACMGTIASFLSKYQDIIIEHQKVVKGNQKRLESLRELAGKENLEYPSVTLPPQPHTKEGVDAYNEVIARVRMWVNLNLWQKLKLSRDDAKPLLRLKGFPSFPLVERQANEVDWWDMVCNVKKLINEKKEDGKVFWQNLAGYKRQEALRPYLSSEEDRKKGKKFARYQLGDLLLHLEKKHGEDWGKVYDEAWERIDKKVEGLSKHIKLEEERRSEDAQSKAALTDWLRAKASFVIEGLKEADKDEFCRCELKLQKWYGDLRGKPFAIEAENSILDISGFSKQYNCAFIWQKDGVKKLNLYLIINYFKGGKLRFKKIKPEAFEANRFYTVINKKSGEIVPMEVNFNFDDPNLIILPLAFGKRQGREFIWNDLLSLETGSLKLANGRVIEKTLYNRRTRQDEPALFVALTFERREVLDSSNIKPMNLIGVDRGENIPAVIALTDPEGCPLSRFKDSLGNPTHILRIGESYKEKQRTIQAKKEVEQRRAGGYSRKYASKAKNLADDMVRNTARDLLYYAVTQDAMLIFENLSRGFGRQGKRTFMAERQYTRMEDWLTAKLAYEGLPSKTYLSKTLAQYTSKTCSNCGFTITSADYDRVLEKLKKTATGWMTTINGKELKVEGQITYYNRYKRQNVVKDLSVELDRLSEESVNNDISSWTKGRSGEALSLLKKRFSHRPVQEKFVCLNCGFETHADEQAALNIARSWLFLRSQEYKKYQTNKTTGNTDKRAFVETWQSFYRKKLKEVWKPAV

SEQ ID NO: 62 - protein, 978 aa, synthetic construct
QEIKRINKIRRRLVKDSNTKKAGKTGPMKTLLVRVMTPDLRERLENLRKKPENIPQPISNTSRANLNKLLTDYTEMKKAILHVYWEEFQKDPVGLMSRVAQPASKKIDQNKLKPEMDEKGNLTTAGFACSQCGQPLFVYKLEQVSEKGKAYTNYFGRCNVAEHEKLILLAQLKPEKDSDEAVTYSLGKFGQRALDFYSIHVTKESTHPVKPLAQIAGNRYASGPVGKALSDACMGTIASFLSKYQDIIIEHQKVVKGNQKRLESLRELAGKENLEYPSVTLPPQPHTKEGVDAYNEVIARVRMWVNANLWQKLKLSRDDAKPLLRLKGFPSFPLVERQANEVDWWDMVCNVKKLINEKKEDGKVFWQNLAGYKRQEALRPYLSSEEDRKKGKKFARYQLGDLLLHLEKKHGEDWGKVYDEAWERIDKKVEGLSKHIKLEEERRSEDAQSKAALTDWLRAKASFVIEGLKEADKDEFCRCELKLQKWYGDLRGKPFAIEAENSILDISGFSKQYNCAFIWQKDGVKKLNLYLIINYFKGGKLRFKKIKPEAFEANRFYTVINKKSGEIVPMEVNFNFDDPNLIILPLAFGKRQGREFIWNDLLSLETGSLKLANGRVIEKTLYNRRTRQDEPALFVALTFERREVLDSSNIKPMNLIGVDRGENIPAVIALTDPEGCPLSRFKDSLGNPTHILRIGESYKEKQRTIQAKKEVEQRRAGGYSRKYASKAKNLADDMVRNTARDLLYYAVTQDAMLIFENLSRGFGRQGKRTFMAERQYTRMEDWLTAKLAYEGLPSKTYLSKTLAQYTSKTCSNCGFTITSADYDRVLEKLKKTATGWMTTINGKELKVEGQITYYNRYKRQNVVKDLSVELDRLSEESVNNDISSWTKGRSGEALSLLKKRFSHRPVQEKFVCLNCGFETHADEQAALNIARSWLFLRSQEYKKYQTNKTTGNTDKRAFVETWQSFYRKKLKEVWKPAV

SEQ ID NO: 63 - protein, 978 aa, synthetic construct
QEIKRINKIRRRLVKDSNTKKAGKTGPMKTLLVRVMTPDLRERLENLRKKPENIPQPISNTSRANLNKLLTDYTEMKKAILHVYWEEFQKDPVGLMSRVAQPASKKIDQNKLKPEMDEKGNLTTAGFACSQCGQPLFVYKLEQVSEKGKAYTNYFGRCNVAEHEKLILLAQLKPEKDSDEAVTYSLGKFGQRALDFYSIHVTKESTHPVKPLAQIAGNRYASGPVGKALSDACMGTIASFLSKYQDIIIEHQKVVKGNQKRLESLRELAGKENLEYPSVTLPPQPHTKEGVDAYNEVIARVRMWVNINLWQKLKLSRDDAKPLLRLKGFPSFPLVERQANEVDWWDMVCNVKKLINEKKEDGKVFWQNLAGYKRQEALRPYLSSEEDRKKGKKFARYQLGDLLLHLEKKHGEDWGKVYDEAWERIDKKVEGLSKHIKLEEERRSEDAQSKAALTDWLRAKASFVIEGLKEADKDEFCRCELKLQKWYGDLRGKPFAIEAENSILDISGFSKQYNCAFIWQKDGVKKLNLYLIINYFKGGKLRFKKIKPEAFEANRFYTVINKKSGEIVPMEVNFNFDDPNLIILPLAFGKRQGREFIWNDLLSLETGSLKLANGRVIEKTLYNRRTRQDEPALFVALTFERREVLDSSNIKPMNLIGVDRGENIPAVIALTDPEGCPLSRFKDSLGNPTHILRIGESYKEKQRTIQAKKEVEQRRAGGYSRKYASKAKNLADDMVRNTARDLLYYAVTQDAMLIFENLSRGFGRQGKRTFMAERQYTRMEDWLTAKLAYEGLPSKTYLSKTLAQYTSKTCSNCGFTITSADYDRVLEKLKKTATGWMTTINGKELKVEGQITYYNRYKRQNVVKDLSVELDRLSEESVNNDISSWTKGRSGEALSLLKKRFSHRPVQEKFVCLNCGFETHADEQAALNIARSWLFLRSQEYKKYQTNKTTGNTDKRAFVETWQSFYRKKLKEVWKPAV

SEQ ID NO: 64 - protein, 979 aa, synthetic construct
QEIKRINKIRRRLVKDSNTKKAGKTGPMKTLLVRVMTPDLRERLENLRKKPENIPQPISNTSRANLNKLLTDYTEMKKAILHVYWEEFQKDPVGLMSRVAQPASKKIDQNKLKPEMDEKGNLTTAGFACSQCGQPLFVYKLEQVSEKGKAYTNYFGRCNVAEHEKLILLAQLKPEKDSDEAVTYSLGKFGQRALDFYSIHVTKESTHPVKPLAQIAGNRYASGPVGKALSDACMGTIASFLSKYQDIIIEHQKVVKGNQKRLESLRELAGKENLEYPSVTLPPQPHTKEGVDAYNEVIARVRMWVNLNLWQKLKLSRDDAKPLLRLKGFPSFPLVERQANEVDWWDMVCNVKKLINEKKEDGKVFWQNLAGYKRQEALRPYLFSSEEDRKKGKKFARYQLGDLLLHLEKKHGEDWGKVYDEAWERIDKKVEGLSKHIKLEEERRSEDAQSKAALTDWLRAKASFVIEGLKEADKDEFCRCELKLQKWYGDLRGKPFAIEAENSILDISGFSKQYNCAFIWQKDGVKKLNLYLIINYFKGGKLRFKKIKPEAFEANRFYTVINKKSGEIVPMEVNFNFDDPNLIILPLAFGKRQGREFIWNDLLSLETGSLKLANGRVIEKTLYNRRTRQDEPALFVALTFERREVLDSSNIKPMNLIGVDRGENIPAVIALTDPEGCPLSRFKDSLGNPTHILRIGESYKEKQRTIQAKKEVEQRRAGGYSRKYASKAKNLADDMVRNTARDLLYYAVTQDAMLIFENLSRGFGRQGKRTFMAERQYTRMEDWLTAKLAYEGLPSKTYLSKTLAQYTSKTCSNCGFTITSADYDRVLEKLKKTATGWMTTINGKELKVEGQITYYNRYKRQNVVKDLSVELDRLSEESVNNDISSWTKGRSGEALSLLKKRFSHRPVQEKFVCLNCGFETHADEQAALNIARSWLFLRSQEYKKYQTNKTTGNTDKRAFVETWQSFYRKKLKEVWKPAV

SEQ ID NO: 65 - protein, 979 aa, synthetic construct
QEIKRINKIRRRLVKDSNTKKAGKTGPMKTLLVRVMTPDLRERLENLRKKPENIPQPISNTSRANLNKLLTDYTEMKKAILHVYWEEFQKDPVGLMSRVAQPASKKIDQNKLKPEMDEKGNLTTAGFACSQCGQPLFVYKWLEQVSEKGKAYTNYFGRCNVAEHEKLILLAQLKPEKDSDEAVTYSLGKFGQRALDFYSIHVTKESTHPVKPLAQIAGNRYASGPVGKALSDACMGTIASFLSKYQDIIIEHQKVVKGNQKRLESLRELAGKENLEYPSVTLPPQPHTKEGVDAYNEVIARVRMWVNLNLWQKLKLSRDDAKPLLRLKGFPSFPLVERQANEVDWWDMVCNVKKLINEKKEDGKVFWQNLAGYKRQEALRPYLSSEEDRKKGKKFARYQLGDLLLHLEKKHGEDWGKVYDEAWERIDKKVEGLSKHIKLEEERRSEDAQSKAALTDWLRAKASFVIEGLKEADKDEFCRCELKLQKWYGDLRGKPFAIEAENSILDISGFSKQYNCAFIWQKDGVKKLNLYLIINYFKGGKLRFKKIKPEAFEANRFYTVINKKSGEIVPMEVNFNFDDPNLIILPLAFGKRQGREFIWNDLLSLETGSLKLANGRVIEKTLYNRRTRQDEPALFVALTFERREVLDSSNIKPMNLIGVDRGENIPAVIALTDPEGCPLSRFKDSLGNPTHILRIGESYKEKQRTIQAKKEVEQRRAGGYSRKYASKAKNLADDMVRNTARDLLYYAVTQDAMLIFENLSRGFGRQGKRTFMAERQYTRMEDWLTAKLAYEGLPSKTYLSKTLAQYTSKTCSNCGFTITSADYDRVLEKLKKTATGWMTTINGKELKVEGQITYYNRYKRQNVVKDLSVELDRLSEESVNNDISSWTKGRSGEALSLLKKRFSHRPVQEKFVCLNCGFETHADEQAALNIARSWLFLRSQEYKKYQTNKTTGNTDKRAFVETWQSFYRKKLKEVWKPAV

SEQ ID NO: 66 - protein, 978 aa, synthetic construct
QEIKRINKIRRRLVKDSNTKKAGKTGPMKTLLVRVMTPDLRERLENLRKKPENIPQPISNTSRANLNKLLTDYTEMKKAILHVYWEEFQKDPVGLMSRVAQPASKKIDQNKLKPEMDEKGNLTTAGFACSQCGQPLFVYKLEQVSEKGKAYTNYFGRCNVAEHEKLILLAQLKPEKDSDEAVTYSLGKFGQRALDFYSIHVTKESTHPVKPLAQIAGNRYASGPVGKALSDACMGTIASFLSKYQDIIIEHQKVVKGNQKRLESLRELAGKENLEYPSVTLPPQPHTKEGVDAYNEVIARVRMWVNDNLWQKLKLSRDDAKPLLRLKGFPSFPLVERQANEVDWWDMVCNVKKLINEKKEDGKVFWQNLAGYKRQEALRPYLSSEEDRKKGKKFARYQLGDLLLHLEKKHGEDWGKVYDEAWERIDKKVEGLSKHIKLEEERRSEDAQSKAALTDWLRAKASFVIEGLKEADKDEFCRCELKLQKWYGDLRGKPFAIEAENSILDISGFSKQYNCAFIWQKDGVKKLNLYLIINYFKGGKLRFKKIKPEAFEANRFYTVINKKSGEIVPMEVNFNFDDPNLIILPLAFGKRQGREFIWNDLLSLETGSLKLANGRVIEKTLYNRRTRQDEPALFVALTFERREVLDSSNIKPMNLIGVDRGENIPAVIALTDPEGCPLSRFKDSLGNPTHILRIGESYKEKQRTIQAKKEVEQRRAGGYSRKYASKAKNLADDMVRNTARDLLYYAVTQDAMLIFENLSRGFGRQGKRTFMAERQYTRMEDWLTAKLAYEGLPSKTYLSKTLAQYTSKTCSNCGFTITSADYDRVLEKLKKTATGWMTTINGKELKVEGQITYYNRYKRQNVVKDLSVELDRLSEESVNNDISSWTKGRSGEALSLLKKRFSHRPVQEKFVCLNCGFETHADEQAALNIARSWLFLRSQEYKKYQTNKTTGNTDKRAFVETWQSFYRKKLKEVWKPAV

SEQ ID NO: 67 - protein, 978 aa, synthetic construct
QEIKRINKIRRRLVKDSNTKKAGKTGPMKTLLVRVMTPDLRERLENLRKKPENIPQPISNTSRANLNKLLTDYTEMKKAILHVYWEEFQKDPVGLMSRVAQPASKKIDQNKLKPEMDEKGNLTTAGFACSQCGQPLFVYKLEQVSEKGKAYTNYFGRCNVAEHEKLILLAQLKPEKDSDEAVTYSLGKFGQRALDFYSIHVTKESTHPVKPLAQIAGNRYASGPVGKALSDACMGTIASFLSKYQDIIIEHQKVVKGNQKRLESLRELAGKENLEYPSVTLPPQPHTKEGVDAYNEVIARVRMWVNLNLWQKLKLSRDDAKPLLRLKGFPSFPLVERQANEVDWWDMVCNVKKLINEKKEDGKVFWQNLAGYKRQEALRPYLSSEEDRKKGKKFARYQLGDLLLHLEKKHGEDWGKVYDEAWERIDKKVEGLSKHIKLEEERRSEDAQSKAALTDWLRAKASFVIEGLKEADKDEFCRCELKLQKWYGDLRGKPFAIEAENSILDISGFSTQYNCAFIWQKDGVKKLNLYLIINYFKGGKLRFKKIKPEAFEANRFYTVINKKSGEIVPMEVNFNFDDPNLIILPLAFGKRQGREFIWNDLLSLETGSLKLANGRVIEKTLYNRRTRQDEPALFVALTFERREVLDSSNIKPMNLIGVDRGENIPAVIALTDPEGCPLSRFKDSLGNPTHILRIGESYKEKQRTIQAKKEVEQRRAGGYSRKYASKAKNLADDMVRNTARDLLYYAVTQDAMLIFENLSRGFGRQGKRTFMAERQYTRMEDWLTAKLAYEGLPSKTYLSKTLAQYTSKTCSNCGFTITSADYDRVLEKLKKTATGWMTTINGKELKVEGQITYYNRYKRQNVVKDLSVELDRLSEESVNNDISSWTKGRSGEALSLLKKRFSHRPVQEKFVCLNCGFETHADEQAALNIARSWLFLRSQEYKKYQTNKTTGNTDKRAFVETWQSFYRKKLKEVWKPAV

SEQ ID NO: 68 - protein, 978 aa, synthetic construct
QEIKRINKIRRRLVKDSNTKKAGKTGPMKTLLVRVMTPDLRERLENLRKKPENIPQPISNTSRANLNKLLTDYTEMKKAILHVYWEEFQKDPVGLMSRVAQPASKKIDQNKLKPEMDEKGNLTTAGFACSQCGQPLFVYKLEQVSEKGKAYTNYFGRCNVAEHEKLILLDQLKPEKDSDEAVTYSLGKFGQRALDFYSIHVTKESTHPVKPLAQIAGNRYASGPVGKALSDACMGTIASFLSKYQDIIIEHQKVVKGNQKRLESLRELAGKENLEYPSVTLPPQPHTKEGVDAYNEVIARVRMWVNLNLWQKLKLSRDDAKPLLRLKGFPSFPLVERQANEVDWWDMVCNVKKLINEKKEDGKVFWQNLAGYKRQEALRPYLSSEEDRKKGKKFARYQLGDLLLHLEKKHGEDWGKVYDEAWERIDKKVEGLSKHIKLEEERRSEDAQSKAALTDWLRAKASFVIEGLKEADKDEFCRCELKLQKWYGDLRGKPFAIEAENSILDISGFSKQYNCAFIWQKDGVKKLNLYLIINYFKGGKLRFKKIKPEAFEANRFYTVINKKSGEIVPMEVNFNFDDPNLIILPLAFGKRQGREFIWNDLLSLETGSLKLANGRVIEKTLYNRRTRQDEPALFVALTFERREVLDSSNIKPMNLIGVDRGENIPAVIALTDPEGCPLSRFKDSLGNPTHILRIGESYKEKQRTIQAKKEVEQRRAGGYSRKYASKAKNLADDMVRNTARDLLYYAVTQDAMLIFENLSRGFGRQGKRTFMAERQYTRMEDWLTAKLAYEGLPSKTYLSKTLAQYTSKTCSNCGFTITSADYDRVLEKLKKTATGWMTTINGKELKVEGQITYYNRYKRQNVVKDLSVELDRLSEESVNNDISSWTKGRSGEALSLLKKRFSHRPVQEKFVCLNCGFETHADEQAALNIARSWLFLRSQEYKKYQTNKTTGNTDKRAFVETWQSFYRKKLKEVWKPAV

SEQ ID NO: 69 - protein, 978 aa, synthetic construct
QEIKRINKIRRRLVKDSNTKKAGKTGPMKTLLVRVMTPDLRERLENLRKKPENIPQPISNTSRANLNKLLTDYTEMKKAILHVYWEEFQKDPVGLMSRVAQPASKKIDQNKLKPEMDEKGNLTTAGFACSQCGQPLFVYKLEQVSEKGKAYTNYFGRCNVAEHEKLIPLAQLKPEKDSDEAVTYSLGKFGQRALDFYSIHVTKESTHPVKPLAQIAGNRYASGPVGKALSDACMGTIASFLSKYQDIIIEHQKVVKGNQKRLESLRELAGKENLEYPSVTLPPQPHTKEGVDAYNEVIARVRMWVNLNLWQKLKLSRDDAKPLLRLKGFPSFPLVERQANEVDWWDMVCNVKKLINEKKEDGKVFWQNLAGYKRQEALRPYLSSEEDRKKGKKFARYQLGDLLLHLEKKHGEDWGKVYDEAWERIDKKVEGLSKHIKLEEERRSEDAQSKAALTDWLRAKASFVIEGLKEADKDEFCRCELKLQKWYGDLRGKPFAIEAENSILDISGFSKQYNCAFIWQKDGVKKLNLYLIINYFKGGKLRFKKIKPEAFEANRFYTVINKKSGEIVPMEVNFNFDDPNLIILPLAFGKRQGREFIWNDLLSLETGSLKLANGRVIEKTLYNRRTRQDEPALFVALTFERREVLDSSNIKPMNLIGVDRGENIPAVIALTDPEGCPLSRFKDSLGNPTHILRIGESYKEKQRTIQAKKEVEQRRAGGYSRKYASKAKNLADDMVRNTARDLLYYAVTQDAMLIFENLSRGFGRQGKRTFMAERQYTRMEDWLTAKLAYEGLPSKTYLSKTLAQYTSKTCSNCGFTITSADYDRVLEKLKKTATGWMTTINGKELKVEGQITYYNRYKRQNVVKDLSVELDRLSEESVNNDISSWTKGRSGEALSLLKKRFSHRPVQEKFVCLNCGFETHADEQAALNIARSWLFLRSQEYKKYQTNKTTGNTDKRAFVETWQSFYRKKLKEVWKPAV

SEQ ID NO: 70 - protein, 978 aa, synthetic construct
QEIKRINKIRRRLVKDSNTKKAGKTGPMKTLLVRVMTPDLRERLENLRKKPENIPQPISNTSRANLNKLLTDYTEMKKAILHVYWEEFQKDPVGLMSRVAQPASKKIDQNKLKPEMDEKGNLTTAGFACSQCGQPLFVYKLEQVSEKGKAYTNYFGRCNVAEHEKLILLAQLKPEKDSDEAVTYSLGKFGQRALDFYSIHVTKESTHPVKPLAQIAGNRYASGPVGKALSDACMGTIASFLSKYQDIIIEHQKVVKGNQKRLESLRELAGKENLEYPSVTLPPQPHTKEGVDAYNEVIARVRMWVNLNLWQKLKLSRDDAKPLLRLKGFPSFPLVERQANEVDWWDMVCNVKKLINEKKEDGKVFWQNLAGYKRQEALRPYLSSEEDRKKGKKFARYQLGDLLLHLEKKHGEDWGKVYDEAWERIDKKVEGLSKHIKLEEERRSEDAQSKAALTDWLRAKASFVIEGLKEADKDEFCRCELKLQKWYGDLRGKPFAIEAENSILDISGFSKQYNCAFIWQKDGVKKLNLYLIINYFKGGKLRFKKIKPEAFEANRFYTVINKKSGEIVPMEVNFNFDDPNLIILPLAFGKRQGREFIWNDLLSLETGSLKLANGRVIEKTLYNRRTRQDEPALFVALTFERREVLDSSNIKPMNLIGVDRGENIPAVIALTDPEGCPLSRFKDSLGNPTHILRIGESYKEKQRTIQAKKEVEQRRAGGYSRKYASKAKNLADDMVRNTARDLLYYAVTQDAMLIFENLSRGFGRQGKRTFMAERQYTRMEDWLTAKKAYEGLPSKTYLSKTLAQYTSKTCSNCGFTITSADYDRVLEKLKKTATGWMTTINGKELKVEGQITYYNRYKRQNVVKDLSVELDRLSEESVNNDISSWTKGRSGEALSLLKKRFSHRPVQEKFVCLNCGFETHADEQAALNIARSWLFLRSQEYKKYQTNKTTGNTDKRAFVETWQSFYRKKLKEVWKPAV

SEQ ID NO: 71 - protein, 978 aa, synthetic construct
QEIKRINKIRRRLVKDSNTKKAGKTGPMKTLLVRVMTPDLRERLENLRKKPENIPQPISNTSRANLNKLLTDYTEMKKAILHVYWEEFQKDPVGLMSRVAQPASKKIDQNKLKPEMDEKGNLTTAGFACSQCGQPLFVYKLEQVSEKGKAYTNYFGRCNVAEHEKLILLAQLKPEKDSDEAVTYSLGKFGQRALDFYSIHVTKESTHPVKPLAQIAGNRYASGPVGKALSDACMGTIASFLSKYQDIIIEHQKVVKGNQKRLESLRELAGKENLEYPSVTLPPQPHTKEGVDAYNEVIARVRMWVNLNLWQKLKLSRDDAKPLLRLKGFPSFPLVERQANEVDWWDMVCNVKKLINEKKEDGKVFWQNLAGYKRQEALRPYLSSEEDRKKGKKFARYQLGDLLLHLEKKHGEDWGKVYDEAWERIDKKVEGLSKHIKLEEERRSEDAQSKAALTDWLRAKASFVIEGLKEADKDEFCRCELKLQKWYGDLRGKPFAIEAENSILDISGFSKQYNCAFIWQKDGVKKLNLYLIINYFKGGKLRFKKIKPEAFEANRFYTVINKKSGEIVPMEVNFNFDDPNLIILPLAFGKRQGREFIWNDLLSLETGSLKLANGRVIEKTLYNRRTRQDEPALFVALTFERREVLDSSNIKPMNLIGVDRGENIPAVIALTDPEGCPLSRFKDSLGNPTHILRIGESYKEKQRTIQAKKEVEQRRAGGYSRKYASKAKNLADDMVRNTARDLLYYAVTQDAMLIFENLSRGFGRQGKRTFMAERQYTRMEDWLTAKLKYEGLPSKTYLSKTLAQYTSKTCSNCGFTITSADYDRVLEKLKKTATGWMTTINGKELKVEGQITYYNRYKRQNVVKDLSVELDRLSEESVNNDISSWTKGRSGEALSLLKKRFSHRPVQEKFVCLNCGFETHADEQAALNIARSWLFLRSQEYKKYQTNKTTGNTDKRAFVETWQSFYRKKLKEVWKPAV

SEQ ID NO: 72 - protein, 978 aa, synthetic construct
QEGKRINKIRRRLVKDSNTKKAGKTGPMKTLLVRVMTPDLRERLENLRKKPENIPQPISNTSRANLNKLLTDYTEMKKAILHVYWEEFQKDPVGLMSRVAQPASKKIDQNKLKPEMDEKGNLTTAGFACSQCGQPLFVYKLEQVSEKGKAYTNYFGRCNVAEHEKLILLAQLKPEKDSDEAVTYSLGKFGQRALDFYSIHVTKESTHPVKPLAQIAGNRYASGPVGKALSDACMGTIASFLSKYQDIIIEHQKVVKGNQKRLESLRELAGKENLEYPSVTLPPQPHTKEGVDAYNEVIARVRMWVNLNLWQKLKLSRDDAKPLLRLKGFPSFPLVERQANEVDWWDMVCNVKKLINEKKEDGKVFWQNLAGYKRQEALRPYLSSEEDRKKGKKFARYQLGDLLLHLEKKHGEDWGKVYDEAWERIDKKVEGLSKHIKLEEERRSEDAQSKAALTDWLRAKASFVIEGLKEADKDEFCRCELKLQKWYGDLRGKPFAIEAENSILDISGFSKQYNCAFIWQKDGVKKLNLYLIINYFKGGKLRFKKIKPEAFEANRFYTVINKKSGEIVPMEVNFNFDDPNLIILPLAFGKRQGREFIWNDLLSLETGSLKLANGRVIEKTLYNRRTRQDEPALFVALTFERREVLDSSNIKPMNLIGVDRGENIPAVIALTDPEGCPLSRFKDSLGNPTHILRIGESYKEKQRTIQAKKEVEQRRAGGYSRKYASKAKNLADDMVRNTARDLLYYAVTQDAMLIFENLSRGFGRQGKRTFMAERQYTRMEDWLTAKLAYEGLPSKTYLSKTLAQYTSKTCSNCGFTITSADYDRVLEKLKKTATGWMTTINGKELKVEGQITYYNRYKRQNVVKDLSVELDRLSEESVNNDISSWTKGRSGEALSLLKKRFSHRPVQEKFVCLNCGFETHADEQAALNIARSWLFLRSQEYKKYQTNKTTGNTDKRAFVETWQSFYRKKLKEVWKPAV

SEQ ID NO: 73 - protein, 978 aa, synthetic construct
QEEKRINKIRRRLVKDSNTKKAGKTGPMKTLLVRVMTPDLRERLENLRKKPENIPQPISNTSRANLNKLLTDYTEMKKAILHVYWEEFQKDPVGLMSRVAQPASKKIDQNKLKPEMDEKGNLTTAGFACSQCGQPLFVYKLEQVSEKGKAYTNYFGRCNVAEHEKLILLAQLKPEKDSDEAVTYSLGKFGQRALDFYSIHVTKESTHPVKPLAQIAGNRYASGPVGKALSDACMGTIASFLSKYQDIIIEHQKVVKGNQKRLESLRELAGKENLEYPSVTLPPQPHTKEGVDAYNEVIARVRMWVNLNLWQKLKLSRDDAKPLLRLKGFPSFPLVERQANEVDWWDMVCNVKKLINEKKEDGKVFWQNLAGYKRQEALRPYLSSEEDRKKGKKFARYQLGDLLLHLEKKHGEDWGKVYDEAWERIDKKVEGLSKHIKLEEERRSEDAQSKAALTDWLRAKASFVIEGLKEADKDEFCRCELKLQKWYGDLRGKPFAIEAENSILDISGFSKQYNCAFIWQKDGVKKLNLYLIINYFKGGKLRFKKIKPEAFEANRFYTVINKKSGEIVPMEVNFNFDDPNLIILPLAFGKRQGREFIWNDLLSLETGSLKLANGRVIEKTLYNRRTRQDEPALFVALTFERREVLDSSNIKPMNLIGVDRGENIPAVIALTDPEGCPLSRFKDSLGNPTHILRIGESYKEKQRTIQAKKEVEQRRAGGYSRKYASKAKNLADDMVRNTARDLLYYAVTQDAMLIFENLSRGFGRQGKRTFMAERQYTRMEDWLTAKLAYEGLPSKTYLSKTLAQYTSKTCSNCGFTITSADYDRVLEKLKKTATGWMTTINGKELKVEGQITYYNRYKRQNVVKDLSVELDRLSEESVNNDISSWTKGRSGEALSLLKKRFSHRPVQEKFVCLNCGFETHADEQAALNIARSWLFLRSQEYKKYQTNKTTGNTDKRAFVETWQSFYRKKLKEVWKPAV

SEQ ID NO: 74 - protein, 979 aa, synthetic construct
QEIGKRINKIRRRLVKDSNTKKAGKTGPMKTLLVRVMTPDLRERLENLRKKPENIPQPISNTSRANLNKLLTDYTEMKKAILHVYWEEFQKDPVGLMSRVAQPASKKIDQNKLKPEMDEKGNLTTAGFACSQCGQPLFVYKLEQVSEKGKAYTNYFGRCNVAEHEKLILLAQLKPEKDSDEAVTYSLGKFGQRALDFYSIHVTKESTHPVKPLAQIAGNRYASGPVGKALSDACMGTIASFLSKYQDIIIEHQKVVKGNQKRLESLRELAGKENLEYPSVTLPPQPHTKEGVDAYNEVIARVRMWVNLNLWQKLKLSRDDAKPLLRLKGFPSFPLVERQANEVDWWDMVCNVKKLINEKKEDGKVFWQNLAGYKRQEALRPYLSSEEDRKKGKKFARYQLGDLLLHLEKKHGEDWGKVYDEAWERIDKKVEGLSKHIKLEEERRSEDAQSKAALTDWLRAKASFVIEGLKEADKDEFCRCELKLQKWYGDLRGKPFAIEAENSILDISGFSKQYNCAFIWQKDGVKKLNLYLIINYFKGGKLRFKKIKPEAFEANRFYTVINKKSGEIVPMEVNFNFDDPNLIILPLAFGKRQGREFIWNDLLSLETGSLKLANGRVIEKTLYNRRTRQDEPALFVALTFERREVLDSSNIKPMNLIGVDRGENIPAVIALTDPEGCPLSRFKDSLGNPTHILRIGESYKEKQRTIQAKKEVEQRRAGGYSRKYASKAKNLADDMVRNTARDLLYYAVTQDAMLIFENLSRGFGRQGKRTFMAERQYTRMEDWLTAKLAYEGLPSKTYLSKTLAQYTSKTCSNCGFTITSADYDRVLEKLKKTATGWMTTINGKELKVEGQITYYNRYKRQNVVKDLSVELDRLSEESVNNDISSWTKGRSGEALSLLKKRFSHRPVQEKFVCLNCGFETHADEQAALNIARSWLFLRSQEYKKYQTNKTTGNTDKRAFVETWQSFYRKKLKEVWKPAV

SEQ ID NO: 75 - protein, 978 aa, synthetic construct
QEIGRINKIRRRLVKDSNTKKAGKTGPMKTLLVRVMTPDLRERLENLRKKPENIPQPISNTSRANLNKLLTDYTEMKKAILHVYWEEFQKDPVGLMSRVAQPASKKIDQNKLKPEMDEKGNLTTAGFACSQCGQPLFVYKLEQVSEKGKAYTNYFGRCNVAEHEKLILLAQLKPEKDSDEAVTYSLGKFGQRALDFYSIHVTKESTHPVKPLAQIAGNRYASGPVGKALSDACMGTIASFLSKYQDIIIEHQKVVKGNQKRLESLRELAGKENLEYPSVTLPPQPHTKEGVDAYNEVIARVRMWVNLNLWQKLKLSRDDAKPLLRLKGFPSFPLVERQANEVDWWDMVCNVKKLINEKKEDGKVFWQNLAGYKRQEALRPYLSSEEDRKKGKKFARYQLGDLLLHLEKKHGEDWGKVYDEAWERIDKKVEGLSKHIKLEEERRSEDAQSKAALTDWLRAKASFVIEGLKEADKDEFCRCELKLQKWYGDLRGKPFAIEAENSILDISGFSKQYNCAFIWQKDGVKKLNLYLIINYFKGGKLRFKKIKPEAFEANRFYTVINKKSGEIVPMEVNFNFDDPNLIILPLAFGKRQGREFIWNDLLSLETGSLKLANGRVIEKTLYNRRTRQDEPALFVALTFERREVLDSSNIKPMNLIGVDRGENIPAVIALTDPEGCPLSRFKDSLGNPTHILRIGESYKEKQRTIQAKKEVEQRRAGGYSRKYASKAKNLADDMVRNTARDLLYYAVTQDAMLIFENLSRGFGRQGKRTFMAERQYTRMEDWLTAKLAYEGLPSKTYLSKTLAQYTSKTCSNCGFTITSADYDRVLEKLKKTATGWMTTINGKELKVEGQITYYNRYKRQNVVKDLSVELDRLSEESVNNDISSWTKGRSGEALSLLKKRFSHRPVQEKFVCLNCGFETHADEQAALNIARSWLFLRSQEYKKYQTNKTTGNTDKRAFVETWQSFYRKKLKEVWKPAV

SEQ ID NO: 76 - protein, 978 aa, synthetic construct
QEISRINKIRRRLVKDSNTKKAGKTGPMKTLLVRVMTPDLRERLENLRKKPENIPQPISNTSRANLNKLLTDYTEMKKAILHVYWEEFQKDPVGLMSRVAQPASKKIDQNKLKPEMDEKGNLTTAGFACSQCGQPLFVYKLEQVSEKGKAYTNYFGRCNVAEHEKLILLAQLKPEKDSDEAVTYSLGKFGQRALDFYSIHVTKESTHPVKPLAQIAGNRYASGPVGKALSDACMGTIASFLSKYQDIIIEHQKVVKGNQKRLESLRELAGKENLEYPSVTLPPQPHTKEGVDAYNEVIARVRMWVNLNLWQKLKLSRDDAKPLLRLKGFPSFPLVERQANEVDWWDMVCNVKKLINEKKEDGKVFWQNLAGYKRQEALRPYLSSEEDRKKGKKFARYQLGDLLLHLEKKHGEDWGKVYDEAWERIDKKVEGLSKHIKLEEERRSEDAQSKAALTDWLRAKASFVIEGLKEADKDEFCRCELKLQKWYGDLRGKPFAIEAENSILDISGFSKQYNCAFIWQKDGVKKLNLYLIINYFKGGKLRFKKIKPEAFEANRFYTVINKKSGEIVPMEVNFNFDDPNLIILPLAFGKRQGREFIWNDLLSLETGSLKLANGRVIEKTLYNRRTRQDEPALFVALTFERREVLDSSNIKPMNLIGVDRGENIPAVIALTDPEGCPLSRFKDSLGNPTHILRIGESYKEKQRTIQAKKEVEQRRAGGYSRKYASKAKNLADDMVRNTARDLLYYAVTQDAMLIFENLSRGFGRQGKRTFMAERQYTRMEDWLTAKLAYEGLPSKTYLSKTLAQYTSKTCSNCGFTITSADYDRVLEKLKKTATGWMTTINGKELKVEGQITYYNRYKRQNVVKDLSVELDRLSEESVNNDISSWTKGRSGEALSLLKKRFSHRPVQEKFVCLNCGFETHADEQAALNIARSWLFLRSQEYKKYQTNKTTGNTDKRAFVETWQSFYRKKLKEVWKPAV

SEQ ID NO: 77 - protein, 979 aa, synthetic construct
QEIKGRINKIRRRLVKDSNTKKAGKTGPMKTLLVRVMTPDLRERLENLRKKPENIPQPISNTSRANLNKLLTDYTEMKKAILHVYWEEFQKDPVGLMSRVAQPASKKIDQNKLKPEMDEKGNLTTAGFACSQCGQPLFVYKLEQVSEKGKAYTNYFGRCNVAEHEKLILLAQLKPEKDSDEAVTYSLGKFGQRALDFYSIHVTKESTHPVKPLAQIAGNRYASGPVGKALSDACMGTIASFLSKYQDIIIEHQKVVKGNQKRLESLRELAGKENLEYPSVTLPPQPHTKEGVDAYNEVIARVRMWVNLNLWQKLKLSRDDAKPLLRLKGFPSFPLVERQANEVDWWDMVCNVKKLINEKKEDGKVFWQNLAGYKRQEALRPYLSSEEDRKKGKKFARYQLGDLLLHLEKKHGEDWGKVYDEAWERIDKKVEGLSKHIKLEEERRSEDAQSKAALTDWLRAKASFVIEGLKEADKDEFCRCELKLQKWYGDLRGKPFAIEAENSILDISGFSKQYNCAFIWQKDGVKKLNLYLIINYFKGGKLRFKKIKPEAFEANRFYTVINKKSGEIVPMEVNFNFDDPNLIILPLAFGKRQGREFIWNDLLSLETGSLKLANGRVIEKTLYNRRTRQDEPALFVALTFERREVLDSSNIKPMNLIGVDRGENIPAVIALTDPEGCPLSRFKDSLGNPTHILRIGESYKEKQRTIQAKKEVEQRRAGGYSRKYASKAKNLADDMVRNTARDLLYYAVTQDAMLIFENLSRGFGRQGKRTFMAERQYTRMEDWLTAKLAYEGLPSKTYLSKTLAQYTSKTCSNCGFTITSADYDRVLEKLKKTATGWMTTINGKELKVEGQITYYNRYKRQNVVKDLSVELDRLSEESVNNDISSWTKGRSGEALSLLKKRFSHRPVQEKFVCLNCGFETHADEQAALNIARSWLFLRSQEYKKYQTNKTTGNTDKRAFVETWQSFYRKKLKEVWKPAV

SEQ ID NO: 78 - protein, 978 aa, synthetic construct
QEIKSINKIRRRLVKDSNTKKAGKTGPMKTLLVRVMTPDLRERLENLRKKPENIPQPISNTSRANLNKLLTDYTEMKKAILHVYWEEFQKDPVGLMSRVAQPASKKIDQNKLKPEMDEKGNLTTAGFACSQCGQPLFVYKLEQVSEKGKAYTNYFGRCNVAEHEKLILLAQLKPEKDSDEAVTYSLGKFGQRALDFYSIHVTKESTHPVKPLAQIAGNRYASGPVGKALSDACMGTIASFLSKYQDIIIEHQKVVKGNQKRLESLRELAGKENLEYPSVTLPPQPHTKEGVDAYNEVIARVRMWVNLNLWQKLKLSRDDAKPLLRLKGFPSFPLVERQANEVDWWDMVCNVKKLINEKKEDGKVFWQNLAGYKRQEALRPYLSSEEDRKKGKKFARYQLGDLLLHLEKKHGEDWGKVYDEAWERIDKKVEGLSKHIKLEEERRSEDAQSKAALTDWLRAKASFVIEGLKEADKDEFCRCELKLQKWYGDLRGKPFAIEAENSILDISGFSKQYNCAFIWQKDGVKKLNLYLIINYFKGGKLRFKKIKPEAFEANRFYTVINKKSGEIVPMEVNFNFDDPNLIILPLAFGKRQGREFIWNDLLSLETGSLKLANGRVIEKTLYNRRTRQDEPALFVALTFERREVLDSSNIKPMNLIGVDRGENIPAVIALTDPEGCPLSRFKDSLGNPTHILRIGESYKEKQRTIQAKKEVEQRRAGGYSRKYASKAKNLADDMVRNTARDLLYYAVTQDAMLIFENLSRGFGRQGKRTFMAERQYTRMEDWLTAKLAYEGLPSKTYLSKTLAQYTSKTCSNCGFTITSADYDRVLEKLKKTATGWMTTINGKELKVEGQITYYNRYKRQNVVKDLSVELDRLSEESVNNDISSWTKGRSGEALSLLKKRFSHRPVQEKFVCLNCGFETHADEQAALNIARSWLFLRSQEYKKYQTNKTTGNTDKRAFVETWQSFYRKKLKEVWKPAV

SEQ ID NO: 79 - protein, 978 aa, synthetic construct
QEIKRANKIRRRLVKDSNTKKAGKTGPMKTLLVRVMTPDLRERLENLRKKPENIPQPISNTSRANLNKLLTDYTEMKKAILHVYWEEFQKDPVGLMSRVAQPASKKIDQNKLKPEMDEKGNLTTAGFACSQCGQPLFVYKLEQVSEKGKAYTNYFGRCNVAEHEKLILLAQLKPEKDSDEAVTYSLGKFGQRALDFYSIHVTKESTHPVKPLAQIAGNRYASGPVGKALSDACMGTIASFLSKYQDIIIEHQKVVKGNQKRLESLRELAGKENLEYPSVTLPPQPHTKEGVDAYNEVIARVRMWVNLNLWQKLKLSRDDAKPLLRLKGFPSFPLVERQANEVDWWDMVCNVKKLINEKKEDGKVFWQNLAGYKRQEALRPYLSSEEDRKKGKKFARYQLGDLLLHLEKKHGEDWGKVYDEAWERIDKKVEGLSKHIKLEEERRSEDAQSKAALTDWLRAKASFVIEGLKEADKDEFCRCELKLQKWYGDLRGKPFAIEAENSILDISGFSKQYNCAFIWQKDGVKKLNLYLIINYFKGGKLRFKKIKPEAFEANRFYTVINKKSGEIVPMEVNFNFDDPNLIILPLAFGKRQGREFIWNDLLSLETGSLKLANGRVIEKTLYNRRTRQDEPALFVALTFERREVLDSSNIKPMNLIGVDRGENIPAVIALTDPEGCPLSRFKDSLGNPTHILRIGESYKEKQRTIQAKKEVEQRRAGGYSRKYASKAKNLADDMVRNTARDLLYYAVTQDAMLIFENLSRGFGRQGKRTFMAERQYTRMEDWLTAKLAYEGLPSKTYLSKTLAQYTSKTCSNCGFTITSADYDRVLEKLKKTATGWMTTINGKELKVEGQITYYNRYKRQNVVKDLSVELDRLSEESVNNDISSWTKGRSGEALSLLKKRFSHRPVQEKFVCLNCGFETHADEQAALNIARSWLFLRSQEYKKYQTNKTTGNTDKRAFVETWQSFYRKKLKEVWKPAV

SEQ ID NO: 80 - protein, 979 aa, synthetic construct
QEIKRGINKIRRRLVKDSNTKKAGKTGPMKTLLVRVMTPDLRERLENLRKKPENIPQPISNTSRANLNKLLTDYTEMKKAILHVYWEEFQKDPVGLMSRVAQPASKKIDQNKLKPEMDEKGNLTTAGFACSQCGQPLFVYKLEQVSEKGKAYTNYFGRCNVAEHEKLILLAQLKPEKDSDEAVTYSLGKFGQRALDFYSIHVTKESTHPVKPLAQIAGNRYASGPVGKALSDACMGTIASFLSKYQDIIIEHQKVVKGNQKRLESLRELAGKENLEYPSVTLPPQPHTKEGVDAYNEVIARVRMWVNLNLWQKLKLSRDDAKPLLRLKGFPSFPLVERQANEVDWWDMVCNVKKLINEKKEDGKVFWQNLAGYKRQEALRPYLSSEEDRKKGKKFARYQLGDLLLHLEKKHGEDWGKVYDEAWERIDKKVEGLSKHIKLEEERRSEDAQSKAALTDWLRAKASFVIEGLKEADKDEFCRCELKLQKWYGDLRGKPFAIEAENSILDISGFSKQYNCAFIWQKDGVKKLNLYLIINYFKGGKLRFKKIKPEAFEANRFYTVINKKSGEIVPMEVNFNFDDPNLIILPLAFGKRQGREFIWNDLLSLETGSLKLANGRVIEKTLYNRRTRQDEPALFVALTFERREVLDSSNIKPMNLIGVDRGENIPAVIALTDPEGCPLSRFKDSLGNPTHILRIGESYKEKQRTIQAKKEVEQRRAGGYSRKYASKAKNLADDMVRNTARDLLYYAVTQDAMLIFENLSRGFGRQGKRTFMAERQYTRMEDWLTAKLAYEGLPSKTYLSKTLAQYTSKTCSNCGFTITSADYDRVLEKLKKTATGWMTTINGKELKVEGQITYYNRYKRQNVVKDLSVELDRLSEESVNNDISSWTKGRSGEALSLLKKRFSHRPVQEKFVCLNCGFETHADEQAALNIARSWLFLRSQEYKKYQTNKTTGNTDKRAFVETWQSFYRKKLKEVWKPAV

SEQ ID NO: 81 - protein, 978 aa, synthetic construct
QEIKRISKIRRRLVKDSNTKKAGKTGPMKTLLVRVMTPDLRERLENLRKKPENIPQPISNTSRANLNKLLTDYTEMKKAILHVYWEEFQKDPVGLMSRVAQPASKKIDQNKLKPEMDEKGNLTTAGFACSQCGQPLFVYKLEQVSEKGKAYTNYFGRCNVAEHEKLILLAQLKPEKDSDEAVTYSLGKFGQRALDFYSIHVTKESTHPVKPLAQIAGNRYASGPVGKALSDACMGTIASFLSKYQDIIIEHQKVVKGNQKRLESLRELAGKENLEYPSVTLPPQPHTKEGVDAYNEVIARVRMWVNLNLWQKLKLSRDDAKPLLRLKGFPSFPLVERQANEVDWWDMVCNVKKLINEKKEDGKVFWQNLAGYKRQEALRPYLSSEEDRKKGKKFARYQLGDLLLHLEKKHGEDWGKVYDEAWERIDKKVEGLSKHIKLEEERRSEDAQSKAALTDWLRAKASFVIEGLKEADKDEFCRCELKLQKWYGDLRGKPFAIEAENSILDISGFSKQYNCAFIWQKDGVKKLNLYLIINYFKGGKLRFKKIKPEAFEANRFYTVINKKSGEIVPMEVNFNFDDPNLIILPLAFGKRQGREFIWNDLLSLETGSLKLANGRVIEKTLYNRRTRQDEPALFVALTFERREVLDSSNIKPMNLIGVDRGENIPAVIALTDPEGCPLSRFKDSLGNPTHILRIGESYKEKQRTIQAKKEVEQRRAGGYSRKYASKAKNLADDMVRNTARDLLYYAVTQDAMLIFENLSRGFGRQGKRTFMAERQYTRMEDWLTAKLAYEGLPSKTYLSKTLAQYTSKTCSNCGFTITSADYDRVLEKLKKTATGWMTTINGKELKVEGQITYYNRYKRQNVVKDLSVELDRLSEESVNNDISSWTKGRSGEALSLLKKRFSHRPVQEKFVCLNCGFETHADEQAALNIARSWLFLRSQEYKKYQTNKTTGNTDKRAFVETWQSFYRKKLKEVWKPAV

SEQ ID NO: 82 - protein, 978 aa, synthetic construct
QEIKRINGIRRRLVKDSNTKKAGKTGPMKTLLVRVMTPDLRERLENLRKKPENIPQPISNTSRANLNKLLTDYTEMKKAILHVYWEEFQKDPVGLMSRVAQPASKKIDQNKLKPEMDEKGNLTTAGFACSQCGQPLFVYKLEQVSEKGKAYTNYFGRCNVAEHEKLILLAQLKPEKDSDEAVTYSLGKFGQRALDFYSIHVTKESTHPVKPLAQIAGNRYASGPVGKALSDACMGTIASFLSKYQDIIIEHQKVVKGNQKRLESLRELAGKENLEYPSVTLPPQPHTKEGVDAYNEVIARVRMWVNLNLWQKLKLSRDDAKPLLRLKGFPSFPLVERQANEVDWWDMVCNVKKLINEKKEDGKVFWQNLAGYKRQEALRPYLSSEEDRKKGKKFARYQLGDLLLHLEKKHGEDWGKVYDEAWERIDKKVEGLSKHIKLEEERRSEDAQSKAALTDWLRAKASFVIEGLKEADKDEFCRCELKLQKWYGDLRGKPFAIEAENSILDISGFSKQYNCAFIWQKDGVKKLNLYLIINYFKGGKLRFKKIKPEAFEANRFYTVINKKSGEIVPMEVNFNFDDPNLIILPLAFGKRQGREFIWNDLLSLETGSLKLANGRVIEKTLYNRRTRQDEPALFVALTFERREVLDSSNIKPMNLIGVDRGENIPAVIALTDPEGCPLSRFKDSLGNPTHILRIGESYKEKQRTIQAKKEVEQRRAGGYSRKYASKAKNLADDMVRNTARDLLYYAVTQDAMLIFENLSRGFGRQGKRTFMAERQYTRMEDWLTAKLAYEGLPSKTYLSKTLAQYTSKTCSNCGFTITSADYDRVLEKLKKTATGWMTTINGKELKVEGQITYYNRYKRQNVVKDLSVELDRLSEESVNNDISSWTKGRSGEALSLLKKRFSHRPVQEKFVCLNCGFETHADEQAALNIARSWLFLRSQEYKKYQTNKTTGNTDKRAFVETWQSFYRKKLKEVWKPAV

SEQ ID NO: 83 - protein, 979 aa, synthetic construct
QEIKRINKIRRRLVKFDSNTKKAGKTGPMKTLLVRVMTPDLRERLENLRKKPENIPQPISNTSRANLNKLLTDYTEMKKAILHVYWEEFQKDPVGLMSRVAQPASKKIDQNKLKPEMDEKGNLTTAGFACSQCGQPLFVYKLEQVSEKGKAYTNYFGRCNVAEHEKLILLAQLKPEKDSDEAVTYSLGKFGQRALDFYSIHVTKESTHPVKPLAQIAGNRYASGPVGKALSDACMGTIASFLSKYQDIIIEHQKVVKGNQKRLESLRELAGKENLEYPSVTLPPQPHTKEGVDAYNEVIARVRMWVNLNLWQKLKLSRDDAKPLLRLKGFPSFPLVERQANEVDWWDMVCNVKKLINEKKEDGKVFWQNLAGYKRQEALRPYLSSEEDRKKGKKFARYQLGDLLLHLEKKHGEDWGKVYDEAWERIDKKVEGLSKHIKLEEERRSEDAQSKAALTDWLRAKASFVIEGLKEADKDEFCRCELKLQKWYGDLRGKPFAIEAENSILDISGFSKQYNCAFIWQKDGVKKLNLYLIINYFKGGKLRFKKIKPEAFEANRFYTVINKKSGEIVPMEVNFNFDDPNLIILPLAFGKRQGREFIWNDLLSLETGSLKLANGRVIEKTLYNRRTRQDEPALFVALTFERREVLDSSNIKPMNLIGVDRGENIPAVIALTDPEGCPLSRFKDSLGNPTHILRIGESYKEKQRTIQAKKEVEQRRAGGYSRKYASKAKNLADDMVRNTARDLLYYAVTQDAMLIFENLSRGFGRQGKRTFMAERQYTRMEDWLTAKLAYEGLPSKTYLSKTLAQYTSKTCSNCGFTITSADYDRVLEKLKKTATGWMTTINGKELKVEGQITYYNRYKRQNVVKDLSVELDRLSEESVNNDISSWTKGRSGEALSLLKKRFSHRPVQEKFVCLNCGFETHADEQAALNIARSWLFLRSQEYKKYQTNKTTGNTDKRAFVETWQSFYRKKLKEVWKPAV

SEQ ID NO: 84 - protein, 979 aa, synthetic construct
QEIKRINKIRRRLVKDSFNTKKAGKTGPMKTLLVRVMTPDLRERLENLRKKPENIPQPISNTSRANLNKLLTDYTEMKKAILHVYWEEFQKDPVGLMSRVAQPASKKIDQNKLKPEMDEKGNLTTAGFACSQCGQPLFVYKLEQVSEKGKAYTNYFGRCNVAEHEKLILLAQLKPEKDSDEAVTYSLGKFGQRALDFYSIHVTKESTHPVKPLAQIAGNRYASGPVGKALSDACMGTIASFLSKYQDIIIEHQKVVKGNQKRLESLRELAGKENLEYPSVTLPPQPHTKEGVDAYNEVIARVRMWVNLNLWQKLKLSRDDAKPLLRLKGFPSFPLVERQANEVDWWDMVCNVKKLINEKKEDGKVFWQNLAGYKRQEALRPYLSSEEDRKKGKKFARYQLGDLLLHLEKKHGEDWGKVYDEAWERIDKKVEGLSKHIKLEEERRSEDAQSKAALTDWLRAKASFVIEGLKEADKDEFCRCELKLQKWYGDLRGKPFAIEAENSILDISGFSKQYNCAFIWQKDGVKKLNLYLIINYFKGGKLRFKKIKPEAFEANRFYTVINKKSGEIVPMEVNFNFDDPNLIILPLAFGKRQGREFIWNDLLSLETGSLKLANGRVIEKTLYNRRTRQDEPALFVALTFERREVLDSSNIKPMNLIGVDRGENIPAVIALTDPEGCPLSRFKDSLGNPTHILRIGESYKEKQRTIQAKKEVEQRRAGGYSRKYASKAKNLADDMVRNTARDLLYYAVTQDAMLIFENLSRGFGRQGKRTFMAERQYTRMEDWLTAKLAYEGLPSKTYLSKTLAQYTSKTCSNCGFTITSADYDRVLEKLKKTATGWMTTINGKELKVEGQITYYNRYKRQNVVKDLSVELDRLSEESVNNDISSWTKGRSGEALSLLKKRFSHRPVQEKFVCLNCGFETHADEQAALNIARSWLFLRSQEYKKYQTNKTTGNTDKRAFVETWQSFYRKKLKEVWKPAV

SEQ ID NO: 85 - protein, 978 aa, synthetic construct
QEIKRINKIRRRLVKDSNTKKAGKTGPMKTLLVPVMTPDLRERLENLRKKPENIPQPISNTSRANLNKLLTDYTEMKKAILHVYWEEFQKDPVGLMSRVAQPASKKIDQNKLKPEMDEKGNLTTAGFACSQCGQPLFVYKLEQVSEKGKAYTNYFGRCNVAEHEKLILLAQLKPEKDSDEAVTYSLGKFGQRALDFYSIHVTKESTHPVKPLAQIAGNRYASGPVGKALSDACMGTIASFLSKYQDIIIEHQKVVKGNQKRLESLRELAGKENLEYPSVTLPPQPHTKEGVDAYNEVIARVRMWVNLNLWQKLKLSRDDAKPLLRLKGFPSFPLVERQANEVDWWDMVCNVKKLINEKKEDGKVFWQNLAGYKRQEALRPYLSSEEDRKKGKKFARYQLGDLLLHLEKKHGEDWGKVYDEAWERIDKKVEGLSKHIKLEEERRSEDAQSKAALTDWLRAKASFVIEGLKEADKDEFCRCELKLQKWYGDLRGKPFAIEAENSILDISGFSKQYNCAFIWQKDGVKKLNLYLIINYFKGGKLRFKKIKPEAFEANRFYTVINKKSGEIVPMEVNFNFDDPNLIILPLAFGKRQGREFIWNDLLSLETGSLKLANGRVIEKTLYNRRTRQDEPALFVALTFERREVLDSSNIKPMNLIGVDRGENIPAVIALTDPEGCPLSRFKDSLGNPTHILRIGESYKEKQRTIQAKKEVEQRRAGGYSRKYASKAKNLADDMVRNTARDLLYYAVTQDAMLIFENLSRGFGRQGKRTFMAERQYTRMEDWLTAKLAYEGLPSKTYLSKTLAQYTSKTCSNCGFTITSADYDRVLEKLKKTATGWMTTINGKELKVEGQITYYNRYKRQNVVKDLSVELDRLSEESVNNDISSWTKGRSGEALSLLKKRFSHRPVQEKFVCLNCGFETHADEQAALNIARSWLFLRSQEYKKYQTNKTTGNTDKRAFVETWQSFYRKKLKEVWKPAV

SEQ ID NO: 86 - protein, 978 aa, synthetic construct
QEIKRINKIRRRLVKDSNTKKAGKTGPMKTLLVRVMTPDLRERLENLRKKPPNIPQPISNTSRANLNKLLTDYTEMKKAILHVYWEEFQKDPVGLMSRVAQPASKKIDQNKLKPEMDEKGNLTTAGFACSQCGQPLFVYKLEQVSEKGKAYTNYFGRCNVAEHEKLILLAQLKPEKDSDEAVTYSLGKFGQRALDFYSIHVTKESTHPVKPLAQIAGNRYASGPVGKALSDACMGTIASFLSKYQDIIIEHQKVVKGNQKRLESLRELAGKENLEYPSVTLPPQPHTKEGVDAYNEVIARVRMWVNLNLWQKLKLSRDDAKPLLRLKGFPSFPLVERQANEVDWWDMVCNVKKLINEKKEDGKVFWQNLAGYKRQEALRPYLSSEEDRKKGKKFARYQLGDLLLHLEKKHGEDWGKVYDEAWERIDKKVEGLSKHIKLEEERRSEDAQSKAALTDWLRAKASFVIEGLKEADKDEFCRCELKLQKWYGDLRGKPFAIEAENSILDISGFSKQYNCAFIWQKDGVKKLNLYLIINYFKGGKLRFKKIKPEAFEANRFYTVINKKSGEIVPMEVNFNFDDPNLIILPLAFGKRQGREFIWNDLLSLETGSLKLANGRVIEKTLYNRRTRQDEPALFVALTFERREVLDSSNIKPMNLIGVDRGENIPAVIALTDPEGCPLSRFKDSLGNPTHILRIGESYKEKQRTIQAKKEVEQRRAGGYSRKYASKAKNLADDMVRNTARDLLYYAVTQDAMLIFENLSRGFGRQGKRTFMAERQYTRMEDWLTAKLAYEGLPSKTYLSKTLAQYTSKTCSNCGFTITSADYDRVLEKLKKTATGWMTTINGKELKVEGQITYYNRYKRQNVVKDLSVELDRLSEESVNNDISSWTKGRSGEALSLLKKRFSHRPVQEKFVCLNCGFETHADEQAALNIARSWLFLRSQEYKKYQTNKTTGNTDKRAFVETWQSFYRKKLKEVWKPAV

SEQ ID NO: 87 - protein, 979 aa, synthetic construct
QEIKRINKIRRRLVKDSNTKKAGKTGPMKTLLVRVMTPDLRERLENLRKKPENIPPQPISNTSRANLNKLLTDYTEMKKAILHVYWEEFQKDPVGLMSRVAQPASKKIDQNKLKPEMDEKGNLTTAGFACSQCGQPLFVYKLEQVSEKGKAYTNYFGRCNVAEHEKLILLAQLKPEKDSDEAVTYSLGKFGQRALDFYSIHVTKESTHPVKPLAQIAGNRYASGPVGKALSDACMGTIASFLSKYQDIIIEHQKVVKGNQKRLESLRELAGKENLEYPSVTLPPQPHTKEGVDAYNEVIARVRMWVNLNLWQKLKLSRDDAKPLLRLKGFPSFPLVERQANEVDWWDMVCNVKKLINEKKEDGKVFWQNLAGYKRQEALRPYLSSEEDRKKGKKFARYQLGDLLLHLEKKHGEDWGKVYDEAWERIDKKVEGLSKHIKLEEERRSEDAQSKAALTDWLRAKASFVIEGLKEADKDEFCRCELKLQKWYGDLRGKPFAIEAENSILDISGFSKQYNCAFIWQKDGVKKLNLYLIINYFKGGKLRFKKIKPEAFEANRFYTVINKKSGEIVPMEVNFNFDDPNLIILPLAFGKRQGREFIWNDLLSLETGSLKLANGRVIEKTLYNRRTRQDEPALFVALTFERREVLDSSNIKPMNLIGVDRGENIPAVIALTDPEGCPLSRFKDSLGNPTHILRIGESYKEKQRTIQAKKEVEQRRAGGYSRKYASKAKNLADDMVRNTARDLLYYAVTQDAMLIFENLSRGFGRQGKRTFMAERQYTRMEDWLTAKLAYEGLPSKTYLSKTLAQYTSKTCSNCGFTITSADYDRVLEKLKKTATGWMTTINGKELKVEGQITYYNRYKRQNVVKDLSVELDRLSEESVNNDISSWTKGRSGEALSLLKKRFSHRPVQEKFVCLNCGFETHADEQAALNIARSWLFLRSQEYKKYQTNKTTGNTDKRAFVETWQSFYRKKLKEVWKPAV

SEQ ID NO: 88 - protein, 978 aa, synthetic construct
QEIKRINKIRRRLVKDSNTKKAGKTGPMKTLLVRVMTPDLRERLENLRKKPENIPPPISNTSRANLNKLLTDYTEMKKAILHVYWEEFQKDPVGLMSRVAQPASKKIDQNKLKPEMDEKGNLTTAGFACSQCGQPLFVYKLEQVSEKGKAYTNYFGRCNVAEHEKLILLAQLKPEKDSDEAVTYSLGKFGQRALDFYSIHVTKESTHPVKPLAQIAGNRYASGPVGKALSDACMGTIASFLSKYQDIIIEHQKVVKGNQKRLESLRELAGKENLEYPSVTLPPQPHTKEGVDAYNEVIARVRMWVNLNLWQKLKLSRDDAKPLLRLKGFPSFPLVERQANEVDWWDMVCNVKKLINEKKEDGKVFWQNLAGYKRQEALRPYLSSEEDRKKGKKFARYQLGDLLLHLEKKHGEDWGKVYDEAWERIDKKVEGLSKHIKLEEERRSEDAQSKAALTDWLRAKASFVIEGLKEADKDEFCRCELKLQKWYGDLRGKPFAIEAENSILDISGFSKQYNCAFIWQKDGVKKLNLYLIINYFKGGKLRFKKIKPEAFEANRFYTVINKKSGEIVPMEVNFNFDDPNLIILPLAFGKRQGREFIWNDLLSLETGSLKLANGRVIEKTLYNRRTRQDEPALFVALTFERREVLDSSNIKPMNLIGVDRGENIPAVIALTDPEGCPLSRFKDSLGNPTHILRIGESYKEKQRTIQAKKEVEQRRAGGYSRKYASKAKNLADDMVRNTARDLLYYAVTQDAMLIFENLSRGFGRQGKRTFMAERQYTRMEDWLTAKLAYEGLPSKTYLSKTLAQYTSKTCSNCGFTITSADYDRVLEKLKKTATGWMTTINGKELKVEGQITYYNRYKRQNVVKDLSVELDRLSEESVNNDISSWTKGRSGEALSLLKKRFSHRPVQEKFVCLNCGFETHADEQAALNIARSWLFLRSQEYKKYQTNKTTGNTDKRAFVETWQSFYRKKLKEVWKPAV

SEQ ID NO: 89 - protein, 978 aa, synthetic construct
QEIKRINKIRRRLVKDSNTKKAGKTGPMKTLLVRVMTPDLRERLENLRKKPENIPQPISNTSSANLNKLLTDYTEMKKAILHVYWEEFQKDPVGLMSRVAQPASKKIDQNKLKPEMDEKGNLTTAGFACSQCGQPLFVYKLEQVSEKGKAYTNYFGRCNVAEHEKLILLAQLKPEKDSDEAVTYSLGKFGQRALDFYSIHVTKESTHPVKPLAQIAGNRYASGPVGKALSDACMGTIASFLSKYQDIIIEHQKVVKGNQKRLESLRELAGKENLEYPSVTLPPQPHTKEGVDAYNEVIARVRMWVNLNLWQKLKLSRDDAKPLLRLKGFPSFPLVERQANEVDWWDMVCNVKKLINEKKEDGKVFWQNLAGYKRQEALRPYLSSEEDRKKGKKFARYQLGDLLLHLEKKHGEDWGKVYDEAWERIDKKVEGLSKHIKLEEERRSEDAQSKAALTDWLRAKASFVIEGLKEADKDEFCRCELKLQKWYGDLRGKPFAIEAENSILDISGFSKQYNCAFIWQKDGVKKLNLYLIINYFKGGKLRFKKIKPEAFEANRFYTVINKKSGEIVPMEVNFNFDDPNLIILPLAFGKRQGREFIWNDLLSLETGSLKLANGRVIEKTLYNRRTRQDEPALFVALTFERREVLDSSNIKPMNLIGVDRGENIPAVIALTDPEGCPLSRFKDSLGNPTHILRIGESYKEKQRTIQAKKEVEQRRAGGYSRKYASKAKNLADDMVRNTARDLLYYAVTQDAMLIFENLSRGFGRQGKRTFMAERQYTRMEDWLTAKLAYEGLPSKTYLSKTLAQYTSKTCSNCGFTITSADYDRVLEKLKKTATGWMTTINGKELKVEGQITYYNRYKRQNVVKDLSVELDRLSEESVNNDISSWTKGRSGEALSLLKKRFSHRPVQEKFVCLNCGFETHADEQAALNIARSWLFLRSQEYKKYQTNKTTGNTDKRAFVETWQSFYRKKLKEVWKPAV

SEQ ID NO: 90 - protein, 978 aa, synthetic construct
QEIKRINKIRRRLVKDSNTKKAGKTGPMKTLLVRVMTPDLRERLENLRKKPENIPQPISNTSQANLNKLLTDYTEMKKAILHVYWEEFQKDPVGLMSRVAQPASKKIDQNKLKPEMDEKGNLTTAGFACSQCGQPLFVYKLEQVSEKGKAYTNYFGRCNVAEHEKLILLAQLKPEKDSDEAVTYSLGKFGQRALDFYSIHVTKESTHPVKPLAQIAGNRYASGPVGKALSDACMGTIASFLSKYQDIIIEHQKVVKGNQKRLESLRELAGKENLEYPSVTLPPQPHTKEGVDAYNEVIARVRMWVNLNLWQKLKLSRDDAKPLLRLKGFPSFPLVERQANEVDWWDMVCNVKKLINEKKEDGKVFWQNLAGYKRQEALRPYLSSEEDRKKGKKFARYQLGDLLLHLEKKHGEDWGKVYDEAWERIDKKVEGLSKHIKLEEERRSEDAQSKAALTDWLRAKASFVIEGLKEADKDEFCRCELKLQKWYGDLRGKPFAIEAENSILDISGFSKQYNCAFIWQKDGVKKLNLYLIINYFKGGKLRFKKIKPEAFEANRFYTVINKKSGEIVPMEVNFNFDDPNLIILPLAFGKRQGREFIWNDLLSLETGSLKLANGRVIEKTLYNRRTRQDEPALFVALTFERREVLDSSNIKPMNLIGVDRGENIPAVIALTDPEGCPLSRFKDSLGNPTHILRIGESYKEKQRTIQAKKEVEQRRAGGYSRKYASKAKNLADDMVRNTARDLLYYAVTQDAMLIFENLSRGFGRQGKRTFMAERQYTRMEDWLTAKLAYEGLPSKTYLSKTLAQYTSKTCSNCGFTITSADYDRVLEKLKKTATGWMTTINGKELKVEGQITYYNRYKRQNVVKDLSVELDRLSEESVNNDISSWTKGRSGEALSLLKKRFSHRPVQEKFVCLNCGFETHADEQAALNIARSWLFLRSQEYKKYQTNKTTGNTDKRAFVETWQSFYRKKLKEVWKPAV

SEQ ID NO: 91 - protein, 978 aa, synthetic construct
QEIKRINKIRRRLVKDSNTKKAGKTGPMKTLLVRVMTPDLRERLENLRKKPENIPQPISNTSRANLNKLLTDYTEMKKAITHVYWEEFQKDPVGLMSRVAQPASKKIDQNKLKPEMDEKGNLTTAGFACSQCGQPLFVYKLEQVSEKGKAYTNYFGRCNVAEHEKLILLAQLKPEKDSDEAVTYSLGKFGQRALDFYSIHVTKESTHPVKPLAQIAGNRYASGPVGKALSDACMGTIASFLSKYQDIIIEHQKVVKGNQKRLESLRELAGKENLEYPSVTLPPQPHTKEGVDAYNEVIARVRMWVNLNLWQKLKLSRDDAKPLLRLKGFPSFPLVERQANEVDWWDMVCNVKKLINEKKEDGKVFWQNLAGYKRQEALRPYLSSEEDRKKGKKFARYQLGDLLLHLEKKHGEDWGKVYDEAWERIDKKVEGLSKHIKLEEERRSEDAQSKAALTDWLRAKASFVIEGLKEADKDEFCRCELKLQKWYGDLRGKPFAIEAENSILDISGFSKQYNCAFIWQKDGVKKLNLYLIINYFKGGKLRFKKIKPEAFEANRFYTVINKKSGEIVPMEVNFNFDDPNLIILPLAFGKRQGREFIWNDLLSLETGSLKLANGRVIEKTLYNRRTRQDEPALFVALTFERREVLDSSNIKPMNLIGVDRGENIPAVIALTDPEGCPLSRFKDSLGNPTHILRIGESYKEKQRTIQAKKEVEQRRAGGYSRKYASKAKNLADDMVRNTARDLLYYAVTQDAMLIFENLSRGFGRQGKRTFMAERQYTRMEDWLTAKLAYEGLPSKTYLSKTLAQYTSKTCSNCGFTITSADYDRVLEKLKKTATGWMTTINGKELKVEGQITYYNRYKRQNVVKDLSVELDRLSEESVNNDISSWTKGRSGEALSLLKKRFSHRPVQEKFVCLNCGFETHADEQAALNIARSWLFLRSQEYKKYQTNKTTGNTDKRAFVETWQSFYRKKLKEVWKPAV

SEQ ID NO: 92 - protein, 978 aa, synthetic construct
QEIKRINKIRRRLVKDSNTKKAGKTGPMKTLLVRVMTPDLRERLENLRKKPENIPQPISNTSRANLNKLLTDYTEMKKAILHVYGEEFQKDPVGLMSRVAQPASKKIDQNKLKPEMDEKGNLTTAGFACSQCGQPLFVYKLEQVSEKGKAYTNYFGRCNVAEHEKLILLAQLKPEKDSDEAVTYSLGKFGQRALDFYSIHVTKESTHPVKPLAQIAGNRYASGPVGKALSDACMGTIASFLSKYQDIIIEHQKVVKGNQKRLESLRELAGKENLEYPSVTLPPQPHTKEGVDAYNEVIARVRMWVNLNLWQKLKLSRDDAKPLLRLKGFPSFPLVERQANEVDWWDMVCNVKKLINEKKEDGKVFWQNLAGYKRQEALRPYLSSEEDRKKGKKFARYQLGDLLLHLEKKHGEDWGKVYDEAWERIDKKVEGLSKHIKLEEERRSEDAQSKAALTDWLRAKASFVIEGLKEADKDEFCRCELKLQKWYGDLRGKPFAIEAENSILDISGFSKQYNCAFIWQKDGVKKLNLYLIINYFKGGKLRFKKIKPEAFEANRFYTVINKKSGEIVPMEVNFNFDDPNLIILPLAFGKRQGREFIWNDLLSLETGSLKLANGRVIEKTLYNRRTRQDEPALFVALTFERREVLDSSNIKPMNLIGVDRGENIPAVIALTDPEGCPLSRFKDSLGNPTHILRIGESYKEKQRTIQAKKEVEQRRAGGYSRKYASKAKNLADDMVRNTARDLLYYAVTQDAMLIFENLSRGFGRQGKRTFMAERQYTRMEDWLTAKLAYEGLPSKTYLSKTLAQYTSKTCSNCGFTITSADYDRVLEKLKKTATGWMTTINGKELKVEGQITYYNRYKRQNVVKDLSVELDRLSEESVNNDISSWTKGRSGEALSLLKKRFSHRPVQEKFVCLNCGFETHADEQAALNIARSWLFLRSQEYKKYQTNKTTGNTDKRAFVETWQSFYRKKLKEVWKPAV

SEQ ID NO: 93 - protein, 978 aa, synthetic construct
QEIKRINKIRRRLVKDSNTKKAGKTGPMKTLLVRVMTPDLRERLENLRKKPENIPQPISNTSRANLNKLLTDYTEMKKAILHVYDEEFQKDPVGLMSRVAQPASKKIDQNKLKPEMDEKGNLTTAGFACSQCGQPLFVYKLEQVSEKGKAYTNYFGRCNVAEHEKLILLAQLKPEKDSDEAVTYSLGKFGQRALDFYSIHVTKESTHPVKPLAQIAGNRYASGPVGKALSDACMGTIASFLSKYQDIIIEHQKVVKGNQKRLESLRELAGKENLEYPSVTLPPQPHTKEGVDAYNEVIARVRMWVNLNLWQKLKLSRDDAKPLLRLKGFPSFPLVERQANEVDWWDMVCNVKKLINEKKEDGKVFWQNLAGYKRQEALRPYLSSEEDRKKGKKFARYQLGDLLLHLEKKHGEDWGKVYDEAWERIDKKVEGLSKHIKLEEERRSEDAQSKAALTDWLRAKASFVIEGLKEADKDEFCRCELKLQKWYGDLRGKPFAIEAENSILDISGFSKQYNCAFIWQKDGVKKLNLYLIINYFKGGKLRFKKIKPEAFEANRFYTVINKKSGEIVPMEVNFNFDDPNLIILPLAFGKRQGREFIWNDLLSLETGSLKLANGRVIEKTLYNRRTRQDEPALFVALTFERREVLDSSNIKPMNLIGVDRGENIPAVIALTDPEGCPLSRFKDSLGNPTHILRIGESYKEKQRTIQAKKEVEQRRAGGYSRKYASKAKNLADDMVRNTARDLLYYAVTQDAMLIFENLSRGFGRQGKRTFMAERQYTRMEDWLTAKLAYEGLPSKTYLSKTLAQYTSKTCSNCGFTITSADYDRVLEKLKKTATGWMTTINGKELKVEGQITYYNRYKRQNVVKDLSVELDRLSEESVNNDISSWTKGRSGEALSLLKKRFSHRPVQEKFVCLNCGFETHADEQAALNIARSWLFLRSQEYKKYQTNKTTGNTDKRAFVETWQSFYRKKLKEVWKPAV

SEQ ID NO: 94 - protein, 978 aa, synthetic construct
QEIKRINKIRRRLVKDSNTKKAGKTGPMKTLLVRVMTPDLRERLENLRKKPENIPQPISNTSRANLNKLLTDYTEMKKAILHVYAEEFQKDPVGLMSRVAQPASKKIDQNKLKPEMDEKGNLTTAGFACSQCGQPLFVYKLEQVSEKGKAYTNYFGRCNVAEHEKLILLAQLKPEKDSDEAVTYSLGKFGQRALDFYSIHVTKESTHPVKPLAQIAGNRYASGPVGKALSDACMGTIASFLSKYQDIIIEHQKVVKGNQKRLESLRELAGKENLEYPSVTLPPQPHTKEGVDAYNEVIARVRMWVNLNLWQKLKLSRDDAKPLLRLKGFPSFPLVERQANEVDWWDMVCNVKKLINEKKEDGKVFWQNLAGYKRQEALRPYLSSEEDRKKGKKFARYQLGDLLLHLEKKHGEDWGKVYDEAWERIDKKVEGLSKHIKLEEERRSEDAQSKAALTDWLRAKASFVIEGLKEADKDEFCRCELKLQKWYGDLRGKPFAIEAENSILDISGFSKQYNCAFIWQKDGVKKLNLYLIINYFKGGKLRFKKIKPEAFEANRFYTVINKKSGEIVPMEVNFNFDDPNLIILPLAFGKRQGREFIWNDLLSLETGSLKLANGRVIEKTLYNRRTRQDEPALFVALTFERREVLDSSNIKPMNLIGVDRGENIPAVIALTDPEGCPLSRFKDSLGNPTHILRIGESYKEKQRTIQAKKEVEQRRAGGYSRKYASKAKNLADDMVRNTARDLLYYAVTQDAMLIFENLSRGFGRQGKRTFMAERQYTRMEDWLTAKLAYEGLPSKTYLSKTLAQYTSKTCSNCGFTITSADYDRVLEKLKKTATGWMTTINGKELKVEGQITYYNRYKRQNVVKDLSVELDRLSEESVNNDISSWTKGRSGEALSLLKKRFSHRPVQEKFVCLNCGFETHADEQAALNIARSWLFLRSQEYKKYQTNKTTGNTDKRAFVETWQSFYRKKLKEVWKPAV

SEQ ID NO: 95 - protein, 978 aa, synthetic construct
QEIKRINKIRRRLVKDSNTKKAGKTGPMKTLLVRVMTPDLRERLENLRKKPENIPQPISNTSRANLNKLLTDYTEMKKAILHVYREEFQKDPVGLMSRVAQPASKKIDQNKLKPEMDEKGNLTTAGFACSQCGQPLFVYKLEQVSEKGKAYTNYFGRCNVAEHEKLILLAQLKPEKDSDEAVTYSLGKFGQRALDFYSIHVTKESTHPVKPLAQIAGNRYASGPVGKALSDACMGTIASFLSKYQDIIIEHQKVVKGNQKRLESLRELAGKENLEYPSVTLPPQPHTKEGVDAYNEVIARVRMWVNLNLWQKLKLSRDDAKPLLRLKGFPSFPLVERQANEVDWWDMVCNVKKLINEKKEDGKVFWQNLAGYKRQEALRPYLSSEEDRKKGKKFARYQLGDLLLHLEKKHGEDWGKVYDEAWERIDKKVEGLSKHIKLEEERRSEDAQSKAALTDWLRAKASFVIEGLKEADKDEFCRCELKLQKWYGDLRGKPFAIEAENSILDISGFSKQYNCAFIWQKDGVKKLNLYLIINYFKGGKLRFKKIKPEAFEANRFYTVINKKSGEIVPMEVNFNFDDPNLIILPLAFGKRQGREFIWNDLLSLETGSLKLANGRVIEKTLYNRRTRQDEPALFVALTFERREVLDSSNIKPMNLIGVDRGENIPAVIALTDPEGCPLSRFKDSLGNPTHILRIGESYKEKQRTIQAKKEVEQRRAGGYSRKYASKAKNLADDMVRNTARDLLYYAVTQDAMLIFENLSRGFGRQGKRTFMAERQYTRMEDWLTAKLAYEGLPSKTYLSKTLAQYTSKTCSNCGFTITSADYDRVLEKLKKTATGWMTTINGKELKVEGQITYYNRYKRQNVVKDLSVELDRLSEESVNNDISSWTKGRSGEALSLLKKRFSHRPVQEKFVCLNCGFETHADEQAALNIARSWLFLRSQEYKKYQTNKTTGNTDKRAFVETWQSFYRKKLKEVWKPAV

SEQ ID NO: 96 - protein, 978 aa, synthetic construct
QEIKRINKIRRRLVKDSNTKKAGKTGPMKTLLVRVMTPDLRERLENLRKKPENIPQPISNTSRANLNKLLTDYTEMKKAILHVYWEEFQKDPVGLMSRVAQPASKKIDQNKLKPEMDEKGNLTTAGFACSQCGQPLFVYKLEQVSEKGKAYTNYFGRCNVAEHEKLIKLAQLKPEKDSDEAVTYSLGKFGQRALDFYSIHVTKESTHPVKPLAQIAGNRYASGPVGKALSDACMGTIASFLSKYQDIIIEHQKVVKGNQKRLESLRELAGKENLEYPSVTLPPQPHTKEGVDAYNEVIARVRMWVNLNLWQKLKLSRDDAKPLLRLKGFPSFPLVERQANEVDWWDMVCNVKKLINEKKEDGKVFWQNLAGYKRQEALRPYLSSEEDRKKGKKFARYQLGDLLLHLEKKHGEDWGKVYDEAWERIDKKVEGLSKHIKLEEERRSEDAQSKAALTDWLRAKASFVIEGLKEADKDEFCRCELKLQKWYGDLRGKPFAIEAENSILDISGFSKQYNCAFIWQKDGVKKLNLYLIINYFKGGKLRFKKIKPEAFEANRFYTVINKKSGEIVPMEVNFNFDDPNLIILPLAFGKRQGREFIWNDLLSLETGSLKLANGRVIEKTLYNRRTRQDEPALFVALTFERREVLDSSNIKPMNLIGVDRGENIPAVIALTDPEGCPLSRFKDSLGNPTHILRIGESYKEKQRTIQAKKEVEQRRAGGYSRKYASKAKNLADDMVRNTARDLLYYAVTQDAMLIFENLSRGFGRQGKRTFMAERQYTRMEDWLTAKLAYEGLPSKTYLSKTLAQYTSKTCSNCGFTITSADYDRVLEKLKKTATGWMTTINGKELKVEGQITYYNRYKRQNVVKDLSVELDRLSEESVNNDISSWTKGRSGEALSLLKKRFSHRPVQEKFVCLNCGFETHADEQAALNIARSWLFLRSQEYKKYQTNKTTGNTDKRAFVETWQSFYRKKLKEVWKPAV

SEQ ID NO: 97 - protein, 978 aa, synthetic construct
QEIKRINKIRRRLVKDSNTKKAGKTGPMKTLLVRVMTPDLRERLENLRKKPENIPQPISNTSRANLNKLLTDYTEMKKAILHVYWEEFQKDPVGLMSRVAQPASKKIDQNKLKPEMDEKGNLTTAGFACSQCGQPLFVYKLEQVSEKGKAYTNYFGRCNVAEHEKLILLYQLKPEKDSDEAVTYSLGKFGQRALDFYSIHVTKESTHPVKPLAQIAGNRYASGPVGKALSDACMGTIASFLSKYQDIIIEHQKVVKGNQKRLESLRELAGKENLEYPSVTLPPQPHTKEGVDAYNEVIARVRMWVNLNLWQKLKLSRDDAKPLLRLKGFPSFPLVERQANEVDWWDMVCNVKKLINEKKEDGKVFWQNLAGYKRQEALRPYLSSEEDRKKGKKFARYQLGDLLLHLEKKHGEDWGKVYDEAWERIDKKVEGLSKHIKLEEERRSEDAQSKAALTDWLRAKASFVIEGLKEADKDEFCRCELKLQKWYGDLRGKPFAIEAENSILDISGFSKQYNCAFIWQKDGVKKLNLYLIINYFKGGKLRFKKIKPEAFEANRFYTVINKKSGEIVPMEVNFNFDDPNLIILPLAFGKRQGREFIWNDLLSLETGSLKLANGRVIEKTLYNRRTRQDEPALFVALTFERREVLDSSNIKPMNLIGVDRGENIPAVIALTDPEGCPLSRFKDSLGNPTHILRIGESYKEKQRTIQAKKEVEQRRAGGYSRKYASKAKNLADDMVRNTARDLLYYAVTQDAMLIFENLSRGFGRQGKRTFMAERQYTRMEDWLTAKLAYEGLPSKTYLSKTLAQYTSKTCSNCGFTITSADYDRVLEKLKKTATGWMTTINGKELKVEGQITYYNRYKRQNVVKDLSVELDRLSEESVNNDISSWTKGRSGEALSLLKKRFSHRPVQEKFVCLNCGFETHADEQAALNIARSWLFLRSQEYKKYQTNKTTGNTDKRAFVETWQSFYRKKLKEVWKPAV

SEQ ID NO: 98 - protein, 978 aa, synthetic construct
QEIKRINKIRRRLVKDSNTKKAGKTGPMKTLLVRVMTPDLRERLENLRKKPENIPQPISNTSRANLNKLLTDYTEMKKAILHVYWEEFQKDPVGLMSRVAQPASKKIDQNKLKPEMDEKGNLTTAGFACSQCGQPLFVYKLEQVSEKGKAYTNYFGRCNVAEHEKLILLSQLKPEKDSDEAVTYSLGKFGQRALDFYSIHVTKESTHPVKPLAQIAGNRYASGPVGKALSDACMGTIASFLSKYQDIIIEHQKVVKGNQKRLESLRELAGKENLEYPSVTLPPQPHTKEGVDAYNEVIARVRMWVNLNLWQKLKLSRDDAKPLLRLKGFPSFPLVERQANEVDWWDMVCNVKKLINEKKEDGKVFWQNLAGYKRQEALRPYLSSEEDRKKGKKFARYQLGDLLLHLEKKHGEDWGKVYDEAWERIDKKVEGLSKHIKLEEERRSEDAQSKAALTDWLRAKASFVIEGLKEADKDEFCRCELKLQKWYGDLRGKPFAIEAENSILDISGFSKQYNCAFIWQKDGVKKLNLYLIINYFKGGKLRFKKIKPEAFEANRFYTVINKKSGEIVPMEVNFNFDDPNLIILPLAFGKRQGREFIWNDLLSLETGSLKLANGRVIEKTLYNRRTRQDEPALFVALTFERREVLDSSNIKPMNLIGVDRGENIPAVIALTDPEGCPLSRFKDSLGNPTHILRIGESYKEKQRTIQAKKEVEQRRAGGYSRKYASKAKNLADDMVRNTARDLLYYAVTQDAMLIFENLSRGFGRQGKRTFMAERQYTRMEDWLTAKLAYEGLPSKTYLSKTLAQYTSKTCSNCGFTITSADYDRVLEKLKKTATGWMTTINGKELKVEGQITYYNRYKRQNVVKDLSVELDRLSEESVNNDISSWTKGRSGEALSLLKKRFSHRPVQEKFVCLNCGFETHADEQAALNIARSWLFLRSQEYKKYQTNKTTGNTDKRAFVETWQSFYRKKLKEVWKPAV

SEQ ID NO: 99 - protein, 978 aa, synthetic construct
QEIKRINKIRRRLVKDSNTKKAGKTGPMKTLLVRVMTPDLRERLENLRKKPENIPQPISNTSRANLNKLLTDYTEMKKAILHVYWEEFQKDPVGLMSRVAQPASKKIDQNKLKPEMDEKGNLTTAGFACSQCGQPLFVYKLEQVSEKGKAYTNYFGRCNVAEHEKLILLAQLKPPKDSDEAVTYSLGKFGQRALDFYSIHVTKESTHPVKPLAQIAGNRYASGPVGKALSDACMGTIASFLSKYQDIIIEHQKVVKGNQKRLESLRELAGKENLEYPSVTLPPQPHTKEGVDAYNEVIARVRMWVNLNLWQKLKLSRDDAKPLLRLKGFPSFPLVERQANEVDWWDMVCNVKKLINEKKEDGKVFWQNLAGYKRQEALRPYLSSEEDRKKGKKFARYQLGDLLLHLEKKHGEDWGKVYDEAWERIDKKVEGLSKHIKLEEERRSEDAQSKAALTDWLRAKASFVIEGLKEADKDEFCRCELKLQKWYGDLRGKPFAIEAENSILDISGFSKQYNCAFIWQKDGVKKLNLYLIINYFKGGKLRFKKIKPEAFEANRFYTVINKKSGEIVPMEVNFNFDDPNLIILPLAFGKRQGREFIWNDLLSLETGSLKLANGRVIEKTLYNRRTRQDEPALFVALTFERREVLDSSNIKPMNLIGVDRGENIPAVIALTDPEGCPLSRFKDSLGNPTHILRIGESYKEKQRTIQAKKEVEQRRAGGYSRKYASKAKNLADDMVRNTARDLLYYAVTQDAMLIFENLSRGFGRQGKRTFMAERQYTRMEDWLTAKLAYEGLPSKTYLSKTLAQYTSKTCSNCGFTITSADYDRVLEKLKKTATGWMTTINGKELKVEGQITYYNRYKRQNVVKDLSVELDRLSEESVNNDISSWTKGRSGEALSLLKKRFSHRPVQEKFVCLNCGFETHADEQAALNIARSWLFLRSQEYKKYQTNKTTGNTDKRAFVETWQSFYRKKLKEVWKPAV

SEQ ID NO: 100 - protein, 977 aa, synthetic construct
QEIKRINKIRRRLVKDSNTKKAGKTGPMKTLLVRVMTPDLRERLENLRKKPENIPQPISNTSRANLNKLLTDYTEMKKAILHVYWEEFQKDPVGLMSRVAQPASKKIDQNKLKPEMDEKGNLTTAGFACSQCGQPLFVYKLEQVSEKGKAYTNYFGRCNVAEHEKLILLAQLKPEKDSDEAVTYSLGKFGQRALDFYSIHVTKESTHPVKPLAQIAGNRYASPVGKALSDACMGTIASFLSKYQDIIIEHQKVVKGNQKRLESLRELAGKENLEYPSVTLPPQPHTKEGVDAYNEVIARVRMWVNLNLWQKLKLSRDDAKPLLRLKGFPSFPLVERQANEVDWWDMVCNVKKLINEKKEDGKVFWQNLAGYKRQEALRPYLSSEEDRKKGKKFARYQLGDLLLHLEKKHGEDWGKVYDEAWERIDKKVEGLSKHIKLEEERRSEDAQSKAALTDWLRAKASFVIEGLKEADKDEFCRCELKLQKWYGDLRGKPFAIEAENSILDISGFSKQYNCAFIWQKDGVKKLNLYLIINYFKGGKLRFKKIKPEAFEANRFYTVINKKSGEIVPMEVNFNFDDPNLIILPLAFGKRQGREFIWNDLLSLETGSLKLANGRVIEKTLYNRRTRQDEPALFVALTFERREVLDSSNIKPMNLIGVDRGENIPAVIALTDPEGCPLSRFKDSLGNPTHILRIGESYKEKQRTIQAKKEVEQRRAGGYSRKYASKAKNLADDMVRNTARDLLYYAVTQDAMLIFENLSRGFGRQGKRTFMAERQYTRMEDWLTAKLAYEGLPSKTYLSKTLAQYTSKTCSNCGFTITSADYDRVLEKLKKTATGWMTTINGKELKVEGQITYYNRYKRQNVVKDLSVELDRLSEESVNNDISSWTKGRSGEALSLLKKRFSHRPVQEKFVCLNCGFETHADEQAALNIARSWLFLRSQEYKKYQTNKTTGNTDKRAFVETWQSFYRKKLKEVWKPAV

SEQ ID NO: 101 - protein, 978 aa, synthetic construct
QEIKRINKIRRRLVKDSNTKKAGKTGPMKTLLVRVMTPDLRERLENLRKKPENIPQPISNTSRANLNKLLTDYTEMKKAILHVYWEEFQKDPVGLMSRVAQPASKKIDQNKLKPEMDEKGNLTTAGFACSQCGQPLFVYKLEQVSEKGKAYTNYFGRCNVAEHEKLILLAQLKPEKDSDEAVTYSLGKFGQRALDFYSIHVTKESTHPVKPLAQIAGNRYASGPVGKALSDACMGTIASFLSKYQDIIIEHQKVVKGNQKRLESLRELAGKENLEYPSVTLPPQPHTGEGVDAYNEVIARVRMWVNLNLWQKLKLSRDDAKPLLRLKGFPSFPLVERQANEVDWWDMVCNVKKLINEKKEDGKVFWQNLAGYKRQEALRPYLSSEEDRKKGKKFARYQLGDLLLHLEKKHGEDWGKVYDEAWERIDKKVEGLSKHIKLEEERRSEDAQSKAALTDWLRAKASFVIEGLKEADKDEFCRCELKLQKWYGDLRGKPFAIEAENSILDISGFSKQYNCAFIWQKDGVKKLNLYLIINYFKGGKLRFKKIKPEAFEANRFYTVINKKSGEIVPMEVNFNFDDPNLIILPLAFGKRQGREFIWNDLLSLETGSLKLANGRVIEKTLYNRRTRQDEPALFVALTFERREVLDSSNIKPMNLIGVDRGENIPAVIALTDPEGCPLSRFKDSLGNPTHILRIGESYKEKQRTIQAKKEVEQRRAGGYSRKYASKAKNLADDMVRNTARDLLYYAVTQDAMLIFENLSRGFGRQGKRTFMAERQYTRMEDWLTAKLAYEGLPSKTYLSKTLAQYTSKTCSNCGFTITSADYDRVLEKLKKTATGWMTTINGKELKVEGQITYYNRYKRQNVVKDLSVELDRLSEESVNNDISSWTKGRSGEALSLLKKRFSHRPVQEKFVCLNCGFETHADEQAALNIARSWLFLRSQEYKKYQTNKTTGNTDKRAFVETWQSFYRKKLKEVWKPAV

SEQ ID NO: 102 - protein, 978 aa, synthetic construct
QEIKRINKIRRRLVKDSNTKKAGKTGPMKTLLVRVMTPDLRERLENLRKKPENIPQPISNTSRANLNKLLTDYTEMKKAILHVYWEEFQKDPVGLMSRVAQPASKKIDQNKLKPEMDEKGNLTTAGFACSQCGQPLFVYKLEQVSEKGKAYTNYFGRCNVAEHEKLILLAQLKPEKDSDEAVTYSLGKFGQRALDFYSIHVTKESTHPVKPLAQIAGNRYASGPVGKALSDACMGTIASFLSKYQDIIIEHQKVVKGNQKRLESLRELAGKENLEYPSVTLPPQPHTSEGVDAYNEVIARVRMWVNLNLWQKLKLSRDDAKPLLRLKGFPSFPLVERQANEVDWWDMVCNVKKLINEKKEDGKVFWQNLAGYKRQEALRPYLSSEEDRKKGKKFARYQLGDLLLHLEKKHGEDWGKVYDEAWERIDKKVEGLSKHIKLEEERRSEDAQSKAALTDWLRAKASFVIEGLKEADKDEFCRCELKLQKWYGDLRGKPFAIEAENSILDISGFSKQYNCAFIWQKDGVKKLNLYLIINYFKGGKLRFKKIKPEAFEANRFYTVINKKSGEIVPMEVNFNFDDPNLIILPLAFGKRQGREFIWNDLLSLETGSLKLANGRVIEKTLYNRRTRQDEPALFVALTFERREVLDSSNIKPMNLIGVDRGENIPAVIALTDPEGCPLSRFKDSLGNPTHILRIGESYKEKQRTIQAKKEVEQRRAGGYSRKYASKAKNLADDMVRNTARDLLYYAVTQDAMLIFENLSRGFGRQGKRTFMAERQYTRMEDWLTAKLAYEGLPSKTYLSKTLAQYTSKTCSNCGFTITSADYDRVLEKLKKTATGWMTTINGKELKVEGQITYYNRYKRQNVVKDLSVELDRLSEESVNNDISSWTKGRSGEALSLLKKRFSHRPVQEKFVCLNCGFETHADEQAALNIARSWLFLRSQEYKKYQTNKTTGNTDKRAFVETWQSFYRKKLKEVWKPAV

SEQ ID NO: 103 - protein, 978 aa, synthetic construct
QEIKRINKIRRRLVKDSNTKKAGKTGPMKTLLVRVMTPDLRERLENLRKKPENIPQPISNTSRANLNKLLTDYTEMKKAILHVYWEEFQKDPVGLMSRVAQPASKKIDQNKLKPEMDEKGNLTTAGFACSQCGQPLFVYKLEQVSEKGKAYTNYFGRCNVAEHEKLILLAQLKPEKDSDEAVTYSLGKFGQRALDFYSIHVTKESTHPVKPLAQIAGNRYASGPVGKALSDACMGTIASFLSKYQDIIIEHQKVVKGNQKRLESLRELAGKENLEYPSVTLPPQPHTKEGLDAYNEVIARVRMWVNLNLWQKLKLSRDDAKPLLRLKGFPSFPLVERQANEVDWWDMVCNVKKLINEKKEDGKVFWQNLAGYKRQEALRPYLSSEEDRKKGKKFARYQLGDLLLHLEKKHGEDWGKVYDEAWERIDKKVEGLSKHIKLEEERRSEDAQSKAALTDWLRAKASFVIEGLKEADKDEFCRCELKLQKWYGDLRGKPFAIEAENSILDISGFSKQYNCAFIWQKDGVKKLNLYLIINYFKGGKLRFKKIKPEAFEANRFYTVINKKSGEIVPMEVNFNFDDPNLIILPLAFGKRQGREFIWNDLLSLETGSLKLANGRVIEKTLYNRRTRQDEPALFVALTFERREVLDSSNIKPMNLIGVDRGENIPAVIALTDPEGCPLSRFKDSLGNPTHILRIGESYKEKQRTIQAKKEVEQRRAGGYSRKYASKAKNLADDMVRNTARDLLYYAVTQDAMLIFENLSRGFGRQGKRTFMAERQYTRMEDWLTAKLAYEGLPSKTYLSKTLAQYTSKTCSNCGFTITSADYDRVLEKLKKTATGWMTTINGKELKVEGQITYYNRYKRQNVVKDLSVELDRLSEESVNNDISSWTKGRSGEALSLLKKRFSHRPVQEKFVCLNCGFETHADEQAALNIARSWLFLRSQEYKKYQTNKTTGNTDKRAFVETWQSFYRKKLKEVWKPAV

SEQ ID NO: 104 - protein, 978 aa, synthetic construct
QEIKRINKIRRRLVKDSNTKKAGKTGPMKTLLVRVMTPDLRERLENLRKKPENIPQPISNTSRANLNKLLTDYTEMKKAILHVYWEEFQKDPVGLMSRVAQPASKKIDQNKLKPEMDEKGNLTTAGFACSQCGQPLFVYKLEQVSEKGKAYTNYFGRCNVAEHEKLILLAQLKPEKDSDEAVTYSLGKFGQRALDFYSIHVTKESTHPVKPLAQIAGNRYASGPVGKALSDACMGTIASFLSKYQDIIIEHQKVVKGNQKRLESLRELAGKENLEYPSVTLPPQPHTKEGVDAYNEVIARVRTWVNLNLWQKLKLSRDDAKPLLRLKGFPSFPLVERQANEVDWWDMVCNVKKLINEKKEDGKVFWQNLAGYKRQEALRPYLSSEEDRKKGKKFARYQLGDLLLHLEKKHGEDWGKVYDEAWERIDKKVEGLSKHIKLEEERRSEDAQSKAALTDWLRAKASFVIEGLKEADKDEFCRCELKLQKWYGDLRGKPFAIEAENSILDISGFSKQYNCAFIWQKDGVKKLNLYLIINYFKGGKLRFKKIKPEAFEANRFYTVINKKSGEIVPMEVNFNFDDPNLIILPLAFGKRQGREFIWNDLLSLETGSLKLANGRVIEKTLYNRRTRQDEPALFVALTFERREVLDSSNIKPMNLIGVDRGENIPAVIALTDPEGCPLSRFKDSLGNPTHILRIGESYKEKQRTIQAKKEVEQRRAGGYSRKYASKAKNLADDMVRNTARDLLYYAVTQDAMLIFENLSRGFGRQGKRTFMAERQYTRMEDWLTAKLAYEGLPSKTYLSKTLAQYTSKTCSNCGFTITSADYDRVLEKLKKTATGWMTTINGKELKVEGQITYYNRYKRQNVVKDLSVELDRLSEESVNNDISSWTKGRSGEALSLLKKRFSHRPVQEKFVCLNCGFETHADEQAALNIARSWLFLRSQEYKKYQTNKTTGNTDKRAFVETWQSFYRKKLKEVWKPAV

SEQ ID NO: 105 - protein, 978 aa, synthetic construct
QEIKRINKIRRRLVKDSNTKKAGKTGPMKTLLVRVMTPDLRERLENLRKKPENIPQPISNTSRANLNKLLTDYTEMKKAILHVYWEEFQKDPVGLMSRVAQPASKKIDQNKLKPEMDEKGNLTTAGFACSQCGQPLFVYKLEQVSEKGKAYTNYFGRCNVAEHEKLILLAQLKPEKDSDEAVTYSLGKFGQRALDFYSIHVTKESTHPVKPLAQIAGNRYASGPVGKALSDACMGTIASFLSKYQDIIIEHQKVVKGNQKRLESLRELAGKENLEYPSVTLPPQPHTKEGVDAYNEVIARVRWWVNLNLWQKLKLSRDDAKPLLRLKGFPSFPLVERQANEVDWWDMVCNVKKLINEKKEDGKVFWQNLAGYKRQEALRPYLSSEEDRKKGKKFARYQLGDLLLHLEKKHGEDWGKVYDEAWERIDKKVEGLSKHIKLEEERRSEDAQSKAALTDWLRAKASFVIEGLKEADKDEFCRCELKLQKWYGDLRGKPFAIEAENSILDISGFSKQYNCAFIWQKDGVKKLNLYLIINYFKGGKLRFKKIKPEAFEANRFYTVINKKSGEIVPMEVNFNFDDPNLIILPLAFGKRQGREFIWNDLLSLETGSLKLANGRVIEKTLYNRRTRQDEPALFVALTFERREVLDSSNIKPMNLIGVDRGENIPAVIALTDPEGCPLSRFKDSLGNPTHILRIGESYKEKQRTIQAKKEVEQRRAGGYSRKYASKAKNLADDMVRNTARDLLYYAVTQDAMLIFENLSRGFGRQGKRTFMAERQYTRMEDWLTAKLAYEGLPSKTYLSKTLAQYTSKTCSNCGFTITSADYDRVLEKLKKTATGWMTTINGKELKVEGQITYYNRYKRQNVVKDLSVELDRLSEESVNNDISSWTKGRSGEALSLLKKRFSHRPVQEKFVCLNCGFETHADEQAALNIARSWLFLRSQEYKKYQTNKTTGNTDKRAFVETWQSFYRKKLKEVWKPAV

SEQ ID NO: 106 - protein, 978 aa, synthetic construct
QEIKRINKIRRRLVKDSNTKKAGKTGPMKTLLVRVMTPDLRERLENLRKKPENIPQPISNTSRANLNKLLTDYTEMKKAILHVYWEEFQKDPVGLMSRVAQPASKKIDQNKLKPEMDEKGNLTTAGFACSQCGQPLFVYKLEQVSEKGKAYTNYFGRCNVAEHEKLILLAQLKPEKDSDEAVTYSLGKFGQRALDFYSIHVTKESTHPVKPLAQIAGNRYASGPVGKALSDACMGTIASFLSKYQDIIIEHQKVVKGNQKRLESLRELAGKENLEYPSVTLPPQPHTKEGVDAYNEVIARVRMWVNLNLWQKLKLSRDDAKPLLRLKNFPSFPLVERQANEVDWWDMVCNVKKLINEKKEDGKVFWQNLAGYKRQEALRPYLSSEEDRKKGKKFARYQLGDLLLHLEKKHGEDWGKVYDEAWERIDKKVEGLSKHIKLEEERRSEDAQSKAALTDWLRAKASFVIEGLKEADKDEFCRCELKLQKWYGDLRGKPFAIEAENSILDISGFSKQYNCAFIWQKDGVKKLNLYLIINYFKGGKLRFKKIKPEAFEANRFYTVINKKSGEIVPMEVNFNFDDPNLIILPLAFGKRQGREFIWNDLLSLETGSLKLANGRVIEKTLYNRRTRQDEPALFVALTFERREVLDSSNIKPMNLIGVDRGENIPAVIALTDPEGCPLSRFKDSLGNPTHILRIGESYKEKQRTIQAKKEVEQRRAGGYSRKYASKAKNLADDMVRNTARDLLYYAVTQDAMLIFENLSRGFGRQGKRTFMAERQYTRMEDWLTAKLAYEGLPSKTYLSKTLAQYTSKTCSNCGFTITSADYDRVLEKLKKTATGWMTTINGKELKVEGQITYYNRYKRQNVVKDLSVELDRLSEESVNNDISSWTKGRSGEALSLLKKRFSHRPVQEKFVCLNCGFETHADEQAALNIARSWLFLRSQEYKKYQTNKTTGNTDKRAFVETWQSFYRKKLKEVWKPAV

SEQ ID NO: 107 - protein, 978 aa, synthetic construct
QEIKRINKIRRRLVKDSNTKKAGKTGPMKTLLVRVMTPDLRERLENLRKKPENIPQPISNTSRANLNKLLTDYTEMKKAILHVYWEEFQKDPVGLMSRVAQPASKKIDQNKLKPEMDEKGNLTTAGFACSQCGQPLFVYKLEQVSEKGKAYTNYFGRCNVAEHEKLILLAQLKPEKDSDEAVTYSLGKFGQRALDFYSIHVTKESTHPVKPLAQIAGNRYASGPVGKALSDACMGTIASFLSKYQDIIIEHQKVVKGNQKRLESLRELAGKENLEYPSVTLPPQPHTKEGVDAYNEVIARVRMWVNLNLWQKLKLSRDDAKPLLRLKGFPQFPLVERQANEVDWWDMVCNVKKLINEKKEDGKVFWQNLAGYKRQEALRPYLSSEEDRKKGKKFARYQLGDLLLHLEKKHGEDWGKVYDEAWERIDKKVEGLSKHIKLEEERRSEDAQSKAALTDWLRAKASFVIEGLKEADKDEFCRCELKLQKWYGDLRGKPFAIEAENSILDISGFSKQYNCAFIWQKDGVKKLNLYLIINYFKGGKLRFKKIKPEAFEANRFYTVINKKSGEIVPMEVNFNFDDPNLIILPLAFGKRQGREFIWNDLLSLETGSLKLANGRVIEKTLYNRRTRQDEPALFVALTFERREVLDSSNIKPMNLIGVDRGENIPAVIALTDPEGCPLSRFKDSLGNPTHILRIGESYKEKQRTIQAKKEVEQRRAGGYSRKYASKAKNLADDMVRNTARDLLYYAVTQDAMLIFENLSRGFGRQGKRTFMAERQYTRMEDWLTAKLAYEGLPSKTYLSKTLAQYTSKTCSNCGFTITSADYDRVLEKLKKTATGWMTTINGKELKVEGQITYYNRYKRQNVVKDLSVELDRLSEESVNNDISSWTKGRSGEALSLLKKRFSHRPVQEKFVCLNCGFETHADEQAALNIARSWLFLRSQEYKKYQTNKTTGNTDKRAFVETWQSFYRKKLKEVWKPAV

SEQ ID NO: 108 - protein, 979 aa, synthetic construct
QEIKRINKIRRRLVKDSNTKKAGKTGPMKTLLVRVMTPDLRERLENLRKKPENIPQPISNTSRANLNKLLTDYTEMKKAILHVYWEEFQKDPVGLMSRVAQPASKKIDQNKLKPEMDEKGNLTTAGFACSQCGQPLFVYKLEQVSEKGKAYTNYFGRCNVAEHEKLILLAQLKPEKDSDEAVTYSLGKFGQRALDFYSIHVTKESTHPVKPLAQIAGNRYASGPVGKALSDACMGTIASFLSKYQDIIIEHQKVVKGNQKRLESLRELAGKENLEYPSVTLPPQPHTKEGVDAYNEVIARVRMWVNLNLWQKLKLSRDDAKPLLRLKGFPSFPALVERQANEVDWWDMVCNVKKLINEKKEDGKVFWQNLAGYKRQEALRPYLSSEEDRKKGKKFARYQLGDLLLHLEKKHGEDWGKVYDEAWERIDKKVEGLSKHIKLEEERRSEDAQSKAALTDWLRAKASFVIEGLKEADKDEFCRCELKLQKWYGDLRGKPFAIEAENSILDISGFSKQYNCAFIWQKDGVKKLNLYLIINYFKGGKLRFKKIKPEAFEANRFYTVINKKSGEIVPMEVNFNFDDPNLIILPLAFGKRQGREFIWNDLLSLETGSLKLANGRVIEKTLYNRRTRQDEPALFVALTFERREVLDSSNIKPMNLIGVDRGENIPAVIALTDPEGCPLSRFKDSLGNPTHILRIGESYKEKQRTIQAKKEVEQRRAGGYSRKYASKAKNLADDMVRNTARDLLYYAVTQDAMLIFENLSRGFGRQGKRTFMAERQYTRMEDWLTAKLAYEGLPSKTYLSKTLAQYTSKTCSNCGFTITSADYDRVLEKLKKTATGWMTTINGKELKVEGQITYYNRYKRQNVVKDLSVELDRLSEESVNNDISSWTKGRSGEALSLLKKRFSHRPVQEKFVCLNCGFETHADEQAALNIARSWLFLRSQEYKKYQTNKTTGNTDKRAFVETWQSFYRKKLKEVWKPAV

SEQ ID NO: 109 - protein, 977 aa, synthetic construct
QEIKRINKIRRRLVKDSNTKKAGKTGPMKTLLVRVMTPDLRERLENLRKKPENIPQPISNTSRANLNKLLTDYTEMKKAILHVYWEEFQKDPVGLMSRVAQPASKKIDQNKLKPEMDEKGNLTTAGFACSQCGQPLFVYKLEQVSEKGKAYTNYFGRCNVAEHEKLILLAQLKPEKDSDEAVTYSLGKFGQRALDFYSIHVTKESTHPVKPLAQIAGNRYASGPVGKALSDACMGTIASFLSKYQDIIIEHQKVVKGNQKRLESLRELAGKENLEYPSVTLPPQPHTKEGVDAYNEVIARVRMWVNLNLWQKLKLSRDDAKPLLRLKGFPSFPLERQANEVDWWDMVCNVKKLINEKKEDGKVFWQNLAGYKRQEALRPYLSSEEDRKKGKKFARYQLGDLLLHLEKKHGEDWGKVYDEAWERIDKKVEGLSKHIKLEEERRSEDAQSKAALTDWLRAKASFVIEGLKEADKDEFCRCELKLQKWYGDLRGKPFAIEAENSILDISGFSKQYNCAFIWQKDGVKKLNLYLIINYFKGGKLRFKKIKPEAFEANRFYTVINKKSGEIVPMEVNFNFDDPNLIILPLAFGKRQGREFIWNDLLSLETGSLKLANGRVIEKTLYNRRTRQDEPALFVALTFERREVLDSSNIKPMNLIGVDRGENIPAVIALTDPEGCPLSRFKDSLGNPTHILRIGESYKEKQRTIQAKKEVEQRRAGGYSRKYASKAKNLADDMVRNTARDLLYYAVTQDAMLIFENLSRGFGRQGKRTFMAERQYTRMEDWLTAKLAYEGLPSKTYLSKTLAQYTSKTCSNCGFTITSADYDRVLEKLKKTATGWMTTINGKELKVEGQITYYNRYKRQNVVKDLSVELDRLSEESVNNDISSWTKGRSGEALSLLKKRFSHRPVQEKFVCLNCGFETHADEQAALNIARSWLFLRSQEYKKYQTNKTTGNTDKRAFVETWQSFYRKKLKEVWKPAV

SEQ ID NO: 110 - protein, 978 aa, synthetic construct
QEIKRINKIRRRLVKDSNTKKAGKTGPMKTLLVRVMTPDLRERLENLRKKPENIPQPISNTSRANLNKLLTDYTEMKKAILHVYWEEFQKDPVGLMSRVAQPASKKIDQNKLKPEMDEKGNLTTAGFACSQCGQPLFVYKLEQVSEKGKAYTNYFGRCNVAEHEKLILLAQLKPEKDSDEAVTYSLGKFGQRALDFYSIHVTKESTHPVKPLAQIAGNRYASGPVGKALSDACMGTIASFLSKYQDIIIEHQKVVKGNQKRLESLRELAGKENLEYPSVTLPPQPHTKEGVDAYNEVIARVRMWVNLNLWQKLKLSRDDAKPLLRLKGFPSFPLVPRQANEVDWWDMVCNVKKLINEKKEDGKVFWQNLAGYKRQEALRPYLSSEEDRKKGKKFARYQLGDLLLHLEKKHGEDWGKVYDEAWERIDKKVEGLSKHIKLEEERRSEDAQSKAALTDWLRAKASFVIEGLKEADKDEFCRCELKLQKWYGDLRGKPFAIEAENSILDISGFSKQYNCAFIWQKDGVKKLNLYLIINYFKGGKLRFKKIKPEAFEANRFYTVINKKSGEIVPMEVNFNFDDPNLIILPLAFGKRQGREFIWNDLLSLETGSLKLANGRVIEKTLYNRRTRQDEPALFVALTFERREVLDSSNIKPMNLIGVDRGENIPAVIALTDPEGCPLSRFKDSLGNPTHILRIGESYKEKQRTIQAKKEVEQRRAGGYSRKYASKAKNLADDMVRNTARDLLYYAVTQDAMLIFENLSRGFGRQGKRTFMAERQYTRMEDWLTAKLAYEGLPSKTYLSKTLAQYTSKTCSNCGFTITSADYDRVLEKLKKTATGWMTTINGKELKVEGQITYYNRYKRQNVVKDLSVELDRLSEESVNNDISSWTKGRSGEALSLLKKRFSHRPVQEKFVCLNCGFETHADEQAALNIARSWLFLRSQEYKKYQTNKTTGNTDKRAFVETWQSFYRKKLKEVWKPAV

SEQ ID NO: 111 - protein, 977 aa, synthetic construct
QEIKRINKIRRRLVKDSNTKKAGKTGPMKTLLVRVMTPDLRERLENLRKKPENIPQPISNTSRANLNKLLTDYTEMKKAILHVYWEEFQKDPVGLMSRVAQPASKKIDQNKLKPEMDEKGNLTTAGFACSQCGQPLFVYKLEQVSEKGKAYTNYFGRCNVAEHEKLILLAQLKPEKDSDEAVTYSLGKFGQRALDFYSIHVTKESTHPVKPLAQIAGNRYASGPVGKALSDACMGTIASFLSKYQDIIIEHQKVVKGNQKRLESLRELAGKENLEYPSVTLPPQPHTKEGVDAYNEVIARVRMWVNLNLWQKLKLSRDDAKPLLRLKGFPSFPLVRQANEVDWWDMVCNVKKLINEKKEDGKVFWQNLAGYKRQEALRPYLSSEEDRKKGKKFARYQLGDLLLHLEKKHGEDWGKVYDEAWERIDKKVEGLSKHIKLEEERRSEDAQSKAALTDWLRAKASFVIEGLKEADKDEFCRCELKLQKWYGDLRGKPFAIEAENSILDISGFSKQYNCAFIWQKDGVKKLNLYLIINYFKGGKLRFKKIKPEAFEANRFYTVINKKSGEIVPMEVNFNFDDPNLIILPLAFGKRQGREFIWNDLLSLETGSLKLANGRVIEKTLYNRRTRQDEPALFVALTFERREVLDSSNIKPMNLIGVDRGENIPAVIALTDPEGCPLSRFKDSLGNPTHILRIGESYKEKQRTIQAKKEVEQRRAGGYSRKYASKAKNLADDMVRNTARDLLYYAVTQDAMLIFENLSRGFGRQGKRTFMAERQYTRMEDWLTAKLAYEGLPSKTYLSKTLAQYTSKTCSNCGFTITSADYDRVLEKLKKTATGWMTTINGKELKVEGQITYYNRYKRQNVVKDLSVELDRLSEESVNNDISSWTKGRSGEALSLLKKRFSHRPVQEKFVCLNCGFETHADEQAALNIARSWLFLRSQEYKKYQTNKTTGNTDKRAFVETWQSFYRKKLKEVWKPAV

SEQ ID NO: 112 - protein, 978 aa, synthetic construct
QEIKRINKIRRRLVKDSNTKKAGKTGPMKTLLVRVMTPDLRERLENLRKKPENIPQPISNTSRANLNKLLTDYTEMKKAILHVYWEEFQKDPVGLMSRVAQPASKKIDQNKLKPEMDEKGNLTTAGFACSQCGQPLFVYKLEQVSEKGKAYTNYFGRCNVAEHEKLILLAQLKPEKDSDEAVTYSLGKFGQRALDFYSIHVTKESTHPVKPLAQIAGNRYASGPVGKALSDACMGTIASFLSKYQDIIIEHQKVVKGNQKRLESLRELAGKENLEYPSVTLPPQPHTKEGVDAYNEVIARVRMWVNLNLWQKLKLSRDDAKPLLRLKGFPSFPLVLRQANEVDWWDMVCNVKKLINEKKEDGKVFWQNLAGYKRQEALRPYLSSEEDRKKGKKFARYQLGDLLLHLEKKHGEDWGKVYDEAWERIDKKVEGLSKHIKLEEERRSEDAQSKAALTDWLRAKASFVIEGLKEADKDEFCRCELKLQKWYGDLRGKPFAIEAENSILDISGFSKQYNCAFIWQKDGVKKLNLYLIINYFKGGKLRFKKIKPEAFEANRFYTVINKKSGEIVPMEVNFNFDDPNLIILPLAFGKRQGREFIWNDLLSLETGSLKLANGRVIEKTLYNRRTRQDEPALFVALTFERREVLDSSNIKPMNLIGVDRGENIPAVIALTDPEGCPLSRFKDSLGNPTHILRIGESYKEKQRTIQAKKEVEQRRAGGYSRKYASKAKNLADDMVRNTARDLLYYAVTQDAMLIFENLSRGFGRQGKRTFMAERQYTRMEDWLTAKLAYEGLPSKTYLSKTLAQYTSKTCSNCGFTITSADYDRVLEKLKKTATGWMTTINGKELKVEGQITYYNRYKRQNVVKDLSVELDRLSEESVNNDISSWTKGRSGEALSLLKKRFSHRPVQEKFVCLNCGFETHADEQAALNIARSWLFLRSQEYKKYQTNKTTGNTDKRAFVETWQSFYRKKLKEVWKPAV

SEQ ID NO: 113 - protein, 978 aa, synthetic construct
QEIKRINKIRRRLVKDSNTKKAGKTGPMKTLLVRVMTPDLRERLENLRKKPENIPQPISNTSRANLNKLLTDYTEMKKAILHVYWEEFQKDPVGLMSRVAQPASKKIDQNKLKPEMDEKGNLTTAGFACSQCGQPLFVYKLEQVSEKGKAYTNYFGRCNVAEHEKLILLAQLKPEKDSDEAVTYSLGKFGQRALDFYSIHVTKESTHPVKPLAQIAGNRYASGPVGKALSDACMGTIASFLSKYQDIIIEHQKVVKGNQKRLESLRELAGKENLEYPSVTLPPQPHTKEGVDAYNEVIARVRMWVNLNLWQKLKLSRDDAKPLLRLKGFPSFPLVRRQANEVDWWDMVCNVKKLINEKKEDGKVFWQNLAGYKRQEALRPYLSSEEDRKKGKKFARYQLGDLLLHLEKKHGEDWGKVYDEAWERIDKKVEGLSKHIKLEEERRSEDAQSKAALTDWLRAKASFVIEGLKEADKDEFCRCELKLQKWYGDLRGKPFAIEAENSILDISGFSKQYNCAFIWQKDGVKKLNLYLIINYFKGGKLRFKKIKPEAFEANRFYTVINKKSGEIVPMEVNFNFDDPNLIILPLAFGKRQGREFIWNDLLSLETGSLKLANGRVIEKTLYNRRTRQDEPALFVALTFERREVLDSSNIKPMNLIGVDRGENIPAVIALTDPEGCPLSRFKDSLGNPTHILRIGESYKEKQRTIQAKKEVEQRRAGGYSRKYASKAKNLADDMVRNTARDLLYYAVTQDAMLIFENLSRGFGRQGKRTFMAERQYTRMEDWLTAKLAYEGLPSKTYLSKTLAQYTSKTCSNCGFTITSADYDRVLEKLKKTATGWMTTINGKELKVEGQITYYNRYKRQNVVKDLSVELDRLSEESVNNDISSWTKGRSGEALSLLKKRFSHRPVQEKFVCLNCGFETHADEQAALNIARSWLFLRSQEYKKYQTNKTTGNTDKRAFVETWQSFYRKKLKEVWKPAV

SEQ ID NO: 114 - protein, 979 aa, synthetic construct
QEIKRINKIRRRLVKDSNTKKAGKTGPMKTLLVRVMTPDLRERLENLRKKPENIPQPISNTSRANLNKLLTDYTEMKKAILHVYWEEFQKDPVGLMSRVAQPASKKIDQNKLKPEMDEKGNLTTAGFACSQCGQPLFVYKLEQVSEKGKAYTNYFGRCNVAEHEKLILLAQLKPEKDSDEAVTYSLGKFGQRALDFYSIHVTKESTHPVKPLAQIAGNRYASGPVGKALSDACMGTIASFLSKYQDIIIEHQKVVKGNQKRLESLRELAGKENLEYPSVTLPPQPHTKEGVDAYNEVIARVRMWVNLNLWQKLKLSRDDAKPLLRLKGFPSFPLVERQQANEVDWWDMVCNVKKLINEKKEDGKVFWQNLAGYKRQEALRPYLSSEEDRKKGKKFARYQLGDLLLHLEKKHGEDWGKVYDEAWERIDKKVEGLSKHIKLEEERRSEDAQSKAALTDWLRAKASFVIEGLKEADKDEFCRCELKLQKWYGDLRGKPFAIEAENSILDISGFSKQYNCAFIWQKDGVKKLNLYLIINYFKGGKLRFKKIKPEAFEANRFYTVINKKSGEIVPMEVNFNFDDPNLIILPLAFGKRQGREFIWNDLLSLETGSLKLANGRVIEKTLYNRRTRQDEPALFVALTFERREVLDSSNIKPMNLIGVDRGENIPAVIALTDPEGCPLSRFKDSLGNPTHILRIGESYKEKQRTIQAKKEVEQRRAGGYSRKYASKAKNLADDMVRNTARDLLYYAVTQDAMLIFENLSRGFGRQGKRTFMAERQYTRMEDWLTAKLAYEGLPSKTYLSKTLAQYTSKTCSNCGFTITSADYDRVLEKLKKTATGWMTTINGKELKVEGQITYYNRYKRQNVVKDLSVELDRLSEESVNNDISSWTKGRSGEALSLLKKRFSHRPVQEKFVCLNCGFETHADEQAALNIARSWLFLRSQEYKKYQTNKTTGNTDKRAFVETWQSFYRKKLKEVWKPAV

SEQ ID NO: 115 - protein, 979 aa, synthetic construct
QEIKRINKIRRRLVKDSNTKKAGKTGPMKTLLVRVMTPDLRERLENLRKKPENIPQPISNTSRANLNKLLTDYTEMKKAILHVYWEEFQKDPVGLMSRVAQPASKKIDQNKLKPEMDEKGNLTTAGFACSQCGQPLFVYKLEQVSEKGKAYTNYFGRCNVAEHEKLILLAQLKPEKDSDEAVTYSLGKFGQRALDFYSIHVTKESTHPVKPLAQIAGNRYASGPVGKALSDACMGTIASFLSKYQDIIIEHQKVVKGNQKRLESLRELAGKENLEYPSVTLPPQPHTKEGVDAYNEVIARVRMWVNLNLWQKLKLSRDDAKPLLRLKGFPSFPLVERQANHEVDWWDMVCNVKKLINEKKEDGKVFWQNLAGYKRQEALRPYLSSEEDRKKGKKFARYQLGDLLLHLEKKHGEDWGKVYDEAWERIDKKVEGLSKHIKLEEERRSEDAQSKAALTDWLRAKASFVIEGLKEADKDEFCRCELKLQKWYGDLRGKPFAIEAENSILDISGFSKQYNCAFIWQKDGVKKLNLYLIINYFKGGKLRFKKIKPEAFEANRFYTVINKKSGEIVPMEVNFNFDDPNLIILPLAFGKRQGREFIWNDLLSLETGSLKLANGRVIEKTLYNRRTRQDEPALFVALTFERREVLDSSNIKPMNLIGVDRGENIPAVIALTDPEGCPLSRFKDSLGNPTHILRIGESYKEKQRTIQAKKEVEQRRAGGYSRKYASKAKNLADDMVRNTARDLLYYAVTQDAMLIFENLSRGFGRQGKRTFMAERQYTRMEDWLTAKLAYEGLPSKTYLSKTLAQYTSKTCSNCGFTITSADYDRVLEKLKKTATGWMTTINGKELKVEGQITYYNRYKRQNVVKDLSVELDRLSEESVNNDISSWTKGRSGEALSLLKKRFSHRPVQEKFVCLNCGFETHADEQAALNIARSWLFLRSQEYKKYQTNKTTGNTDKRAFVETWQSFYRKKLKEVWKPAV

SEQ ID NO: 116 - protein, 979 aa, synthetic construct
QEIKRINKIRRRLVKDSNTKKAGKTGPMKTLLVRVMTPDLRERLENLRKKPENIPQPISNTSRANLNKLLTDYTEMKKAILHVYWEEFQKDPVGLMSRVAQPASKKIDQNKLKPEMDEKGNLTTAGFACSQCGQPLFVYKLEQVSEKGKAYTNYFGRCNVAEHEKLILLAQLKPEKDSDEAVTYSLGKFGQRALDFYSIHVTKESTHPVKPLAQIAGNRYASGPVGKALSDACMGTIASFLSKYQDIIIEHQKVVKGNQKRLESLRELAGKENLEYPSVTLPPQPHTKEGVDAYNEVIARVRMWVNLNLWQKLKLSRDDAKPLLRLKGFPSFPLVERQANAEVDWWDMVCNVKKLINEKKEDGKVFWQNLAGYKRQEALRPYLSSEEDRKKGKKFARYQLGDLLLHLEKKHGEDWGKVYDEAWERIDKKVEGLSKHIKLEEERRSEDAQSKAALTDWLRAKASFVIEGLKEADKDEFCRCELKLQKWYGDLRGKPFAIEAENSILDISGFSKQYNCAFIWQKDGVKKLNLYLIINYFKGGKLRFKKIKPEAFEANRFYTVINKKSGEIVPMEVNFNFDDPNLIILPLAFGKRQGREFIWNDLLSLETGSLKLANGRVIEKTLYNRRTRQDEPALFVALTFERREVLDSSNIKPMNLIGVDRGENIPAVIALTDPEGCPLSRFKDSLGNPTHILRIGESYKEKQRTIQAKKEVEQRRAGGYSRKYASKAKNLADDMVRNTARDLLYYAVTQDAMLIFENLSRGFGRQGKRTFMAERQYTRMEDWLTAKLAYEGLPSKTYLSKTLAQYTSKTCSNCGFTITSADYDRVLEKLKKTATGWMTTINGKELKVEGQITYYNRYKRQNVVKDLSVELDRLSEESVNNDISSWTKGRSGEALSLLKKRFSHRPVQEKFVCLNCGFETHADEQAALNIARSWLFLRSQEYKKYQTNKTTGNTDKRAFVETWQSFYRKKLKEVWKPAV

SEQ ID NO: 117 - protein, 979 aa, synthetic construct
QEIKRINKIRRRLVKDSNTKKAGKTGPMKTLLVRVMTPDLRERLENLRKKPENIPQPISNTSRANLNKLLTDYTEMKKAILHVYWEEFQKDPVGLMSRVAQPASKKIDQNKLKPEMDEKGNLTTAGFACSQCGQPLFVYKLEQVSEKGKAYTNYFGRCNVAEHEKLILLAQLKPEKDSDEAVTYSLGKFGQRALDFYSIHVTKESTHPVKPLAQIAGNRYASGPVGKALSDACMGTIASFLSKYQDIIIEHQKVVKGNQKRLESLRELAGKENLEYPSVTLPPQPHTKEGVDAYNEVIARVRMWVNLNLWQKLKLSRDDAKPLLRLKGFPSFPLVERQANEVDDWWDMVCNVKKLINEKKEDGKVFWQNLAGYKRQEALRPYLSSEEDRKKGKKFARYQLGDLLLHLEKKHGEDWGKVYDEAWERIDKKVEGLSKHIKLEEERRSEDAQSKAALTDWLRAKASFVIEGLKEADKDEFCRCELKLQKWYGDLRGKPFAIEAENSILDISGFSKQYNCAFIWQKDGVKKLNLYLIINYFKGGKLRFKKIKPEAFEANRFYTVINKKSGEIVPMEVNFNFDDPNLIILPLAFGKRQGREFIWNDLLSLETGSLKLANGRVIEKTLYNRRTRQDEPALFVALTFERREVLDSSNIKPMNLIGVDRGENIPAVIALTDPEGCPLSRFKDSLGNPTHILRIGESYKEKQRTIQAKKEVEQRRAGGYSRKYASKAKNLADDMVRNTARDLLYYAVTQDAMLIFENLSRGFGRQGKRTFMAERQYTRMEDWLTAKLAYEGLPSKTYLSKTLAQYTSKTCSNCGFTITSADYDRVLEKLKKTATGWMTTINGKELKVEGQITYYNRYKRQNVVKDLSVELDRLSEESVNNDISSWTKGRSGEALSLLKKRFSHRPVQEKFVCLNCGFETHADEQAALNIARSWLFLRSQEYKKYQTNKTTGNTDKRAFVETWQSFYRKKLKEVWKPAV

SEQ ID NO: 118 - protein, 979 aa, synthetic construct
QEIKRINKIRRRLVKDSNTKKAGKTGPMKTLLVRVMTPDLRERLENLRKKPENIPQPISNTSRANLNKLLTDYTEMKKAILHVYWEEFQKDPVGLMSRVAQPASKKIDQNKLKPEMDEKGNLTTAGFACSQCGQPLFVYKLEQVSEKGKAYTNYFGRCNVAEHEKLILLAQLKPEKDSDEAVTYSLGKFGQRALDFYSIHVTKESTHPVKPLAQIAGNRYASGPVGKALSDACMGTIASFLSKYQDIIIEHQKVVKGNQKRLESLRELAGKENLEYPSVTLPPQPHTKEGVDAYNEVIARVRMWVNLNLWQKLKLSRDDAKPLLRLKGFPSFPLVERQANEVDWWPDMVCNVKKLINEKKEDGKVFWQNLAGYKRQEALRPYLSSEEDRKKGKKFARYQLGDLLLHLEKKHGEDWGKVYDEAWERIDKKVEGLSKHIKLEEERRSEDAQSKAALTDWLRAKASFVIEGLKEADKDEFCRCELKLQKWYGDLRGKPFAIEAENSILDISGFSKQYNCAFIWQKDGVKKLNLYLIINYFKGGKLRFKKIKPEAFEANRFYTVINKKSGEIVPMEVNFNFDDPNLIILPLAFGKRQGREFIWNDLLSLETGSLKLANGRVIEKTLYNRRTRQDEPALFVALTFERREVLDSSNIKPMNLIGVDRGENIPAVIALTDPEGCPLSRFKDSLGNPTHILRIGESYKEKQRTIQAKKEVEQRRAGGYSRKYASKAKNLADDMVRNTARDLLYYAVTQDAMLIFENLSRGFGRQGKRTFMAERQYTRMEDWLTAKLAYEGLPSKTYLSKTLAQYTSKTCSNCGFTITSADYDRVLEKLKKTATGWMTTINGKELKVEGQITYYNRYKRQNVVKDLSVELDRLSEESVNNDISSWTKGRSGEALSLLKKRFSHRPVQEKFVCLNCGFETHADEQAALNIARSWLFLRSQEYKKYQTNKTTGNTDKRAFVETWQSFYRKKLKEVWKPAV

SEQ ID NO: 119 - protein, 978 aa, synthetic construct
QEIKRINKIRRRLVKDSNTKKAGKTGPMKTLLVRVMTPDLRERLENLRKKPENIPQPISNTSRANLNKLLTDYTEMKKAILHVYWEEFQKDPVGLMSRVAQPASKKIDQNKLKPEMDEKGNLTTAGFACSQCGQPLFVYKLEQVSEKGKAYTNYFGRCNVAEHEKLILLAQLKPEKDSDEAVTYSLGKFGQRALDFYSIHVTKESTHPVKPLAQIAGNRYASGPVGKALSDACMGTIASFLSKYQDIIIEHQKVVKGNQKRLESLRELAGKENLEYPSVTLPPQPHTKEGVDAYNEVIARVRMWVNLNLWQKLKLSRDDAKPLLRLKGFPSFPLVERQANEVDWWDMVCNVKKLINEKKEDGKVFWQNLAGYKRQEALRPYLSSEEDRKKGKKFARTQLGDLLLHLEKKHGEDWGKVYDEAWERIDKKVEGLSKHIKLEEERRSEDAQSKAALTDWLRAKASFVIEGLKEADKDEFCRCELKLQKWYGDLRGKPFAIEAENSILDISGFSKQYNCAFIWQKDGVKKLNLYLIINYFKGGKLRFKKIKPEAFEANRFYTVINKKSGEIVPMEVNFNFDDPNLIILPLAFGKRQGREFIWNDLLSLETGSLKLANGRVIEKTLYNRRTRQDEPALFVALTFERREVLDSSNIKPMNLIGVDRGENIPAVIALTDPEGCPLSRFKDSLGNPTHILRIGESYKEKQRTIQAKKEVEQRRAGGYSRKYASKAKNLADDMVRNTARDLLYYAVTQDAMLIFENLSRGFGRQGKRTFMAERQYTRMEDWLTAKLAYEGLPSKTYLSKTLAQYTSKTCSNCGFTITSADYDRVLEKLKKTATGWMTTINGKELKVEGQITYYNRYKRQNVVKDLSVELDRLSEESVNNDISSWTKGRSGEALSLLKKRFSHRPVQEKFVCLNCGFETHADEQAALNIARSWLFLRSQEYKKYQTNKTTGNTDKRAFVETWQSFYRKKLKEVWKPAV

SEQ ID NO: 120 - protein, 978 aa, synthetic construct
QEIKRINKIRRRLVKDSNTKKAGKTGPMKTLLVRVMTPDLRERLENLRKKPENIPQPISNTSRANLNKLLTDYTEMKKAILHVYWEEFQKDPVGLMSRVAQPASKKIDQNKLKPEMDEKGNLTTAGFACSQCGQPLFVYKLEQVSEKGKAYTNYFGRCNVAEHEKLILLAQLKPEKDSDEAVTYSLGKFGQRALDFYSIHVTKESTHPVKPLAQIAGNRYASGPVGKALSDACMGTIASFLSKYQDIIIEHQKVVKGNQKRLESLRELAGKENLEYPSVTLPPQPHTKEGVDAYNEVIARVRMWVNLNLWQKLKLSRDDAKPLLRLKGFPSFPLVERQANEVDWWDMVCNVKKLINEKKEDGKVFWQNLAGYKRQEALRPYLSSEEDRKKGKKFARYQLMDLLLHLEKKHGEDWGKVYDEAWERIDKKVEGLSKHIKLEEERRSEDAQSKAALTDWLRAKASFVIEGLKEADKDEFCRCELKLQKWYGDLRGKPFAIEAENSILDISGFSKQYNCAFIWQKDGVKKLNLYLIINYFKGGKLRFKKIKPEAFEANRFYTVINKKSGEIVPMEVNFNFDDPNLIILPLAFGKRQGREFIWNDLLSLETGSLKLANGRVIEKTLYNRRTRQDEPALFVALTFERREVLDSSNIKPMNLIGVDRGENIPAVIALTDPEGCPLSRFKDSLGNPTHILRIGESYKEKQRTIQAKKEVEQRRAGGYSRKYASKAKNLADDMVRNTARDLLYYAVTQDAMLIFENLSRGFGRQGKRTFMAERQYTRMEDWLTAKLAYEGLPSKTYLSKTLAQYTSKTCSNCGFTITSADYDRVLEKLKKTATGWMTTINGKELKVEGQITYYNRYKRQNVVKDLSVELDRLSEESVNNDISSWTKGRSGEALSLLKKRFSHRPVQEKFVCLNCGFETHADEQAALNIARSWLFLRSQEYKKYQTNKTTGNTDKRAFVETWQSFYRKKLKEVWKPAV

SEQ ID NO: 121 - protein, 978 aa, synthetic construct
QEIKRINKIRRRLVKDSNTKKAGKTGPMKTLLVRVMTPDLRERLENLRKKPENIPQPISNTSRANLNKLLTDYTEMKKAILHVYWEEFQKDPVGLMSRVAQPASKKIDQNKLKPEMDEKGNLTTAGFACSQCGQPLFVYKLEQVSEKGKAYTNYFGRCNVAEHEKLILLAQLKPEKDSDEAVTYSLGKFGQRALDFYSIHVTKESTHPVKPLAQIAGNRYASGPVGKALSDACMGTIASFLSKYQDIIIEHQKVVKGNQKRLESLRELAGKENLEYPSVTLPPQPHTKEGVDAYNEVIARVRMWVNLNLWQKLKLSRDDAKPLLRLKGFPSFPLVERQANEVDWWDMVCNVKKLINEKKEDGKVFWQNLAGYKRQEALRPYLSSEEDRKKGKKFARYQLGDLLNHLEKKHGEDWGKVYDEAWERIDKKVEGLSKHIKLEEERRSEDAQSKAALTDWLRAKASFVIEGLKEADKDEFCRCELKLQKWYGDLRGKPFAIEAENSILDISGFSKQYNCAFIWQKDGVKKLNLYLIINYFKGGKLRFKKIKPEAFEANRFYTVINKKSGEIVPMEVNFNFDDPNLIILPLAFGKRQGREFIWNDLLSLETGSLKLANGRVIEKTLYNRRTRQDEPALFVALTFERREVLDSSNIKPMNLIGVDRGENIPAVIALTDPEGCPLSRFKDSLGNPTHILRIGESYKEKQRTIQAKKEVEQRRAGGYSRKYASKAKNLADDMVRNTARDLLYYAVTQDAMLIFENLSRGFGRQGKRTFMAERQYTRMEDWLTAKLAYEGLPSKTYLSKTLAQYTSKTCSNCGFTITSADYDRVLEKLKKTATGWMTTINGKELKVEGQITYYNRYKRQNVVKDLSVELDRLSEESVNNDISSWTKGRSGEALSLLKKRFSHRPVQEKFVCLNCGFETHADEQAALNIARSWLFLRSQEYKKYQTNKTTGNTDKRAFVETWQSFYRKKLKEVWKPAV

SEQ ID NO: 122 - protein, 978 aa, synthetic construct
QEIKRINKIRRRLVKDSNTKKAGKTGPMKTLLVRVMTPDLRERLENLRKKPENIPQPISNTSRANLNKLLTDYTEMKKAILHVYWEEFQKDPVGLMSRVAQPASKKIDQNKLKPEMDEKGNLTTAGFACSQCGQPLFVYKLEQVSEKGKAYTNYFGRCNVAEHEKLILLAQLKPEKDSDEAVTYSLGKFGQRALDFYSIHVTKESTHPVKPLAQIAGNRYASGPVGKALSDACMGTIASFLSKYQDIIIEHQKVVKGNQKRLESLRELAGKENLEYPSVTLPPQPHTKEGVDAYNEVIARVRMWVNLNLWQKLKLSRDDAKPLLRLKGFPSFPLVERQANEVDWWDMVCNVKKLINEKKEDGKVFWQNLAGYKRQEALRPYLSSEEDRKKGKKFARYQLGDLLWHLEKKHGEDWGKVYDEAWERIDKKVEGLSKHIKLEEERRSEDAQSKAALTDWLRAKASFVIEGLKEADKDEFCRCELKLQKWYGDLRGKPFAIEAENSILDISGFSKQYNCAFIWQKDGVKKLNLYLIINYFKGGKLRFKKIKPEAFEANRFYTVINKKSGEIVPMEVNFNFDDPNLIILPLAFGKRQGREFIWNDLLSLETGSLKLANGRVIEKTLYNRRTRQDEPALFVALTFERREVLDSSNIKPMNLIGVDRGENIPAVIALTDPEGCPLSRFKDSLGNPTHILRIGESYKEKQRTIQAKKEVEQRRAGGYSRKYASKAKNLADDMVRNTARDLLYYAVTQDAMLIFENLSRGFGRQGKRTFMAERQYTRMEDWLTAKLAYEGLPSKTYLSKTLAQYTSKTCSNCGFTITSADYDRVLEKLKKTATGWMTTINGKELKVEGQITYYNRYKRQNVVKDLSVELDRLSEESVNNDISSWTKGRSGEALSLLKKRFSHRPVQEKFVCLNCGFETHADEQAALNIARSWLFLRSQEYKKYQTNKTTGNTDKRAFVETWQSFYRKKLKEVWKPAV

SEQ ID NO: 123 - protein, 978 aa, synthetic construct
QEIKRINKIRRRLVKDSNTKKAGKTGPMKTLLVRVMTPDLRERLENLRKKPENIPQPISNTSRANLNKLLTDYTEMKKAILHVYWEEFQKDPVGLMSRVAQPASKKIDQNKLKPEMDEKGNLTTAGFACSQCGQPLFVYKLEQVSEKGKAYTNYFGRCNVAEHEKLILLAQLKPEKDSDEAVTYSLGKFGQRALDFYSIHVTKESTHPVKPLAQIAGNRYASGPVGKALSDACMGTIASFLSKYQDIIIEHQKVVKGNQKRLESLRELAGKENLEYPSVTLPPQPHTKEGVDAYNEVIARVRMWVNLNLWQKLKLSRDDAKPLLRLKGFPSFPLVERQANEVDWWDMVCNVKKLINEKKEDGKVFWQNLAGYKRQEALRPYLSSEEDRKKGKKFARYQLGDLLLHLYKKHGEDWGKVYDEAWERIDKKVEGLSKHIKLEEERRSEDAQSKAALTDWLRAKASFVIEGLKEADKDEFCRCELKLQKWYGDLRGKPFAIEAENSILDISGFSKQYNCAFIWQKDGVKKLNLYLIINYFKGGKLRFKKIKPEAFEANRFYTVINKKSGEIVPMEVNFNFDDPNLIILPLAFGKRQGREFIWNDLLSLETGSLKLANGRVIEKTLYNRRTRQDEPALFVALTFERREVLDSSNIKPMNLIGVDRGENIPAVIALTDPEGCPLSRFKDSLGNPTHILRIGESYKEKQRTIQAKKEVEQRRAGGYSRKYASKAKNLADDMVRNTARDLLYYAVTQDAMLIFENLSRGFGRQGKRTFMAERQYTRMEDWLTAKLAYEGLPSKTYLSKTLAQYTSKTCSNCGFTITSADYDRVLEKLKKTATGWMTTINGKELKVEGQITYYNRYKRQNVVKDLSVELDRLSEESVNNDISSWTKGRSGEALSLLKKRFSHRPVQEKFVCLNCGFETHADEQAALNIARSWLFLRSQEYKKYQTNKTTGNTDKRAFVETWQSFYRKKLKEVWKPAV

SEQ ID NO: 124 - protein, 978 aa, synthetic construct
QEIKRINKIRRRLVKDSNTKKAGKTGPMKTLLVRVMTPDLRERLENLRKKPENIPQPISNTSRANLNKLLTDYTEMKKAILHVYWEEFQKDPVGLMSRVAQPASKKIDQNKLKPEMDEKGNLTTAGFACSQCGQPLFVYKLEQVSEKGKAYTNYFGRCNVAEHEKLILLAQLKPEKDSDEAVTYSLGKFGQRALDFYSIHVTKESTHPVKPLAQIAGNRYASGPVGKALSDACMGTIASFLSKYQDIIIEHQKVVKGNQKRLESLRELAGKENLEYPSVTLPPQPHTKEGVDAYNEVIARVRMWVNLNLWQKLKLSRDDAKPLLRLKGFPSFPLVERQANEVDWWDMVCNVKKLINEKKEDGKVFWQNLAGYKRQEALRPYLSSEEDRKKGKKFARYQLGDLLLHLEKKHPEDWGKVYDEAWERIDKKVEGLSKHIKLEEERRSEDAQSKAALTDWLRAKASFVIEGLKEADKDEFCRCELKLQKWYGDLRGKPFAIEAENSILDISGFSKQYNCAFIWQKDGVKKLNLYLIINYFKGGKLRFKKIKPEAFEANRFYTVINKKSGEIVPMEVNFNFDDPNLIILPLAFGKRQGREFIWNDLLSLETGSLKLANGRVIEKTLYNRRTRQDEPALFVALTFERREVLDSSNIKPMNLIGVDRGENIPAVIALTDPEGCPLSRFKDSLGNPTHILRIGESYKEKQRTIQAKKEVEQRRAGGYSRKYASKAKNLADDMVRNTARDLLYYAVTQDAMLIFENLSRGFGRQGKRTFMAERQYTRMEDWLTAKLAYEGLPSKTYLSKTLAQYTSKTCSNCGFTITSADYDRVLEKLKKTATGWMTTINGKELKVEGQITYYNRYKRQNVVKDLSVELDRLSEESVNNDISSWTKGRSGEALSLLKKRFSHRPVQEKFVCLNCGFETHADEQAALNIARSWLFLRSQEYKKYQTNKTTGNTDKRAFVETWQSFYRKKLKEVWKPAV

SEQ ID NO: 125 - protein, 979 aa, synthetic construct
QEIKRINKIRRRLVKDSNTKKAGKTGPMKTLLVRVMTPDLRERLENLRKKPENIPQPISNTSRANLNKLLTDYTEMKKAILHVYWEEFQKDPVGLMSRVAQPASKKIDQNKLKPEMDEKGNLTTAGFACSQCGQPLFVYKLEQVSEKGKAYTNYFGRCNVAEHEKLILLAQLKPEKDSDEAVTYSLGKFGQRALDFYSIHVTKESTHPVKPLAQIAGNRYASGPVGKALSDACMGTIASFLSKYQDIIIEHQKVVKGNQKRLESLRELAGKENLEYPSVTLPPQPHTKEGVDAYNEVIARVRMWVNLNLWQKLKLSRDDAKPLLRLKGFPSFPLVERQANEVDWWDMVCNVKKLINEKKEDGKVFWQNLAGYKRQEALRPYLSSEEDRKKGKKFARYQLGDLLLHLEKKHEGEDWGKVYDEAWERIDKKVEGLSKHIKLEEERRSEDAQSKAALTDWLRAKASFVIEGLKEADKDEFCRCELKLQKWYGDLRGKPFAIEAENSILDISGFSKQYNCAFIWQKDGVKKLNLYLIINYFKGGKLRFKKIKPEAFEANRFYTVINKKSGEIVPMEVNFNFDDPNLIILPLAFGKRQGREFIWNDLLSLETGSLKLANGRVIEKTLYNRRTRQDEPALFVALTFERREVLDSSNIKPMNLIGVDRGENIPAVIALTDPEGCPLSRFKDSLGNPTHILRIGESYKEKQRTIQAKKEVEQRRAGGYSRKYASKAKNLADDMVRNTARDLLYYAVTQDAMLIFENLSRGFGRQGKRTFMAERQYTRMEDWLTAKLAYEGLPSKTYLSKTLAQYTSKTCSNCGFTITSADYDRVLEKLKKTATGWMTTINGKELKVEGQITYYNRYKRQNVVKDLSVELDRLSEESVNNDISSWTKGRSGEALSLLKKRFSHRPVQEKFVCLNCGFETHADEQAALNIARSWLFLRSQEYKKYQTNKTTGNTDKRAFVETWQSFYRKKLKEVWKPAV

SEQ ID NO: 126 - protein, 979 aa, synthetic construct
QEIKRINKIRRRLVKDSNTKKAGKTGPMKTLLVRVMTPDLRERLENLRKKPENIPQPISNTSRANLNKLLTDYTEMKKAILHVYWEEFQKDPVGLMSRVAQPASKKIDQNKLKPEMDEKGNLTTAGFACSQCGQPLFVYKLEQVSEKGKAYTNYFGRCNVAEHEKLILLAQLKPEKDSDEAVTYSLGKFGQRALDFYSIHVTKESTHPVKPLAQIAGNRYASGPVGKALSDACMGTIASFLSKYQDIIIEHQKVVKGNQKRLESLRELAGKENLEYPSVTLPPQPHTKEGVDAYNEVIARVRMWVNLNLWQKLKLSRDDAKPLLRLKGFPSFPLVERQANEVDWWDMVCNVKKLINEKKEDGKVFWQNLAGYKRQEALRPYLSSEEDRKKGKKFARYQLGDLLLHLEKKHGERDWGKVYDEAWERIDKKVEGLSKHIKLEEERRSEDAQSKAALTDWLRAKASFVIEGLKEADKDEFCRCELKLQKWYGDLRGKPFAIEAENSILDISGFSKQYNCAFIWQKDGVKKLNLYLIINYFKGGKLRFKKIKPEAFEANRFYTVINKKSGEIVPMEVNFNFDDPNLIILPLAFGKRQGREFIWNDLLSLETGSLKLANGRVIEKTLYNRRTRQDEPALFVALTFERREVLDSSNIKPMNLIGVDRGENIPAVIALTDPEGCPLSRFKDSLGNPTHILRIGESYKEKQRTIQAKKEVEQRRAGGYSRKYASKAKNLADDMVRNTARDLLYYAVTQDAMLIFENLSRGFGRQGKRTFMAERQYTRMEDWLTAKLAYEGLPSKTYLSKTLAQYTSKTCSNCGFTITSADYDRVLEKLKKTATGWMTTINGKELKVEGQITYYNRYKRQNVVKDLSVELDRLSEESVNNDISSWTKGRSGEALSLLKKRFSHRPVQEKFVCLNCGFETHADEQAALNIARSWLFLRSQEYKKYQTNKTTGNTDKRAFVETWQSFYRKKLKEVWKPAV

SEQ ID NO: 127 - protein, 979 aa, synthetic construct
QEIKRINKIRRRLVKDSNTKKAGKTGPMKTLLVRVMTPDLRERLENLRKKPENIPQPISNTSRANLNKLLTDYTEMKKAILHVYWEEFQKDPVGLMSRVAQPASKKIDQNKLKPEMDEKGNLTTAGFACSQCGQPLFVYKLEQVSEKGKAYTNYFGRCNVAEHEKLILLAQLKPEKDSDEAVTYSLGKFGQRALDFYSIHVTKESTHPVKPLAQIAGNRYASGPVGKALSDACMGTIASFLSKYQDIIIEHQKVVKGNQKRLESLRELAGKENLEYPSVTLPPQPHTKEGVDAYNEVIARVRMWVNLNLWQKLKLSRDDAKPLLRLKGFPSFPLVERQANEVDWWDMVCNVKKLINEKKEDGKVFWQNLAGYKRQEALRPYLSSEEDRKKGKKFARYQLGDLLLHLEKKHGEWDWGKVYDEAWERIDKKVEGLSKHIKLEEERRSEDAQSKAALTDWLRAKASFVIEGLKEADKDEFCRCELKLQKWYGDLRGKPFAIEAENSILDISGFSKQYNCAFIWQKDGVKKLNLYLIINYFKGGKLRFKKIKPEAFEANRFYTVINKKSGEIVPMEVNFNFDDPNLIILPLAFGKRQGREFIWNDLLSLETGSLKLANGRVIEKTLYNRRTRQDEPALFVALTFERREVLDSSNIKPMNLIGVDRGENIPAVIALTDPEGCPLSRFKDSLGNPTHILRIGESYKEKQRTIQAKKEVEQRRAGGYSRKYASKAKNLADDMVRNTARDLLYYAVTQDAMLIFENLSRGFGRQGKRTFMAERQYTRMEDWLTAKLAYEGLPSKTYLSKTLAQYTSKTCSNCGFTITSADYDRVLEKLKKTATGWMTTINGKELKVEGQITYYNRYKRQNVVKDLSVELDRLSEESVNNDISSWTKGRSGEALSLLKKRFSHRPVQEKFVCLNCGFETHADEQAALNIARSWLFLRSQEYKKYQTNKTTGNTDKRAFVETWQSFYRKKLKEVWKPAV

SEQ ID NO: 128 - protein, 979 aa, synthetic construct
QEIKRINKIRRRLVKDSNTKKAGKTGPMKTLLVRVMTPDLRERLENLRKKPENIPQPISNTSRANLNKLLTDYTEMKKAILHVYWEEFQKDPVGLMSRVAQPASKKIDQNKLKPEMDEKGNLTTAGFACSQCGQPLFVYKLEQVSEKGKAYTNYFGRCNVAEHEKLILLAQLKPEKDSDEAVTYSLGKFGQRALDFYSIHVTKESTHPVKPLAQIAGNRYASGPVGKALSDACMGTIASFLSKYQDIIIEHQKVVKGNQKRLESLRELAGKENLEYPSVTLPPQPHTKEGVDAYNEVIARVRMWVNLNLWQKLKLSRDDAKPLLRLKGFPSFPLVERQANEVDWWDMVCNVKKLINEKKEDGKVFWQNLAGYKRQEALRPYLSSEEDRKKGKKFARYQLGDLLLHLEKKHGEYDWGKVYDEAWERIDKKVEGLSKHIKLEEERRSEDAQSKAALTDWLRAKASFVIEGLKEADKDEFCRCELKLQKWYGDLRGKPFAIEAENSILDISGFSKQYNCAFIWQKDGVKKLNLYLIINYFKGGKLRFKKIKPEAFEANRFYTVINKKSGEIVPMEVNFNFDDPNLIILPLAFGKRQGREFIWNDLLSLETGSLKLANGRVIEKTLYNRRTRQDEPALFVALTFERREVLDSSNIKPMNLIGVDRGENIPAVIALTDPEGCPLSRFKDSLGNPTHILRIGESYKEKQRTIQAKKEVEQRRAGGYSRKYASKAKNLADDMVRNTARDLLYYAVTQDAMLIFENLSRGFGRQGKRTFMAERQYTRMEDWLTAKLAYEGLPSKTYLSKTLAQYTSKTCSNCGFTITSADYDRVLEKLKKTATGWMTTINGKELKVEGQITYYNRYKRQNVVKDLSVELDRLSEESVNNDISSWTKGRSGEALSLLKKRFSHRPVQEKFVCLNCGFETHADEQAALNIARSWLFLRSQEYKKYQTNKTTGNTDKRAFVETWQSFYRKKLKEVWKPAV

SEQ ID NO: 129 - protein, 979 aa, synthetic construct
QEIKRINKIRRRLVKDSNTKKAGKTGPMKTLLVRVMTPDLRERLENLRKKPENIPQPISNTSRANLNKLLTDYTEMKKAILHVYWEEFQKDPVGLMSRVAQPASKKIDQNKLKPEMDEKGNLTTAGFACSQCGQPLFVYKLEQVSEKGKAYTNYFGRCNVAEHEKLILLAQLKPEKDSDEAVTYSLGKFGQRALDFYSIHVTKESTHPVKPLAQIAGNRYASGPVGKALSDACMGTIASFLSKYQDIIIEHQKVVKGNQKRLESLRELAGKENLEYPSVTLPPQPHTKEGVDAYNEVIARVRMWVNLNLWQKLKLSRDDAKPLLRLKGFPSFPLVERQANEVDWWDMVCNVKKLINEKKEDGKVFWQNLAGYKRQEALRPYLSSEEDRKKGKKFARYQLGDLLLHLEKKHGEDYWGKVYDEAWERIDKKVEGLSKHIKLEEERRSEDAQSKAALTDWLRAKASFVIEGLKEADKDEFCRCELKLQKWYGDLRGKPFAIEAENSILDISGFSKQYNCAFIWQKDGVKKLNLYLIINYFKGGKLRFKKIKPEAFEANRFYTVINKKSGEIVPMEVNFNFDDPNLIILPLAFGKRQGREFIWNDLLSLETGSLKLANGRVIEKTLYNRRTRQDEPALFVALTFERREVLDSSNIKPMNLIGVDRGENIPAVIALTDPEGCPLSRFKDSLGNPTHILRIGESYKEKQRTIQAKKEVEQRRAGGYSRKYASKAKNLADDMVRNTARDLLYYAVTQDAMLIFENLSRGFGRQGKRTFMAERQYTRMEDWLTAKLAYEGLPSKTYLSKTLAQYTSKTCSNCGFTITSADYDRVLEKLKKTATGWMTTINGKELKVEGQITYYNRYKRQNVVKDLSVELDRLSEESVNNDISSWTKGRSGEALSLLKKRFSHRPVQEKFVCLNCGFETHADEQAALNIARSWLFLRSQEYKKYQTNKTTGNTDKRAFVETWQSFYRKKLKEVWKPAV

SEQ ID NO: 130 - protein, 978 aa, synthetic construct
QEIKRINKIRRRLVKDSNTKKAGKTGPMKTLLVRVMTPDLRERLENLRKKPENIPQPISNTSRANLNKLLTDYTEMKKAILHVYWEEFQKDPVGLMSRVAQPASKKIDQNKLKPEMDEKGNLTTAGFACSQCGQPLFVYKLEQVSEKGKAYTNYFGRCNVAEHEKLILLAQLKPEKDSDEAVTYSLGKFGQRALDFYSIHVTKESTHPVKPLAQIAGNRYASGPVGKALSDACMGTIASFLSKYQDIIIEHQKVVKGNQKRLESLRELAGKENLEYPSVTLPPQPHTKEGVDAYNEVIARVRMWVNLNLWQKLKLSRDDAKPLLRLKGFPSFPLVERQANEVDWWDMVCNVKKLINEKKEDGKVFWQNLAGYKRQEALRPYLSSEEDRKKGKKFARYQLGDLLLHLEKKHGEDRGKVYDEAWERIDKKVEGLSKHIKLEEERRSEDAQSKAALTDWLRAKASFVIEGLKEADKDEFCRCELKLQKWYGDLRGKPFAIEAENSILDISGFSKQYNCAFIWQKDGVKKLNLYLIINYFKGGKLRFKKIKPEAFEANRFYTVINKKSGEIVPMEVNFNFDDPNLIILPLAFGKRQGREFIWNDLLSLETGSLKLANGRVIEKTLYNRRTRQDEPALFVALTFERREVLDSSNIKPMNLIGVDRGENIPAVIALTDPEGCPLSRFKDSLGNPTHILRIGESYKEKQRTIQAKKEVEQRRAGGYSRKYASKAKNLADDMVRNTARDLLYYAVTQDAMLIFENLSRGFGRQGKRTFMAERQYTRMEDWLTAKLAYEGLPSKTYLSKTLAQYTSKTCSNCGFTITSADYDRVLEKLKKTATGWMTTINGKELKVEGQITYYNRYKRQNVVKDLSVELDRLSEESVNNDISSWTKGRSGEALSLLKKRFSHRPVQEKFVCLNCGFETHADEQAALNIARSWLFLRSQEYKKYQTNKTTGNTDKRAFVETWQSFYRKKLKEVWKPAV

SEQ ID NO: 131 - protein, 978 aa, synthetic construct
QEIKRINKIRRRLVKDSNTKKAGKTGPMKTLLVRVMTPDLRERLENLRKKPENIPQPISNTSRANLNKLLTDYTEMKKAILHVYWEEFQKDPVGLMSRVAQPASKKIDQNKLKPEMDEKGNLTTAGFACSQCGQPLFVYKLEQVSEKGKAYTNYFGRCNVAEHEKLILLAQLKPEKDSDEAVTYSLGKFGQRALDFYSIHVTKESTHPVKPLAQIAGNRYASGPVGKALSDACMGTIASFLSKYQDIIIEHQKVVKGNQKRLESLRELAGKENLEYPSVTLPPQPHTKEGVDAYNEVIARVRMWVNLNLWQKLKLSRDDAKPLLRLKGFPSFPLVERQANEVDWWDMVCNVKKLINEKKEDGKVFWQNLAGYKRQEALRPYLSSEEDRKKGKKFARYQLGDLLLHLEKKHGEDWGDVYDEAWERIDKKVEGLSKHIKLEEERRSEDAQSKAALTDWLRAKASFVIEGLKEADKDEFCRCELKLQKWYGDLRGKPFAIEAENSILDISGFSKQYNCAFIWQKDGVKKLNLYLIINYFKGGKLRFKKIKPEAFEANRFYTVINKKSGEIVPMEVNFNFDDPNLIILPLAFGKRQGREFIWNDLLSLETGSLKLANGRVIEKTLYNRRTRQDEPALFVALTFERREVLDSSNIKPMNLIGVDRGENIPAVIALTDPEGCPLSRFKDSLGNPTHILRIGESYKEKQRTIQAKKEVEQRRAGGYSRKYASKAKNLADDMVRNTARDLLYYAVTQDAMLIFENLSRGFGRQGKRTFMAERQYTRMEDWLTAKLAYEGLPSKTYLSKTLAQYTSKTCSNCGFTITSADYDRVLEKLKKTATGWMTTINGKELKVEGQITYYNRYKRQNVVKDLSVELDRLSEESVNNDISSWTKGRSGEALSLLKKRFSHRPVQEKFVCLNCGFETHADEQAALNIARSWLFLRSQEYKKYQTNKTTGNTDKRAFVETWQSFYRKKLKEVWKPAV

SEQ ID NO: 132 - protein, 978 aa, synthetic construct
QEIKRINKIRRRLVKDSNTKKAGKTGPMKTLLVRVMTPDLRERLENLRKKPENIPQPISNTSRANLNKLLTDYTEMKKAILHVYWEEFQKDPVGLMSRVAQPASKKIDQNKLKPEMDEKGNLTTAGFACSQCGQPLFVYKLEQVSEKGKAYTNYFGRCNVAEHEKLILLAQLKPEKDSDEAVTYSLGKFGQRALDFYSIHVTKESTHPVKPLAQIAGNRYASGPVGKALSDACMGTIASFLSKYQDIIIEHQKVVKGNQKRLESLRELAGKENLEYPSVTLPPQPHTKEGVDAYNEVIARVRMWVNLNLWQKLKLSRDDAKPLLRLKGFPSFPLVERQANEVDWWDMVCNVKKLINEKKEDGKVFWQNLAGYKRQEALRPYLSSEEDRKKGKKFARYQLGDLLLHLEKKHGEDWGPVYDEAWERIDKKVEGLSKHIKLEEERRSEDAQSKAALTDWLRAKASFVIEGLKEADKDEFCRCELKLQKWYGDLRGKPFAIEAENSILDISGFSKQYNCAFIWQKDGVKKLNLYLIINYFKGGKLRFKKIKPEAFEANRFYTVINKKSGEIVPMEVNFNFDDPNLIILPLAFGKRQGREFIWNDLLSLETGSLKLANGRVIEKTLYNRRTRQDEPALFVALTFERREVLDSSNIKPMNLIGVDRGENIPAVIALTDPEGCPLSRFKDSLGNPTHILRIGESYKEKQRTIQAKKEVEQRRAGGYSRKYASKAKNLADDMVRNTARDLLYYAVTQDAMLIFENLSRGFGRQGKRTFMAERQYTRMEDWLTAKLAYEGLPSKTYLSKTLAQYTSKTCSNCGFTITSADYDRVLEKLKKTATGWMTTINGKELKVEGQITYYNRYKRQNVVKDLSVELDRLSEESVNNDISSWTKGRSGEALSLLKKRFSHRPVQEKFVCLNCGFETHADEQAALNIARSWLFLRSQEYKKYQTNKTTGNTDKRAFVETWQSFYRKKLKEVWKPAV

SEQ ID NO: 133 - protein, 978 aa, synthetic construct
QEIKRINKIRRRLVKDSNTKKAGKTGPMKTLLVRVMTPDLRERLENLRKKPENIPQPISNTSRANLNKLLTDYTEMKKAILHVYWEEFQKDPVGLMSRVAQPASKKIDQNKLKPEMDEKGNLTTAGFACSQCGQPLFVYKLEQVSEKGKAYTNYFGRCNVAEHEKLILLAQLKPEKDSDEAVTYSLGKFGQRALDFYSIHVTKESTHPVKPLAQIAGNRYASGPVGKALSDACMGTIASFLSKYQDIIIEHQKVVKGNQKRLESLRELAGKENLEYPSVTLPPQPHTKEGVDAYNEVIARVRMWVNLNLWQKLKLSRDDAKPLLRLKGFPSFPLVERQANEVDWWDMVCNVKKLINEKKEDGKVFWQNLAGYKRQEALRPYLSSEEDRKKGKKFARYQLGDLLLHLEKKHGEDWGKLYDEAWERIDKKVEGLSKHIKLEEERRSEDAQSKAALTDWLRAKASFVIEGLKEADKDEFCRCELKLQKWYGDLRGKPFAIEAENSILDISGFSKQYNCAFIWQKDGVKKLNLYLIINYFKGGKLRFKKIKPEAFEANRFYTVINKKSGEIVPMEVNFNFDDPNLIILPLAFGKRQGREFIWNDLLSLETGSLKLANGRVIEKTLYNRRTRQDEPALFVALTFERREVLDSSNIKPMNLIGVDRGENIPAVIALTDPEGCPLSRFKDSLGNPTHILRIGESYKEKQRTIQAKKEVEQRRAGGYSRKYASKAKNLADDMVRNTARDLLYYAVTQDAMLIFENLSRGFGRQGKRTFMAERQYTRMEDWLTAKLAYEGLPSKTYLSKTLAQYTSKTCSNCGFTITSADYDRVLEKLKKTATGWMTTINGKELKVEGQITYYNRYKRQNVVKDLSVELDRLSEESVNNDISSWTKGRSGEALSLLKKRFSHRPVQEKFVCLNCGFETHADEQAALNIARSWLFLRSQEYKKYQTNKTTGNTDKRAFVETWQSFYRKKLKEVWKPAV

SEQ ID NO: 134 - protein, 978 aa, synthetic construct
QEIKRINKIRRRLVKDSNTKKAGKTGPMKTLLVRVMTPDLRERLENLRKKPENIPQPISNTSRANLNKLLTDYTEMKKAILHVYWEEFQKDPVGLMSRVAQPASKKIDQNKLKPEMDEKGNLTTAGFACSQCGQPLFVYKLEQVSEKGKAYTNYFGRCNVAEHEKLILLAQLKPEKDSDEAVTYSLGKFGQRALDFYSIHVTKESTHPVKPLAQIAGNRYASGPVGKALSDACMGTIASFLSKYQDIIIEHQKVVKGNQKRLESLRELAGKENLEYPSVTLPPQPHTKEGVDAYNEVIARVRMWVNLNLWQKLKLSRDDAKPLLRLKGFPSFPLVERQANEVDWWDMVCNVKKLINEKKEDGKVFWQNLAGYKRQEALRPYLSSEEDRKKGKKFARYQLGDLLLHLEKKHGEDWGKVYGEAWERIDKKVEGLSKHIKLEEERRSEDAQSKAALTDWLRAKASFVIEGLKEADKDEFCRCELKLQKWYGDLRGKPFAIEAENSILDISGFSKQYNCAFIWQKDGVKKLNLYLIINYFKGGKLRFKKIKPEAFEANRFYTVINKKSGEIVPMEVNFNFDDPNLIILPLAFGKRQGREFIWNDLLSLETGSLKLANGRVIEKTLYNRRTRQDEPALFVALTFERREVLDSSNIKPMNLIGVDRGENIPAVIALTDPEGCPLSRFKDSLGNPTHILRIGESYKEKQRTIQAKKEVEQRRAGGYSRKYASKAKNLADDMVRNTARDLLYYAVTQDAMLIFENLSRGFGRQGKRTFMAERQYTRMEDWLTAKLAYEGLPSKTYLSKTLAQYTSKTCSNCGFTITSADYDRVLEKLKKTATGWMTTINGKELKVEGQITYYNRYKRQNVVKDLSVELDRLSEESVNNDISSWTKGRSGEALSLLKKRFSHRPVQEKFVCLNCGFETHADEQAALNIARSWLFLRSQEYKKYQTNKTTGNTDKRAFVETWQSFYRKKLKEVWKPAV

SEQ ID NO: 135 - protein, 978 aa, synthetic construct
QEIKRINKIRRRLVKDSNTKKAGKTGPMKTLLVRVMTPDLRERLENLRKKPENIPQPISNTSRANLNKLLTDYTEMKKAILHVYWEEFQKDPVGLMSRVAQPASKKIDQNKLKPEMDEKGNLTTAGFACSQCGQPLFVYKLEQVSEKGKAYTNYFGRCNVAEHEKLILLAQLKPEKDSDEAVTYSLGKFGQRALDFYSIHVTKESTHPVKPLAQIAGNRYASGPVGKALSDACMGTIASFLSKYQDIIIEHQKVVKGNQKRLESLRELAGKENLEYPSVTLPPQPHTKEGVDAYNEVIARVRMWVNLNLWQKLKLSRDDAKPLLRLKGFPSFPLVERQANEVDWWDMVCNVKKLINEKKEDGKVFWQNLAGYKRQEALRPYLSSEEDRKKGKKFARYQLGDLLLHLEKKHGEDWGKVYDEAWERIDKKVEGLSKHQKLEEERRSEDAQSKAALTDWLRAKASFVIEGLKEADKDEFCRCELKLQKWYGDLRGKPFAIEAENSILDISGFSKQYNCAFIWQKDGVKKLNLYLIINYFKGGKLRFKKIKPEAFEANRFYTVINKKSGEIVPMEVNFNFDDPNLIILPLAFGKRQGREFIWNDLLSLETGSLKLANGRVIEKTLYNRRTRQDEPALFVALTFERREVLDSSNIKPMNLIGVDRGENIPAVIALTDPEGCPLSRFKDSLGNPTHILRIGESYKEKQRTIQAKKEVEQRRAGGYSRKYASKAKNLADDMVRNTARDLLYYAVTQDAMLIFENLSRGFGRQGKRTFMAERQYTRMEDWLTAKLAYEGLPSKTYLSKTLAQYTSKTCSNCGFTITSADYDRVLEKLKKTATGWMTTINGKELKVEGQITYYNRYKRQNVVKDLSVELDRLSEESVNNDISSWTKGRSGEALSLLKKRFSHRPVQEKFVCLNCGFETHADEQAALNIARSWLFLRSQEYKKYQTNKTTGNTDKRAFVETWQSFYRKKLKEVWKPAV

SEQ ID NO: 136 - protein, 978 aa, synthetic construct
QEIKRINKIRRRLVKDSNTKKAGKTGPMKTLLVRVMTPDLRERLENLRKKPENIPQPISNTSRANLNKLLTDYTEMKKAILHVYWEEFQKDPVGLMSRVAQPASKKIDQNKLKPEMDEKGNLTTAGFACSQCGQPLFVYKLEQVSEKGKAYTNYFGRCNVAEHEKLILLAQLKPEKDSDEAVTYSLGKFGQRALDFYSIHVTKESTHPVKPLAQIAGNRYASGPVGKALSDACMGTIASFLSKYQDIIIEHQKVVKGNQKRLESLRELAGKENLEYPSVTLPPQPHTKEGVDAYNEVIARVRMWVNLNLWQKLKLSRDDAKPLLRLKGFPSFPLVERQANEVDWWDMVCNVKKLINEKKEDGKVFWQNLAGYKRQEALRPYLSSEEDRKKGKKFARYQLGDLLLHLEKKHGEDWGKVYDEAWERIDKKVEGLSKHIKLEEEDRSEDAQSKAALTDWLRAKASFVIEGLKEADKDEFCRCELKLQKWYGDLRGKPFAIEAENSILDISGFSKQYNCAFIWQKDGVKKLNLYLIINYFKGGKLRFKKIKPEAFEANRFYTVINKKSGEIVPMEVNFNFDDPNLIILPLAFGKRQGREFIWNDLLSLETGSLKLANGRVIEKTLYNRRTRQDEPALFVALTFERREVLDSSNIKPMNLIGVDRGENIPAVIALTDPEGCPLSRFKDSLGNPTHILRIGESYKEKQRTIQAKKEVEQRRAGGYSRKYASKAKNLADDMVRNTARDLLYYAVTQDAMLIFENLSRGFGRQGKRTFMAERQYTRMEDWLTAKLAYEGLPSKTYLSKTLAQYTSKTCSNCGFTITSADYDRVLEKLKKTATGWMTTINGKELKVEGQITYYNRYKRQNVVKDLSVELDRLSEESVNNDISSWTKGRSGEALSLLKKRFSHRPVQEKFVCLNCGFETHADEQAALNIARSWLFLRSQEYKKYQTNKTTGNTDKRAFVETWQSFYRKKLKEVWKPAV

SEQ ID NO: 137 - protein, 978 aa, synthetic construct
QEIKRINKIRRRLVKDSNTKKAGKTGPMKTLLVRVMTPDLRERLENLRKKPENIPQPISNTSRANLNKLLTDYTEMKKAILHVYWEEFQKDPVGLMSRVAQPASKKIDQNKLKPEMDEKGNLTTAGFACSQCGQPLFVYKLEQVSEKGKAYTNYFGRCNVAEHEKLILLAQLKPEKDSDEAVTYSLGKFGQRALDFYSIHVTKESTHPVKPLAQIAGNRYASGPVGKALSDACMGTIASFLSKYQDIIIEHQKVVKGNQKRLESLRELAGKENLEYPSVTLPPQPHTKEGVDAYNEVIARVRMWVNLNLWQKLKLSRDDAKPLLRLKGFPSFPLVERQANEVDWWDMVCNVKKLINEKKEDGKVFWQNLAGYKRQEALRPYLSSEEDRKKGKKFARYQLGDLLLHLEKKHGEDWGKVYDEAWERIDKKVEGLSKHIKLEEERRSEDAQSKAATTDWLRAKASFVIEGLKEADKDEFCRCELKLQKWYGDLRGKPFAIEAENSILDISGFSKQYNCAFIWQKDGVKKLNLYLIINYFKGGKLRFKKIKPEAFEANRFYTVINKKSGEIVPMEVNFNFDDPNLIILPLAFGKRQGREFIWNDLLSLETGSLKLANGRVIEKTLYNRRTRQDEPALFVALTFERREVLDSSNIKPMNLIGVDRGENIPAVIALTDPEGCPLSRFKDSLGNPTHILRIGESYKEKQRTIQAKKEVEQRRAGGYSRKYASKAKNLADDMVRNTARDLLYYAVTQDAMLIFENLSRGFGRQGKRTFMAERQYTRMEDWLTAKLAYEGLPSKTYLSKTLAQYTSKTCSNCGFTITSADYDRVLEKLKKTATGWMTTINGKELKVEGQITYYNRYKRQNVVKDLSVELDRLSEESVNNDISSWTKGRSGEALSLLKKRFSHRPVQEKFVCLNCGFETHADEQAALNIARSWLFLRSQEYKKYQTNKTTGNTDKRAFVETWQSFYRKKLKEVWKPAV

SEQ ID NO: 138 - protein, 978 aa, synthetic construct
QEIKRINKIRRRLVKDSNTKKAGKTGPMKTLLVRVMTPDLRERLENLRKKPENIPQPISNTSRANLNKLLTDYTEMKKAILHVYWEEFQKDPVGLMSRVAQPASKKIDQNKLKPEMDEKGNLTTAGFACSQCGQPLFVYKLEQVSEKGKAYTNYFGRCNVAEHEKLILLAQLKPEKDSDEAVTYSLGKFGQRALDFYSIHVTKESTHPVKPLAQIAGNRYASGPVGKALSDACMGTIASFLSKYQDIIIEHQKVVKGNQKRLESLRELAGKENLEYPSVTLPPQPHTKEGVDAYNEVIARVRMWVNLNLWQKLKLSRDDAKPLLRLKGFPSFPLVERQANEVDWWDMVCNVKKLINEKKEDGKVFWQNLAGYKRQEALRPYLSSEEDRKKGKKFARYQLGDLLLHLEKKHGEDWGKVYDEAWERIDKKVEGLSKHIKLEEERRSEDAQSKAALTDWLRAKTSFVIEGLKEADKDEFCRCELKLQKWYGDLRGKPFAIEAENSILDISGFSKQYNCAFIWQKDGVKKLNLYLIINYFKGGKLRFKKIKPEAFEANRFYTVINKKSGEIVPMEVNFNFDDPNLIILPLAFGKRQGREFIWNDLLSLETGSLKLANGRVIEKTLYNRRTRQDEPALFVALTFERREVLDSSNIKPMNLIGVDRGENIPAVIALTDPEGCPLSRFKDSLGNPTHILRIGESYKEKQRTIQAKKEVEQRRAGGYSRKYASKAKNLADDMVRNTARDLLYYAVTQDAMLIFENLSRGFGRQGKRTFMAERQYTRMEDWLTAKLAYEGLPSKTYLSKTLAQYTSKTCSNCGFTITSADYDRVLEKLKKTATGWMTTINGKELKVEGQITYYNRYKRQNVVKDLSVELDRLSEESVNNDISSWTKGRSGEALSLLKKRFSHRPVQEKFVCLNCGFETHADEQAALNIARSWLFLRSQEYKKYQTNKTTGNTDKRAFVETWQSFYRKKLKEVWKPAV

SEQ ID NO: 139 - protein, 978 aa, synthetic construct
QEIKRINKIRRRLVKDSNTKKAGKTGPMKTLLVRVMTPDLRERLENLRKKPENIPQPISNTSRANLNKLLTDYTEMKKAILHVYWEEFQKDPVGLMSRVAQPASKKIDQNKLKPEMDEKGNLTTAGFACSQCGQPLFVYKLEQVSEKGKAYTNYFGRCNVAEHEKLILLAQLKPEKDSDEAVTYSLGKFGQRALDFYSIHVTKESTHPVKPLAQIAGNRYASGPVGKALSDACMGTIASFLSKYQDIIIEHQKVVKGNQKRLESLRELAGKENLEYPSVTLPPQPHTKEGVDAYNEVIARVRMWVNLNLWQKLKLSRDDAKPLLRLKGFPSFPLVERQANEVDWWDMVCNVKKLINEKKEDGKVFWQNLAGYKRQEALRPYLSSEEDRKKGKKFARYQLGDLLLHLEKKHGEDWGKVYDEAWERIDKKVEGLSKHIKLEEERRSEDAQSKAALTDWLRAKKSFVIEGLKEADKDEFCRCELKLQKWYGDLRGKPFAIEAENSILDISGFSKQYNCAFIWQKDGVKKLNLYLIINYFKGGKLRFKKIKPEAFEANRFYTVINKKSGEIVPMEVNFNFDDPNLIILPLAFGKRQGREFIWNDLLSLETGSLKLANGRVIEKTLYNRRTRQDEPALFVALTFERREVLDSSNIKPMNLIGVDRGENIPAVIALTDPEGCPLSRFKDSLGNPTHILRIGESYKEKQRTIQAKKEVEQRRAGGYSRKYASKAKNLADDMVRNTARDLLYYAVTQDAMLIFENLSRGFGRQGKRTFMAERQYTRMEDWLTAKLAYEGLPSKTYLSKTLAQYTSKTCSNCGFTITSADYDRVLEKLKKTATGWMTTINGKELKVEGQITYYNRYKRQNVVKDLSVELDRLSEESVNNDISSWTKGRSGEALSLLKKRFSHRPVQEKFVCLNCGFETHADEQAALNIARSWLFLRSQEYKKYQTNKTTGNTDKRAFVETWQSFYRKKLKEVWKPAV

SEQ ID NO: 140 - protein, 978 aa, synthetic construct
QEIKRINKIRRRLVKDSNTKKAGKTGPMKTLLVRVMTPDLRERLENLRKKPENIPQPISNTSRANLNKLLTDYTEMKKAILHVYWEEFQKDPVGLMSRVAQPASKKIDQNKLKPEMDEKGNLTTAGFACSQCGQPLFVYKLEQVSEKGKAYTNYFGRCNVAEHEKLILLAQLKPEKDSDEAVTYSLGKFGQRALDFYSIHVTKESTHPVKPLAQIAGNRYASGPVGKALSDACMGTIASFLSKYQDIIIEHQKVVKGNQKRLESLRELAGKENLEYPSVTLPPQPHTKEGVDAYNEVIARVRMWVNLNLWQKLKLSRDDAKPLLRLKGFPSFPLVERQANEVDWWDMVCNVKKLINEKKEDGKVFWQNLAGYKRQEALRPYLSSEEDRKKGKKFARYQLGDLLLHLEKKHGEDWGKVYDEAWERIDKKVEGLSKHIKLEEERRSEDAQSKAALTDWLRAKASFVEEGLKEADKDEFCRCELKLQKWYGDLRGKPFAIEAENSILDISGFSKQYNCAFIWQKDGVKKLNLYLIINYFKGGKLRFKKIKPEAFEANRFYTVINKKSGEIVPMEVNFNFDDPNLIILPLAFGKRQGREFIWNDLLSLETGSLKLANGRVIEKTLYNRRTRQDEPALFVALTFERREVLDSSNIKPMNLIGVDRGENIPAVIALTDPEGCPLSRFKDSLGNPTHILRIGESYKEKQRTIQAKKEVEQRRAGGYSRKYASKAKNLADDMVRNTARDLLYYAVTQDAMLIFENLSRGFGRQGKRTFMAERQYTRMEDWLTAKLAYEGLPSKTYLSKTLAQYTSKTCSNCGFTITSADYDRVLEKLKKTATGWMTTINGKELKVEGQITYYNRYKRQNVVKDLSVELDRLSEESVNNDISSWTKGRSGEALSLLKKRFSHRPVQEKFVCLNCGFETHADEQAALNIARSWLFLRSQEYKKYQTNKTTGNTDKRAFVETWQSFYRKKLKEVWKPAV

SEQ ID NO: 141 - protein, 979 aa, synthetic construct
QEIKRINKIRRRLVKDSNTKKAGKTGPMKTLLVRVMTPDLRERLENLRKKPENIPQPISNTSRANLNKLLTDYTEMKKAILHVYWEEFQKDPVGLMSRVAQPASKKIDQNKLKPEMDEKGNLTTAGFACSQCGQPLFVYKLEQVSEKGKAYTNYFGRCNVAEHEKLILLAQLKPEKDSDEAVTYSLGKFGQRALDFYSIHVTKESTHPVKPLAQIAGNRYASGPVGKALSDACMGTIASFLSKYQDIIIEHQKVVKGNQKRLESLRELAGKENLEYPSVTLPPQPHTKEGVDAYNEVIARVRMWVNLNLWQKLKLSRDDAKPLLRLKGFPSFPLVERQANEVDWWDMVCNVKKLINEKKEDGKVFWQNLAGYKRQEALRPYLSSEEDRKKGKKFARYQLGDLLLHLEKKHGEDWGKVYDEAWERIDKKVEGLSKHIKLEEERRSEDAQSKAALTDWLRAKASFVISEGLKEADKDEFCRCELKLQKWYGDLRGKPFAIEAENSILDISGFSKQYNCAFIWQKDGVKKLNLYLIINYFKGGKLRFKKIKPEAFEANRFYTVINKKSGEIVPMEVNFNFDDPNLIILPLAFGKRQGREFIWNDLLSLETGSLKLANGRVIEKTLYNRRTRQDEPALFVALTFERREVLDSSNIKPMNLIGVDRGENIPAVIALTDPEGCPLSRFKDSLGNPTHILRIGESYKEKQRTIQAKKEVEQRRAGGYSRKYASKAKNLADDMVRNTARDLLYYAVTQDAMLIFENLSRGFGRQGKRTFMAERQYTRMEDWLTAKLAYEGLPSKTYLSKTLAQYTSKTCSNCGFTITSADYDRVLEKLKKTATGWMTTINGKELKVEGQITYYNRYKRQNVVKDLSVELDRLSEESVNNDISSWTKGRSGEALSLLKKRFSHRPVQEKFVCLNCGFETHADEQAALNIARSWLFLRSQEYKKYQTNKTTGNTDKRAFVETWQSFYRKKLKEVWKPAV

SEQ ID NO: 142 - protein, 979 aa, synthetic construct
QEIKRINKIRRRLVKDSNTKKAGKTGPMKTLLVRVMTPDLRERLENLRKKPENIPQPISNTSRANLNKLLTDYTEMKKAILHVYWEEFQKDPVGLMSRVAQPASKKIDQNKLKPEMDEKGNLTTAGFACSQCGQPLFVYKLEQVSEKGKAYTNYFGRCNVAEHEKLILLAQLKPEKDSDEAVTYSLGKFGQRALDFYSIHVTKESTHPVKPLAQIAGNRYASGPVGKALSDACMGTIASFLSKYQDIIIEHQKVVKGNQKRLESLRELAGKENLEYPSVTLPPQPHTKEGVDAYNEVIARVRMWVNLNLWQKLKLSRDDAKPLLRLKGFPSFPLVERQANEVDWWDMVCNVKKLINEKKEDGKVFWQNLAGYKRQEALRPYLSSEEDRKKGKKFARYQLGDLLLHLEKKHGEDWGKVYDEAWERIDKKVEGLSKHIKLEEERRSEDAQSKAALTDWLRAKASFVIERGLKEADKDEFCRCELKLQKWYGDLRGKPFAIEAENSILDISGFSKQYNCAFIWQKDGVKKLNLYLIINYFKGGKLRFKKIKPEAFEANRFYTVINKKSGEIVPMEVNFNFDDPNLIILPLAFGKRQGREFIWNDLLSLETGSLKLANGRVIEKTLYNRRTRQDEPALFVALTFERREVLDSSNIKPMNLIGVDRGENIPAVIALTDPEGCPLSRFKDSLGNPTHILRIGESYKEKQRTIQAKKEVEQRRAGGYSRKYASKAKNLADDMVRNTARDLLYYAVTQDAMLIFENLSRGFGRQGKRTFMAERQYTRMEDWLTAKLAYEGLPSKTYLSKTLAQYTSKTCSNCGFTITSADYDRVLEKLKKTATGWMTTINGKELKVEGQITYYNRYKRQNVVKDLSVELDRLSEESVNNDISSWTKGRSGEALSLLKKRFSHRPVQEKFVCLNCGFETHADEQAALNIARSWLFLRSQEYKKYQTNKTTGNTDKRAFVETWQSFYRKKLKEVWKPAV

SEQ ID NO: 143 - protein, 978 aa, synthetic construct
QEIKRINKIRRRLVKDSNTKKAGKTGPMKTLLVRVMTPDLRERLENLRKKPENIPQPISNTSRANLNKLLTDYTEMKKAILHVYWEEFQKDPVGLMSRVAQPASKKIDQNKLKPEMDEKGNLTTAGFACSQCGQPLFVYKLEQVSEKGKAYTNYFGRCNVAEHEKLILLAQLKPEKDSDEAVTYSLGKFGQRALDFYSIHVTKESTHPVKPLAQIAGNRYASGPVGKALSDACMGTIASFLSKYQDIIIEHQKVVKGNQKRLESLRELAGKENLEYPSVTLPPQPHTKEGVDAYNEVIARVRMWVNLNLWQKLKLSRDDAKPLLRLKGFPSFPLVERQANEVDWWDMVCNVKKLINEKKEDGKVFWQNLAGYKRQEALRPYLSSEEDRKKGKKFARYQLGDLLLHLEKKHGEDWGKVYDEAWERIDKKVEGLSKHIKLEEERRSEDAQSKAALTDWLRAKASFVIEGKKEADKDEFCRCELKLQKWYGDLRGKPFAIEAENSILDISGFSKQYNCAFIWQKDGVKKLNLYLIINYFKGGKLRFKKIKPEAFEANRFYTVINKKSGEIVPMEVNFNFDDPNLIILPLAFGKRQGREFIWNDLLSLETGSLKLANGRVIEKTLYNRRTRQDEPALFVALTFERREVLDSSNIKPMNLIGVDRGENIPAVIALTDPEGCPLSRFKDSLGNPTHILRIGESYKEKQRTIQAKKEVEQRRAGGYSRKYASKAKNLADDMVRNTARDLLYYAVTQDAMLIFENLSRGFGRQGKRTFMAERQYTRMEDWLTAKLAYEGLPSKTYLSKTLAQYTSKTCSNCGFTITSADYDRVLEKLKKTATGWMTTINGKELKVEGQITYYNRYKRQNVVKDLSVELDRLSEESVNNDISSWTKGRSGEALSLLKKRFSHRPVQEKFVCLNCGFETHADEQAALNIARSWLFLRSQEYKKYQTNKTTGNTDKRAFVETWQSFYRKKLKEVWKPAV

SEQ ID NO: 144 - protein, 978 aa, synthetic construct
QEIKRINKIRRRLVKDSNTKKAGKTGPMKTLLVRVMTPDLRERLENLRKKPENIPQPISNTSRANLNKLLTDYTEMKKAILHVYWEEFQKDPVGLMSRVAQPASKKIDQNKLKPEMDEKGNLTTAGFACSQCGQPLFVYKLEQVSEKGKAYTNYFGRCNVAEHEKLILLAQLKPEKDSDEAVTYSLGKFGQRALDFYSIHVTKESTHPVKPLAQIAGNRYASGPVGKALSDACMGTIASFLSKYQDIIIEHQKVVKGNQKRLESLRELAGKENLEYPSVTLPPQPHTKEGVDAYNEVIARVRMWVNLNLWQKLKLSRDDAKPLLRLKGFPSFPLVERQANEVDWWDMVCNVKKLINEKKEDGKVFWQNLAGYKRQEALRPYLSSEEDRKKGKKFARYQLGDLLLHLEKKHGEDWGKVYDEAWERIDKKVEGLSKHIKLEEERRSEDAQSKAALTDWLRAKASFVIEGSKEADKDEFCRCELKLQKWYGDLRGKPFAIEAENSILDISGFSKQYNCAFIWQKDGVKKLNLYLIINYFKGGKLRFKKIKPEAFEANRFYTVINKKSGEIVPMEVNFNFDDPNLIILPLAFGKRQGREFIWNDLLSLETGSLKLANGRVIEKTLYNRRTRQDEPALFVALTFERREVLDSSNIKPMNLIGVDRGENIPAVIALTDPEGCPLSRFKDSLGNPTHILRIGESYKEKQRTIQAKKEVEQRRAGGYSRKYASKAKNLADDMVRNTARDLLYYAVTQDAMLIFENLSRGFGRQGKRTFMAERQYTRMEDWLTAKLAYEGLPSKTYLSKTLAQYTSKTCSNCGFTITSADYDRVLEKLKKTATGWMTTINGKELKVEGQITYYNRYKRQNVVKDLSVELDRLSEESVNNDISSWTKGRSGEALSLLKKRFSHRPVQEKFVCLNCGFETHADEQAALNIARSWLFLRSQEYKKYQTNKTTGNTDKRAFVETWQSFYRKKLKEVWKPAV

SEQ ID NO: 145 - protein, 979 aa, synthetic construct
QEIKRINKIRRRLVKDSNTKKAGKTGPMKTLLVRVMTPDLRERLENLRKKPENIPQPISNTSRANLNKLLTDYTEMKKAILHVYWEEFQKDPVGLMSRVAQPASKKIDQNKLKPEMDEKGNLTTAGFACSQCGQPLFVYKLEQVSEKGKAYTNYFGRCNVAEHEKLILLAQLKPEKDSDEAVTYSLGKFGQRALDFYSIHVTKESTHPVKPLAQIAGNRYASGPVGKALSDACMGTIASFLSKYQDIIIEHQKVVKGNQKRLESLRELAGKENLEYPSVTLPPQPHTKEGVDAYNEVIARVRMWVNLNLWQKLKLSRDDAKPLLRLKGFPSFPLVERQANEVDWWDMVCNVKKLINEKKEDGKVFWQNLAGYKRQEALRPYLSSEEDRKKGKKFARYQLGDLLLHLEKKHGEDWGKVYDEAWERIDKKVEGLSKHIKLEEERRSEDAQSKAALTDWLRAKASFVIEGLKEADDKDEFCRCELKLQKWYGDLRGKPFAIEAENSILDISGFSKQYNCAFIWQKDGVKKLNLYLIINYFKGGKLRFKKIKPEAFEANRFYTVINKKSGEIVPMEVNFNFDDPNLIILPLAFGKRQGREFIWNDLLSLETGSLKLANGRVIEKTLYNRRTRQDEPALFVALTFERREVLDSSNIKPMNLIGVDRGENIPAVIALTDPEGCPLSRFKDSLGNPTHILRIGESYKEKQRTIQAKKEVEQRRAGGYSRKYASKAKNLADDMVRNTARDLLYYAVTQDAMLIFENLSRGFGRQGKRTFMAERQYTRMEDWLTAKLAYEGLPSKTYLSKTLAQYTSKTCSNCGFTITSADYDRVLEKLKKTATGWMTTINGKELKVEGQITYYNRYKRQNVVKDLSVELDRLSEESVNNDISSWTKGRSGEALSLLKKRFSHRPVQEKFVCLNCGFETHADEQAALNIARSWLFLRSQEYKKYQTNKTTGNTDKRAFVETWQSFYRKKLKEVWKPAV

SEQ ID NO: 146 - protein, 979 aa, synthetic construct
QEIKRINKIRRRLVKDSNTKKAGKTGPMKTLLVRVMTPDLRERLENLRKKPENIPQPISNTSRANLNKLLTDYTEMKKAILHVYWEEFQKDPVGLMSRVAQPASKKIDQNKLKPEMDEKGNLTTAGFACSQCGQPLFVYKLEQVSEKGKAYTNYFGRCNVAEHEKLILLAQLKPEKDSDEAVTYSLGKFGQRALDFYSIHVTKESTHPVKPLAQIAGNRYASGPVGKALSDACMGTIASFLSKYQDIIIEHQKVVKGNQKRLESLRELAGKENLEYPSVTLPPQPHTKEGVDAYNEVIARVRMWVNLNLWQKLKLSRDDAKPLLRLKGFPSFPLVERQANEVDWWDMVCNVKKLINEKKEDGKVFWQNLAGYKRQEALRPYLSSEEDRKKGKKFARYQLGDLLLHLEKKHGEDWGKVYDEAWERIDKKVEGLSKHIKLEEERRSEDAQSKAALTDWLRAKASFVIEGLKEADKDQEFCRCELKLQKWYGDLRGKPFAIEAENSILDISGFSKQYNCAFIWQKDGVKKLNLYLIINYFKGGKLRFKKIKPEAFEANRFYTVINKKSGEIVPMEVNFNFDDPNLIILPLAFGKRQGREFIWNDLLSLETGSLKLANGRVIEKTLYNRRTRQDEPALFVALTFERREVLDSSNIKPMNLIGVDRGENIPAVIALTDPEGCPLSRFKDSLGNPTHILRIGESYKEKQRTIQAKKEVEQRRAGGYSRKYASKAKNLADDMVRNTARDLLYYAVTQDAMLIFENLSRGFGRQGKRTFMAERQYTRMEDWLTAKLAYEGLPSKTYLSKTLAQYTSKTCSNCGFTITSADYDRVLEKLKKTATGWMTTINGKELKVEGQITYYNRYKRQNVVKDLSVELDRLSEESVNNDISSWTKGRSGEALSLLKKRFSHRPVQEKFVCLNCGFETHADEQAALNIARSWLFLRSQEYKKYQTNKTTGNTDKRAFVETWQSFYRKKLKEVWKPAV

SEQ ID NO: 147 - protein, 978 aa, synthetic construct
QEIKRINKIRRRLVKDSNTKKAGKTGPMKTLLVRVMTPDLRERLENLRKKPENIPQPISNTSRANLNKLLTDYTEMKKAILHVYWEEFQKDPVGLMSRVAQPASKKIDQNKLKPEMDEKGNLTTAGFACSQCGQPLFVYKLEQVSEKGKAYTNYFGRCNVAEHEKLILLAQLKPEKDSDEAVTYSLGKFGQRALDFYSIHVTKESTHPVKPLAQIAGNRYASGPVGKALSDACMGTIASFLSKYQDIIIEHQKVVKGNQKRLESLRELAGKENLEYPSVTLPPQPHTKEGVDAYNEVIARVRMWVNLNLWQKLKLSRDDAKPLLRLKGFPSFPLVERQANEVDWWDMVCNVKKLINEKKEDGKVFWQNLAGYKRQEALRPYLSSEEDRKKGKKFARYQLGDLLLHLEKKHGEDWGKVYDEAWERIDKKVEGLSKHIKLEEERRSEDAQSKAALTDWLRAKASFVIEGLKEADKDEKCRCELKLQKWYGDLRGKPFAIEAENSILDISGFSKQYNCAFIWQKDGVKKLNLYLIINYFKGGKLRFKKIKPEAFEANRFYTVINKKSGEIVPMEVNFNFDDPNLIILPLAFGKRQGREFIWNDLLSLETGSLKLANGRVIEKTLYNRRTRQDEPALFVALTFERREVLDSSNIKPMNLIGVDRGENIPAVIALTDPEGCPLSRFKDSLGNPTHILRIGESYKEKQRTIQAKKEVEQRRAGGYSRKYASKAKNLADDMVRNTARDLLYYAVTQDAMLIFENLSRGFGRQGKRTFMAERQYTRMEDWLTAKLAYEGLPSKTYLSKTLAQYTSKTCSNCGFTITSADYDRVLEKLKKTATGWMTTINGKELKVEGQITYYNRYKRQNVVKDLSVELDRLSEESVNNDISSWTKGRSGEALSLLKKRFSHRPVQEKFVCLNCGFETHADEQAALNIARSWLFLRSQEYKKYQTNKTTGNTDKRAFVETWQSFYRKKLKEVWKPAV

SEQ ID NO: 148 - protein, 978 aa, synthetic construct
QEIKRINKIRRRLVKDSNTKKAGKTGPMKTLLVRVMTPDLRERLENLRKKPENIPQPISNTSRANLNKLLTDYTEMKKAILHVYWEEFQKDPVGLMSRVAQPASKKIDQNKLKPEMDEKGNLTTAGFACSQCGQPLFVYKLEQVSEKGKAYTNYFGRCNVAEHEKLILLAQLKPEKDSDEAVTYSLGKFGQRALDFYSIHVTKESTHPVKPLAQIAGNRYASGPVGKALSDACMGTIASFLSKYQDIIIEHQKVVKGNQKRLESLRELAGKENLEYPSVTLPPQPHTKEGVDAYNEVIARVRMWVNLNLWQKLKLSRDDAKPLLRLKGFPSFPLVERQANEVDWWDMVCNVKKLINEKKEDGKVFWQNLAGYKRQEALRPYLSSEEDRKKGKKFARYQLGDLLLHLEKKHGEDWGKVYDEAWERIDKKVEGLSKHIKLEEERRSEDAQSKAALTDWLRAKASFVIEGLKEADKDEFCRDELKLQKWYGDLRGKPFAIEAENSILDISGFSKQYNCAFIWQKDGVKKLNLYLIINYFKGGKLRFKKIKPEAFEANRFYTVINKKSGEIVPMEVNFNFDDPNLIILPLAFGKRQGREFIWNDLLSLETGSLKLANGRVIEKTLYNRRTRQDEPALFVALTFERREVLDSSNIKPMNLIGVDRGENIPAVIALTDPEGCPLSRFKDSLGNPTHILRIGESYKEKQRTIQAKKEVEQRRAGGYSRKYASKAKNLADDMVRNTARDLLYYAVTQDAMLIFENLSRGFGRQGKRTFMAERQYTRMEDWLTAKLAYEGLPSKTYLSKTLAQYTSKTCSNCGFTITSADYDRVLEKLKKTATGWMTTINGKELKVEGQITYYNRYKRQNVVKDLSVELDRLSEESVNNDISSWTKGRSGEALSLLKKRFSHRPVQEKFVCLNCGFETHADEQAALNIARSWLFLRSQEYKKYQTNKTTGNTDKRAFVETWQSFYRKKLKEVWKPAV

SEQ ID NO: 149 - protein, 979 aa, synthetic construct
QEIKRINKIRRRLVKDSNTKKAGKTGPMKTLLVRVMTPDLRERLENLRKKPENIPQPISNTSRANLNKLLTDYTEMKKAILHVYWEEFQKDPVGLMSRVAQPASKKIDQNKLKPEMDEKGNLTTAGFACSQCGQPLFVYKLEQVSEKGKAYTNYFGRCNVAEHEKLILLAQLKPEKDSDEAVTYSLGKFGQRALDFYSIHVTKESTHPVKPLAQIAGNRYASGPVGKALSDACMGTIASFLSKYQDIIIEHQKVVKGNQKRLESLRELAGKENLEYPSVTLPPQPHTKEGVDAYNEVIARVRMWVNLNLWQKLKLSRDDAKPLLRLKGFPSFPLVERQANEVDWWDMVCNVKKLINEKKEDGKVFWQNLAGYKRQEALRPYLSSEEDRKKGKKFARYQLGDLLLHLEKKHGEDWGKVYDEAWERIDKKVEGLSKHIKLEEERRSEDAQSKAALTDWLRAKASFVIEGLKEADKDEFCRCVELKLQKWYGDLRGKPFAIEAENSILDISGFSKQYNCAFIWQKDGVKKLNLYLIINYFKGGKLRFKKIKPEAFEANRFYTVINKKSGEIVPMEVNFNFDDPNLIILPLAFGKRQGREFIWNDLLSLETGSLKLANGRVIEKTLYNRRTRQDEPALFVALTFERREVLDSSNIKPMNLIGVDRGENIPAVIALTDPEGCPLSRFKDSLGNPTHILRIGESYKEKQRTIQAKKEVEQRRAGGYSRKYASKAKNLADDMVRNTARDLLYYAVTQDAMLIFENLSRGFGRQGKRTFMAERQYTRMEDWLTAKLAYEGLPSKTYLSKTLAQYTSKTCSNCGFTITSADYDRVLEKLKKTATGWMTTINGKELKVEGQITYYNRYKRQNVVKDLSVELDRLSEESVNNDISSWTKGRSGEALSLLKKRFSHRPVQEKFVCLNCGFETHADEQAALNIARSWLFLRSQEYKKYQTNKTTGNTDKRAFVETWQSFYRKKLKEVWKPAV

SEQ ID NO: 150 - protein, 978 aa, synthetic construct
QEIKRINKIRRRLVKDSNTKKAGKTGPMKTLLVRVMTPDLRERLENLRKKPENIPQPISNTSRANLNKLLTDYTEMKKAILHVYWEEFQKDPVGLMSRVAQPASKKIDQNKLKPEMDEKGNLTTAGFACSQCGQPLFVYKLEQVSEKGKAYTNYFGRCNVAEHEKLILLAQLKPEKDSDEAVTYSLGKFGQRALDFYSIHVTKESTHPVKPLAQIAGNRYASGPVGKALSDACMGTIASFLSKYQDIIIEHQKVVKGNQKRLESLRELAGKENLEYPSVTLPPQPHTKEGVDAYNEVIARVRMWVNLNLWQKLKLSRDDAKPLLRLKGFPSFPLVERQANEVDWWDMVCNVKKLINEKKEDGKVFWQNLAGYKRQEALRPYLSSEEDRKKGKKFARYQLGDLLLHLEKKHGEDWGKVYDEAWERIDKKVEGLSKHIKLEEERRSEDAQSKAALTDWLRAKASFVIEGLKEADKDEFCRCDLKLQKWYGDLRGKPFAIEAENSILDISGFSKQYNCAFIWQKDGVKKLNLYLIINYFKGGKLRFKKIKPEAFEANRFYTVINKKSGEIVPMEVNFNFDDPNLIILPLAFGKRQGREFIWNDLLSLETGSLKLANGRVIEKTLYNRRTRQDEPALFVALTFERREVLDSSNIKPMNLIGVDRGENIPAVIALTDPEGCPLSRFKDSLGNPTHILRIGESYKEKQRTIQAKKEVEQRRAGGYSRKYASKAKNLADDMVRNTARDLLYYAVTQDAMLIFENLSRGFGRQGKRTFMAERQYTRMEDWLTAKLAYEGLPSKTYLSKTLAQYTSKTCSNCGFTITSADYDRVLEKLKKTATGWMTTINGKELKVEGQITYYNRYKRQNVVKDLSVELDRLSEESVNNDISSWTKGRSGEALSLLKKRFSHRPVQEKFVCLNCGFETHADEQAALNIARSWLFLRSQEYKKYQTNKTTGNTDKRAFVETWQSFYRKKLKEVWKPAV

SEQ ID NO: 151 - protein, 978 aa, synthetic construct
QEIKRINKIRRRLVKDSNTKKAGKTGPMKTLLVRVMTPDLRERLENLRKKPENIPQPISNTSRANLNKLLTDYTEMKKAILHVYWEEFQKDPVGLMSRVAQPASKKIDQNKLKPEMDEKGNLTTAGFACSQCGQPLFVYKLEQVSEKGKAYTNYFGRCNVAEHEKLILLAQLKPEKDSDEAVTYSLGKFGQRALDFYSIHVTKESTHPVKPLAQIAGNRYASGPVGKALSDACMGTIASFLSKYQDIIIEHQKVVKGNQKRLESLRELAGKENLEYPSVTLPPQPHTKEGVDAYNEVIARVRMWVNLNLWQKLKLSRDDAKPLLRLKGFPSFPLVERQANEVDWWDMVCNVKKLINEKKEDGKVFWQNLAGYKRQEALRPYLSSEEDRKKGKKFARYQLGDLLLHLEKKHGEDWGKVYDEAWERIDKKVEGLSKHIKLEEERRSEDAQSKAALTDWLRAKASFVIEGLKEADKDEFCRCERKLQKWYGDLRGKPFAIEAENSILDISGFSKQYNCAFIWQKDGVKKLNLYLIINYFKGGKLRFKKIKPEAFEANRFYTVINKKSGEIVPMEVNFNFDDPNLIILPLAFGKRQGREFIWNDLLSLETGSLKLANGRVIEKTLYNRRTRQDEPALFVALTFERREVLDSSNIKPMNLIGVDRGENIPAVIALTDPEGCPLSRFKDSLGNPTHILRIGESYKEKQRTIQAKKEVEQRRAGGYSRKYASKAKNLADDMVRNTARDLLYYAVTQDAMLIFENLSRGFGRQGKRTFMAERQYTRMEDWLTAKLAYEGLPSKTYLSKTLAQYTSKTCSNCGFTITSADYDRVLEKLKKTATGWMTTINGKELKVEGQITYYNRYKRQNVVKDLSVELDRLSEESVNNDISSWTKGRSGEALSLLKKRFSHRPVQEKFVCLNCGFETHADEQAALNIARSWLFLRSQEYKKYQTNKTTGNTDKRAFVETWQSFYRKKLKEVWKPAV

SEQ ID NO: 152 - protein, 978 aa, synthetic construct
QEIKRINKIRRRLVKDSNTKKAGKTGPMKTLLVRVMTPDLRERLENLRKKPENIPQPISNTSRANLNKLLTDYTEMKKAILHVYWEEFQKDPVGLMSRVAQPASKKIDQNKLKPEMDEKGNLTTAGFACSQCGQPLFVYKLEQVSEKGKAYTNYFGRCNVAEHEKLILLAQLKPEKDSDEAVTYSLGKFGQRALDFYSIHVTKESTHPVKPLAQIAGNRYASGPVGKALSDACMGTIASFLSKYQDIIIEHQKVVKGNQKRLESLRELAGKENLEYPSVTLPPQPHTKEGVDAYNEVIARVRMWVNLNLWQKLKLSRDDAKPLLRLKGFPSFPLVERQANEVDWWDMVCNVKKLINEKKEDGKVFWQNLAGYKRQEALRPYLSSEEDRKKGKKFARYQLGDLLLHLEKKHGEDWGKVYDEAWERIDKKVEGLSKHIKLEEERRSEDAQSKAALTDWLRAKASFVIEGLKEADKDEFCRCELKHQKWYGDLRGKPFAIEAENSILDISGFSKQYNCAFIWQKDGVKKLNLYLIINYFKGGKLRFKKIKPEAFEANRFYTVINKKSGEIVPMEVNFNFDDPNLIILPLAFGKRQGREFIWNDLLSLETGSLKLANGRVIEKTLYNRRTRQDEPALFVALTFERREVLDSSNIKPMNLIGVDRGENIPAVIALTDPEGCPLSRFKDSLGNPTHILRIGESYKEKQRTIQAKKEVEQRRAGGYSRKYASKAKNLADDMVRNTARDLLYYAVTQDAMLIFENLSRGFGRQGKRTFMAERQYTRMEDWLTAKLAYEGLPSKTYLSKTLAQYTSKTCSNCGFTITSADYDRVLEKLKKTATGWMTTINGKELKVEGQITYYNRYKRQNVVKDLSVELDRLSEESVNNDISSWTKGRSGEALSLLKKRFSHRPVQEKFVCLNCGFETHADEQAALNIARSWLFLRSQEYKKYQTNKTTGNTDKRAFVETWQSFYRKKLKEVWKPAV

SEQ ID NO: 153 - protein, 978 aa, synthetic construct
QEIKRINKIRRRLVKDSNTKKAGKTGPMKTLLVRVMTPDLRERLENLRKKPENIPQPISNTSRANLNKLLTDYTEMKKAILHVYWEEFQKDPVGLMSRVAQPASKKIDQNKLKPEMDEKGNLTTAGFACSQCGQPLFVYKLEQVSEKGKAYTNYFGRCNVAEHEKLILLAQLKPEKDSDEAVTYSLGKFGQRALDFYSIHVTKESTHPVKPLAQIAGNRYASGPVGKALSDACMGTIASFLSKYQDIIIEHQKVVKGNQKRLESLRELAGKENLEYPSVTLPPQPHTKEGVDAYNEVIARVRMWVNLNLWQKLKLSRDDAKPLLRLKGFPSFPLVERQANEVDWWDMVCNVKKLINEKKEDGKVFWQNLAGYKRQEALRPYLSSEEDRKKGKKFARYQLGDLLLHLEKKHGEDWGKVYDEAWERIDKKVEGLSKHIKLEEERRSEDAQSKAALTDWLRAKASFVIEGLKEADKDEFCRCELKLQPWYGDLRGKPFAIEAENSILDISGFSKQYNCAFIWQKDGVKKLNLYLIINYFKGGKLRFKKIKPEAFEANRFYTVINKKSGEIVPMEVNFNFDDPNLIILPLAFGKRQGREFIWNDLLSLETGSLKLANGRVIEKTLYNRRTRQDEPALFVALTFERREVLDSSNIKPMNLIGVDRGENIPAVIALTDPEGCPLSRFKDSLGNPTHILRIGESYKEKQRTIQAKKEVEQRRAGGYSRKYASKAKNLADDMVRNTARDLLYYAVTQDAMLIFENLSRGFGRQGKRTFMAERQYTRMEDWLTAKLAYEGLPSKTYLSKTLAQYTSKTCSNCGFTITSADYDRVLEKLKKTATGWMTTINGKELKVEGQITYYNRYKRQNVVKDLSVELDRLSEESVNNDISSWTKGRSGEALSLLKKRFSHRPVQEKFVCLNCGFETHADEQAALNIARSWLFLRSQEYKKYQTNKTTGNTDKRAFVETWQSFYRKKLKEVWKPAV

SEQ ID NO: 154 - protein, 978 aa, synthetic construct
QEIKRINKIRRRLVKDSNTKKAGKTGPMKTLLVRVMTPDLRERLENLRKKPENIPQPISNTSRANLNKLLTDYTEMKKAILHVYWEEFQKDPVGLMSRVAQPASKKIDQNKLKPEMDEKGNLTTAGFACSQCGQPLFVYKLEQVSEKGKAYTNYFGRCNVAEHEKLILLAQLKPEKDSDEAVTYSLGKFGQRALDFYSIHVTKESTHPVKPLAQIAGNRYASGPVGKALSDACMGTIASFLSKYQDIIIEHQKVVKGNQKRLESLRELAGKENLEYPSVTLPPQPHTKEGVDAYNEVIARVRMWVNLNLWQKLKLSRDDAKPLLRLKGFPSFPLVERQANEVDWWDMVCNVKKLINEKKEDGKVFWQNLAGYKRQEALRPYLSSEEDRKKGKKFARYQLGDLLLHLEKKHGEDWGKVYDEAWERIDKKVEGLSKHIKLEEERRSEDAQSKAALTDWLRAKASFVIEGLKEADKDEFCRCELKLQKWYGDLRGKPFAIEAENSILDISGFSKQYNCAFIWQKDGVKKLNLYLIINYFKGGKLRFKKIKPEAFEANRFYTVINKKSGEIVPMEVNFNFDDPNLIILPLAFGKRFGREFIWNDLLSLETGSLKLANGRVIEKTLYNRRTRQDEPALFVALTFERREVLDSSNIKPMNLIGVDRGENIPAVIALTDPEGCPLSRFKDSLGNPTHILRIGESYKEKQRTIQAKKEVEQRRAGGYSRKYASKAKNLADDMVRNTARDLLYYAVTQDAMLIFENLSRGFGRQGKRTFMAERQYTRMEDWLTAKLAYEGLPSKTYLSKTLAQYTSKTCSNCGFTITSADYDRVLEKLKKTATGWMTTINGKELKVEGQITYYNRYKRQNVVKDLSVELDRLSEESVNNDISSWTKGRSGEALSLLKKRFSHRPVQEKFVCLNCGFETHADEQAALNIARSWLFLRSQEYKKYQTNKTTGNTDKRAFVETWQSFYRKKLKEVWKPAV

SEQ ID NO: 155 - protein, 978 aa, synthetic construct
QEIKRINKIRRRLVKDSNTKKAGKTGPMKTLLVRVMTPDLRERLENLRKKPENIPQPISNTSRANLNKLLTDYTEMKKAILHVYWEEFQKDPVGLMSRVAQPASKKIDQNKLKPEMDEKGNLTTAGFACSQCGQPLFVYKLEQVSEKGKAYTNYFGRCNVAEHEKLILLAQLKPEKDSDEAVTYSLGKFGQRALDFYSIHVTKESTHPVKPLAQIAGNRYASGPVGKALSDACMGTIASFLSKYQDIIIEHQKVVKGNQKRLESLRELAGKENLEYPSVTLPPQPHTKEGVDAYNEVIARVRMWVNLNLWQKLKLSRDDAKPLLRLKGFPSFPLVERQANEVDWWDMVCNVKKLINEKKEDGKVFWQNLAGYKRQEALRPYLSSEEDRKKGKKFARYQLGDLLLHLEKKHGEDWGKVYDEAWERIDKKVEGLSKHIKLEEERRSEDAQSKAALTDWLRAKASFVIEGLKEADKDEFCRCELKLQKWYGDLRGKPFAIEAENSILDISGFSKQYNCAFIWQKDGVKKLNLYLIINYFKGGKLRFKKIKPEAFEANRFYTVINKKSGEIVPMEVNFNFDDPNLIILPLAFGKRVGREFIWNDLLSLETGSLKLANGRVIEKTLYNRRTRQDEPALFVALTFERREVLDSSNIKPMNLIGVDRGENIPAVIALTDPEGCPLSRFKDSLGNPTHILRIGESYKEKQRTIQAKKEVEQRRAGGYSRKYASKAKNLADDMVRNTARDLLYYAVTQDAMLIFENLSRGFGRQGKRTFMAERQYTRMEDWLTAKLAYEGLPSKTYLSKTLAQYTSKTCSNCGFTITSADYDRVLEKLKKTATGWMTTINGKELKVEGQITYYNRYKRQNVVKDLSVELDRLSEESVNNDISSWTKGRSGEALSLLKKRFSHRPVQEKFVCLNCGFETHADEQAALNIARSWLFLRSQEYKKYQTNKTTGNTDKRAFVETWQSFYRKKLKEVWKPAV

SEQ ID NO: 156 - protein, 979 aa, synthetic construct
QEIKRINKIRRRLVKDSNTKKAGKTGPMKTLLVRVMTPDLRERLENLRKKPENIPQPISNTSRANLNKLLTDYTEMKKAILHVYWEEFQKDPVGLMSRVAQPASKKIDQNKLKPEMDEKGNLTTAGFACSQCGQPLFVYKLEQVSEKGKAYTNYFGRCNVAEHEKLILLAQLKPEKDSDEAVTYSLGKFGQRALDFYSIHVTKESTHPVKPLAQIAGNRYASGPVGKALSDACMGTIASFLSKYQDIIIEHQKVVKGNQKRLESLRELAGKENLEYPSVTLPPQPHTKEGVDAYNEVIARVRMWVNLNLWQKLKLSRDDAKPLLRLKGFPSFPLVERQANEVDWWDMVCNVKKLINEKKEDGKVFWQNLAGYKRQEALRPYLSSEEDRKKGKKFARYQLGDLLLHLEKKHGEDWGKVYDEAWERIDKKVEGLSKHIKLEEERRSEDAQSKAALTDWLRAKASFVIEGLKEADKDEFCRCELKLQKWYGDLRGKPFAIEAENSILDISGFSKQYNCAFIWQKDGVKKLNLYLIINYFKGGKLRFKKIKPEAFEANRFYTVINKKSGEIVPMEVNFNFDDPNLIILPLAFGKRQGREFIWNDLLSLETGSLKLANGRVIEKTLYNRRTRQDEPALFVALTFERREVLDSSNIIKPMNLIGVDRGENIPAVIALTDPEGCPLSRFKDSLGNPTHILRIGESYKEKQRTIQAKKEVEQRRAGGYSRKYASKAKNLADDMVRNTARDLLYYAVTQDAMLIFENLSRGFGRQGKRTFMAERQYTRMEDWLTAKLAYEGLPSKTYLSKTLAQYTSKTCSNCGFTITSADYDRVLEKLKKTATGWMTTINGKELKVEGQITYYNRYKRQNVVKDLSVELDRLSEESVNNDISSWTKGRSGEALSLLKKRFSHRPVQEKFVCLNCGFETHADEQAALNIARSWLFLRSQEYKKYQTNKTTGNTDKRAFVETWQSFYRKKLKEVWKPAV

SEQ ID NO: 157 - protein, 979 aa, synthetic construct
QEIKRINKIRRRLVKDSNTKKAGKTGPMKTLLVRVMTPDLRERLENLRKKPENIPQPISNTSRANLNKLLTDYTEMKKAILHVYWEEFQKDPVGLMSRVAQPASKKIDQNKLKPEMDEKGNLTTAGFACSQCGQPLFVYKLEQVSEKGKAYTNYFGRCNVAEHEKLILLAQLKPEKDSDEAVTYSLGKFGQRALDFYSIHVTKESTHPVKPLAQIAGNRYASGPVGKALSDACMGTIASFLSKYQDIIIEHQKVVKGNQKRLESLRELAGKENLEYPSVTLPPQPHTKEGVDAYNEVIARVRMWVNLNLWQKLKLSRDDAKPLLRLKGFPSFPLVERQANEVDWWDMVCNVKKLINEKKEDGKVFWQNLAGYKRQEALRPYLSSEEDRKKGKKFARYQLGDLLLHLEKKHGEDWGKVYDEAWERIDKKVEGLSKHIKLEEERRSEDAQSKAALTDWLRAKASFVIEGLKEADKDEFCRCELKLQKWYGDLRGKPFAIEAENSILDISGFSKQYNCAFIWQKDGVKKLNLYLIINYFKGGKLRFKKIKPEAFEANRFYTVINKKSGEIVPMEVNFNFDDPNLIILPLAFGKRQGREFIWNDLLSLETGSLKLANGRVIEKTLYNRRTRQDEPALFVALTFERREVLDSSNIKTPMNLIGVDRGENIPAVIALTDPEGCPLSRFKDSLGNPTHILRIGESYKEKQRTIQAKKEVEQRRAGGYSRKYASKAKNLADDMVRNTARDLLYYAVTQDAMLIFENLSRGFGRQGKRTFMAERQYTRMEDWLTAKLAYEGLPSKTYLSKTLAQYTSKTCSNCGFTITSADYDRVLEKLKKTATGWMTTINGKELKVEGQITYYNRYKRQNVVKDLSVELDRLSEESVNNDISSWTKGRSGEALSLLKKRFSHRPVQEKFVCLNCGFETHADEQAALNIARSWLFLRSQEYKKYQTNKTTGNTDKRAFVETWQSFYRKKLKEVWKPAV

SEQ ID NO: 158 - protein, 979 aa, synthetic construct
QEIKRINKIRRRLVKDSNTKKAGKTGPMKTLLVRVMTPDLRERLENLRKKPENIPQPISNTSRANLNKLLTDYTEMKKAILHVYWEEFQKDPVGLMSRVAQPASKKIDQNKLKPEMDEKGNLTTAGFACSQCGQPLFVYKLEQVSEKGKAYTNYFGRCNVAEHEKLILLAQLKPEKDSDEAVTYSLGKFGQRALDFYSIHVTKESTHPVKPLAQIAGNRYASGPVGKALSDACMGTIASFLSKYQDIIIEHQKVVKGNQKRLESLRELAGKENLEYPSVTLPPQPHTKEGVDAYNEVIARVRMWVNLNLWQKLKLSRDDAKPLLRLKGFPSFPLVERQANEVDWWDMVCNVKKLINEKKEDGKVFWQNLAGYKRQEALRPYLSSEEDRKKGKKFARYQLGDLLLHLEKKHGEDWGKVYDEAWERIDKKVEGLSKHIKLEEERRSEDAQSKAALTDWLRAKASFVIEGLKEADKDEFCRCELKLQKWYGDLRGKPFAIEAENSILDISGFSKQYNCAFIWQKDGVKKLNLYLIINYFKGGKLRFKKIKPEAFEANRFYTVINKKSGEIVPMEVNFNFDDPNLIILPLAFGKRQGREFIWNDLLSLETGSLKLANGRVIEKTLYNRRTRQDEPALFVALTFERREVLDSSNIKNPMNLIGVDRGENIPAVIALTDPEGCPLSRFKDSLGNPTHILRIGESYKEKQRTIQAKKEVEQRRAGGYSRKYASKAKNLADDMVRNTARDLLYYAVTQDAMLIFENLSRGFGRQGKRTFMAERQYTRMEDWLTAKLAYEGLPSKTYLSKTLAQYTSKTCSNCGFTITSADYDRVLEKLKKTATGWMTTINGKELKVEGQITYYNRYKRQNVVKDLSVELDRLSEESVNNDISSWTKGRSGEALSLLKKRFSHRPVQEKFVCLNCGFETHADEQAALNIARSWLFLRSQEYKKYQTNKTTGNTDKRAFVETWQSFYRKKLKEVWKPAV

SEQ ID NO: 159 - protein, 979 aa, synthetic construct
QEIKRINKIRRRLVKDSNTKKAGKTGPMKTLLVRVMTPDLRERLENLRKKPENIPQPISNTSRANLNKLLTDYTEMKKAILHVYWEEFQKDPVGLMSRVAQPASKKIDQNKLKPEMDEKGNLTTAGFACSQCGQPLFVYKLEQVSEKGKAYTNYFGRCNVAEHEKLILLAQLKPEKDSDEAVTYSLGKFGQRALDFYSIHVTKESTHPVKPLAQIAGNRYASGPVGKALSDACMGTIASFLSKYQDIIIEHQKVVKGNQKRLESLRELAGKENLEYPSVTLPPQPHTKEGVDAYNEVIARVRMWVNLNLWQKLKLSRDDAKPLLRLKGFPSFPLVERQANEVDWWDMVCNVKKLINEKKEDGKVFWQNLAGYKRQEALRPYLSSEEDRKKGKKFARYQLGDLLLHLEKKHGEDWGKVYDEAWERIDKKVEGLSKHIKLEEERRSEDAQSKAALTDWLRAKASFVIEGLKEADKDEFCRCELKLQKWYGDLRGKPFAIEAENSILDISGFSKQYNCAFIWQKDGVKKLNLYLIINYFKGGKLRFKKIKPEAFEANRFYTVINKKSGEIVPMEVNFNFDDPNLIILPLAFGKRQGREFIWNDLLSLETGSLKLANGRVIEKTLYNRRTRQDEPALFVALTFERREVLDSSNIKPRMNLIGVDRGENIPAVIALTDPEGCPLSRFKDSLGNPTHILRIGESYKEKQRTIQAKKEVEQRRAGGYSRKYASKAKNLADDMVRNTARDLLYYAVTQDAMLIFENLSRGFGRQGKRTFMAERQYTRMEDWLTAKLAYEGLPSKTYLSKTLAQYTSKTCSNCGFTITSADYDRVLEKLKKTATGWMTTINGKELKVEGQITYYNRYKRQNVVKDLSVELDRLSEESVNNDISSWTKGRSGEALSLLKKRFSHRPVQEKFVCLNCGFETHADEQAALNIARSWLFLRSQEYKKYQTNKTTGNTDKRAFVETWQSFYRKKLKEVWKPAV

SEQ ID NO: 160 - protein, 979 aa, synthetic construct
QEIKRINKIRRRLVKDSNTKKAGKTGPMKTLLVRVMTPDLRERLENLRKKPENIPQPISNTSRANLNKLLTDYTEMKKAILHVYWEEFQKDPVGLMSRVAQPASKKIDQNKLKPEMDEKGNLTTAGFACSQCGQPLFVYKLEQVSEKGKAYTNYFGRCNVAEHEKLILLAQLKPEKDSDEAVTYSLGKFGQRALDFYSIHVTKESTHPVKPLAQIAGNRYASGPVGKALSDACMGTIASFLSKYQDIIIEHQKVVKGNQKRLESLRELAGKENLEYPSVTLPPQPHTKEGVDAYNEVIARVRMWVNLNLWQKLKLSRDDAKPLLRLKGFPSFPLVERQANEVDWWDMVCNVKKLINEKKEDGKVFWQNLAGYKRQEALRPYLSSEEDRKKGKKFARYQLGDLLLHLEKKHGEDWGKVYDEAWERIDKKVEGLSKHIKLEEERRSEDAQSKAALTDWLRAKASFVIEGLKEADKDEFCRCELKLQKWYGDLRGKPFAIEAENSILDISGFSKQYNCAFIWQKDGVKKLNLYLIINYFKGGKLRFKKIKPEAFEANRFYTVINKKSGEIVPMEVNFNFDDPNLIILPLAFGKRQGREFIWNDLLSLETGSLKLANGRVIEKTLYNRRTRQDEPALFVALTFERREVLDSSNIKPMSNLIGVDRGENIPAVIALTDPEGCPLSRFKDSLGNPTHILRIGESYKEKQRTIQAKKEVEQRRAGGYSRKYASKAKNLADDMVRNTARDLLYYAVTQDAMLIFENLSRGFGRQGKRTFMAERQYTRMEDWLTAKLAYEGLPSKTYLSKTLAQYTSKTCSNCGFTITSADYDRVLEKLKKTATGWMTTINGKELKVEGQITYYNRYKRQNVVKDLSVELDRLSEESVNNDISSWTKGRSGEALSLLKKRFSHRPVQEKFVCLNCGFETHADEQAALNIARSWLFLRSQEYKKYQTNKTTGNTDKRAFVETWQSFYRKKLKEVWKPAV

SEQ ID NO: 161 - protein, 978 aa, synthetic construct
QEIKRINKIRRRLVKDSNTKKAGKTGPMKTLLVRVMTPDLRERLENLRKKPENIPQPISNTSRANLNKLLTDYTEMKKAILHVYWEEFQKDPVGLMSRVAQPASKKIDQNKLKPEMDEKGNLTTAGFACSQCGQPLFVYKLEQVSEKGKAYTNYFGRCNVAEHEKLILLAQLKPEKDSDEAVTYSLGKFGQRALDFYSIHVTKESTHPVKPLAQIAGNRYASGPVGKALSDACMGTIASFLSKYQDIIIEHQKVVKGNQKRLESLRELAGKENLEYPSVTLPPQPHTKEGVDAYNEVIARVRMWVNLNLWQKLKLSRDDAKPLLRLKGFPSFPLVERQANEVDWWDMVCNVKKLINEKKEDGKVFWQNLAGYKRQEALRPYLSSEEDRKKGKKFARYQLGDLLLHLEKKHGEDWGKVYDEAWERIDKKVEGLSKHIKLEEERRSEDAQSKAALTDWLRAKASFVIEGLKEADKDEFCRCELKLQKWYGDLRGKPFAIEAENSILDISGFSKQYNCAFIWQKDGVKKLNLYLIINYFKGGKLRFKKIKPEAFEANRFYTVINKKSGEIVPMEVNFNFDDPNLIILPLAFGKRQGREFIWNDLLSLETGSLKLANGRVIEKTLYNRRTRQDEPALFVALTFERREVLDSSNIKPMNLIGVDRGENIPAVIALTDPEGCPLSRFKDSLGNPTHILRIWESYKEKQRTIQAKKEVEQRRAGGYSRKYASKAKNLADDMVRNTARDLLYYAVTQDAMLIFENLSRGFGRQGKRTFMAERQYTRMEDWLTAKLAYEGLPSKTYLSKTLAQYTSKTCSNCGFTITSADYDRVLEKLKKTATGWMTTINGKELKVEGQITYYNRYKRQNVVKDLSVELDRLSEESVNNDISSWTKGRSGEALSLLKKRFSHRPVQEKFVCLNCGFETHADEQAALNIARSWLFLRSQEYKKYQTNKTTGNTDKRAFVETWQSFYRKKLKEVWKPAV

SEQ ID NO: 162 - protein, 978 aa, synthetic construct
QEIKRINKIRRRLVKDSNTKKAGKTGPMKTLLVRVMTPDLRERLENLRKKPENIPQPISNTSRANLNKLLTDYTEMKKAILHVYWEEFQKDPVGLMSRVAQPASKKIDQNKLKPEMDEKGNLTTAGFACSQCGQPLFVYKLEQVSEKGKAYTNYFGRCNVAEHEKLILLAQLKPEKDSDEAVTYSLGKFGQRALDFYSIHVTKESTHPVKPLAQIAGNRYASGPVGKALSDACMGTIASFLSKYQDIIIEHQKVVKGNQKRLESLRELAGKENLEYPSVTLPPQPHTKEGVDAYNEVIARVRMWVNLNLWQKLKLSRDDAKPLLRLKGFPSFPLVERQANEVDWWDMVCNVKKLINEKKEDGKVFWQNLAGYKRQEALRPYLSSEEDRKKGKKFARYQLGDLLLHLEKKHGEDWGKVYDEAWERIDKKVEGLSKHIKLEEERRSEDAQSKAALTDWLRAKASFVIEGLKEADKDEFCRCELKLQKWYGDLRGKPFAIEAENSILDISGFSKQYNCAFIWQKDGVKKLNLYLIINYFKGGKLRFKKIKPEAFEANRFYTVINKKSGEIVPMEVNFNFDDPNLIILPLAFGKRQGREFIWNDLLSLETGSLKLANGRVIEKTLYNRRTRQDEPALFVALTFERREVLDSSNIKPMNLIGVDRGENIPAVIALTDPEGCPLSRFKDSLGNPTHILRIRESYKEKQRTIQAKKEVEQRRAGGYSRKYASKAKNLADDMVRNTARDLLYYAVTQDAMLIFENLSRGFGRQGKRTFMAERQYTRMEDWLTAKLAYEGLPSKTYLSKTLAQYTSKTCSNCGFTITSADYDRVLEKLKKTATGWMTTINGKELKVEGQITYYNRYKRQNVVKDLSVELDRLSEESVNNDISSWTKGRSGEALSLLKKRFSHRPVQEKFVCLNCGFETHADEQAALNIARSWLFLRSQEYKKYQTNKTTGNTDKRAFVETWQSFYRKKLKEVWKPAV

SEQ ID NO: 163 - protein, 978 aa, synthetic construct
QEIKRINKIRRRLVKDSNTKKAGKTGPMKTLLVRVMTPDLRERLENLRKKPENIPQPISNTSRANLNKLLTDYTEMKKAILHVYWEEFQKDPVGLMSRVAQPASKKIDQNKLKPEMDEKGNLTTAGFACSQCGQPLFVYKLEQVSEKGKAYTNYFGRCNVAEHEKLILLAQLKPEKDSDEAVTYSLGKFGQRALDFYSIHVTKESTHPVKPLAQIAGNRYASGPVGKALSDACMGTIASFLSKYQDIIIEHQKVVKGNQKRLESLRELAGKENLEYPSVTLPPQPHTKEGVDAYNEVIARVRMWVNLNLWQKLKLSRDDAKPLLRLKGFPSFPLVERQANEVDWWDMVCNVKKLINEKKEDGKVFWQNLAGYKRQEALRPYLSSEEDRKKGKKFARYQLGDLLLHLEKKHGEDWGKVYDEAWERIDKKVEGLSKHIKLEEERRSEDAQSKAALTDWLRAKASFVIEGLKEADKDEFCRCELKLQKWYGDLRGKPFAIEAENSILDISGFSKQYNCAFIWQKDGVKKLNLYLIINYFKGGKLRFKKIKPEAFEANRFYTVINKKSGEIVPMEVNFNFDDPNLIILPLAFGKRQGREFIWNDLLSLETGSLKLANGRVIEKTLYNRRTRQDEPALFVALTFERREVLDSSNIKPMNLIGVDRGENIPAVIALTDPEGCPLSRFKDSLGNPTHILRIGESYKEKQRTIQASKEVEQRRAGGYSRKYASKAKNLADDMVRNTARDLLYYAVTQDAMLIFENLSRGFGRQGKRTFMAERQYTRMEDWLTAKLAYEGLPSKTYLSKTLAQYTSKTCSNCGFTITSADYDRVLEKLKKTATGWMTTINGKELKVEGQITYYNRYKRQNVVKDLSVELDRLSEESVNNDISSWTKGRSGEALSLLKKRFSHRPVQEKFVCLNCGFETHADEQAALNIARSWLFLRSQEYKKYQTNKTTGNTDKRAFVETWQSFYRKKLKEVWKPAV

SEQ ID NO: 164 - protein, 978 aa, synthetic construct
QEIKRINKIRRRLVKDSNTKKAGKTGPMKTLLVRVMTPDLRERLENLRKKPENIPQPISNTSRANLNKLLTDYTEMKKAILHVYWEEFQKDPVGLMSRVAQPASKKIDQNKLKPEMDEKGNLTTAGFACSQCGQPLFVYKLEQVSEKGKAYTNYFGRCNVAEHEKLILLAQLKPEKDSDEAVTYSLGKFGQRALDFYSIHVTKESTHPVKPLAQIAGNRYASGPVGKALSDACMGTIASFLSKYQDIIIEHQKVVKGNQKRLESLRELAGKENLEYPSVTLPPQPHTKEGVDAYNEVIARVRMWVNLNLWQKLKLSRDDAKPLLRLKGFPSFPLVERQANEVDWWDMVCNVKKLINEKKEDGKVFWQNLAGYKRQEALRPYLSSEEDRKKGKKFARYQLGDLLLHLEKKHGEDWGKVYDEAWERIDKKVEGLSKHIKLEEERRSEDAQSKAALTDWLRAKASFVIEGLKEADKDEFCRCELKLQKWYGDLRGKPFAIEAENSILDISGFSKQYNCAFIWQKDGVKKLNLYLIINYFKGGKLRFKKIKPEAFEANRFYTVINKKSGEIVPMEVNFNFDDPNLIILPLAFGKRQGREFIWNDLLSLETGSLKLANGRVIEKTLYNRRTRQDEPALFVALTFERREVLDSSNIKPMNLIGVDRGENIPAVIALTDPEGCPLSRFKDSLGNPTHILRIGESYKEKQRTIQAKKEVEQRRAGGYSRKYASKAKNLADDMVHNTARDLLYYAVTQDAMLIFENLSRGFGRQGKRTFMAERQYTRMEDWLTAKLAYEGLPSKTYLSKTLAQYTSKTCSNCGFTITSADYDRVLEKLKKTATGWMTTINGKELKVEGQITYYNRYKRQNVVKDLSVELDRLSEESVNNDISSWTKGRSGEALSLLKKRFSHRPVQEKFVCLNCGFETHADEQAALNIARSWLFLRSQEYKKYQTNKTTGNTDKRAFVETWQSFYRKKLKEVWKPAV

SEQ ID NO: 165 - protein, 978 aa, synthetic construct
QEIKRINKIRRRLVKDSNTKKAGKTGPMKTLLVRVMTPDLRERLENLRKKPENIPQPISNTSRANLNKLLTDYTEMKKAILHVYWEEFQKDPVGLMSRVAQPASKKIDQNKLKPEMDEKGNLTTAGFACSQCGQPLFVYKLEQVSEKGKAYTNYFGRCNVAEHEKLILLAQLKPEKDSDEAVTYSLGKFGQRALDFYSIHVTKESTHPVKPLAQIAGNRYASGPVGKALSDACMGTIASFLSKYQDIIIEHQKVVKGNQKRLESLRELAGKENLEYPSVTLPPQPHTKEGVDAYNEVIARVRMWVNLNLWQKLKLSRDDAKPLLRLKGFPSFPLVERQANEVDWWDMVCNVKKLINEKKEDGKVFWQNLAGYKRQEALRPYLSSEEDRKKGKKFARYQLGDLLLHLEKKHGEDWGKVYDEAWERIDKKVEGLSKHIKLEEERRSEDAQSKAALTDWLRAKASFVIEGLKEADKDEFCRCELKLQKWYGDLRGKPFAIEAENSILDISGFSKQYNCAFIWQKDGVKKLNLYLIINYFKGGKLRFKKIKPEAFEANRFYTVINKKSGEIVPMEVNFNFDDPNLIILPLAFGKRQGREFIWNDLLSLETGSLKLANGRVIEKTLYNRRTRQDEPALFVALTFERREVLDSSNIKPMNLIGVDRGENIPAVIALTDPEGCPLSRFKDSLGNPTHILRIGESYKEKQRTIQAKKEVEQRRAGGYSRKYASKAKNLADDMVRNTARDLLYYAVTQDAMLIFENLSRGFGRQGKRTFSAERQYTRMEDWLTAKLAYEGLPSKTYLSKTLAQYTSKTCSNCGFTITSADYDRVLEKLKKTATGWMTTINGKELKVEGQITYYNRYKRQNVVKDLSVELDRLSEESVNNDISSWTKGRSGEALSLLKKRFSHRPVQEKFVCLNCGFETHADEQAALNIARSWLFLRSQEYKKYQTNKTTGNTDKRAFVETWQSFYRKKLKEVWKPAV

SEQ ID NO: 166 - protein, 978 aa, synthetic construct
QEIKRINKIRRRLVKDSNTKKAGKTGPMKTLLVRVMTPDLRERLENLRKKPENIPQPISNTSRANLNKLLTDYTEMKKAILHVYWEEFQKDPVGLMSRVAQPASKKIDQNKLKPEMDEKGNLTTAGFACSQCGQPLFVYKLEQVSEKGKAYTNYFGRCNVAEHEKLILLAQLKPEKDSDEAVTYSLGKFGQRALDFYSIHVTKESTHPVKPLAQIAGNRYASGPVGKALSDACMGTIASFLSKYQDIIIEHQKVVKGNQKRLESLRELAGKENLEYPSVTLPPQPHTKEGVDAYNEVIARVRMWVNLNLWQKLKLSRDDAKPLLRLKGFPSFPLVERQANEVDWWDMVCNVKKLINEKKEDGKVFWQNLAGYKRQEALRPYLSSEEDRKKGKKFARYQLGDLLLHLEKKHGEDWGKVYDEAWERIDKKVEGLSKHIKLEEERRSEDAQSKAALTDWLRAKASFVIEGLKEADKDEFCRCELKLQKWYGDLRGKPFAIEAENSILDISGFSKQYNCAFIWQKDGVKKLNLYLIINYFKGGKLRFKKIKPEAFEANRFYTVINKKSGEIVPMEVNFNFDDPNLIILPLAFGKRQGREFIWNDLLSLETGSLKLANGRVIEKTLYNRRTRQDEPALFVALTFERREVLDSSNIKPMNLIGVDRGENIPAVIALTDPEGCPLSRFKDSLGNPTHILRIGESYKEKQRTIQAKKEVEQRRAGGYSRKYASKAKNLADDMVRNTARDLLYYAVTQDAMLIFENLSRGFGRQGKRTFAAERQYTRMEDWLTAKLAYEGLPSKTYLSKTLAQYTSKTCSNCGFTITSADYDRVLEKLKKTATGWMTTINGKELKVEGQITYYNRYKRQNVVKDLSVELDRLSEESVNNDISSWTKGRSGEALSLLKKRFSHRPVQEKFVCLNCGFETHADEQAALNIARSWLFLRSQEYKKYQTNKTTGNTDKRAFVETWQSFYRKKLKEVWKPAV

SEQ ID NO: 167 - protein, 978 aa, synthetic construct
QEIKRINKIRRRLVKDSNTKKAGKTGPMKTLLVRVMTPDLRERLENLRKKPENIPQPISNTSRANLNKLLTDYTEMKKAILHVYWEEFQKDPVGLMSRVAQPASKKIDQNKLKPEMDEKGNLTTAGFACSQCGQPLFVYKLEQVSEKGKAYTNYFGRCNVAEHEKLILLAQLKPEKDSDEAVTYSLGKFGQRALDFYSIHVTKESTHPVKPLAQIAGNRYASGPVGKALSDACMGTIASFLSKYQDIIIEHQKVVKGNQKRLESLRELAGKENLEYPSVTLPPQPHTKEGVDAYNEVIARVRMWVNLNLWQKLKLSRDDAKPLLRLKGFPSFPLVERQANEVDWWDMVCNVKKLINEKKEDGKVFWQNLAGYKRQEALRPYLSSEEDRKKGKKFARYQLGDLLLHLEKKHGEDWGKVYDEAWERIDKKVEGLSKHIKLEEERRSEDAQSKAALTDWLRAKASFVIEGLKEADKDEFCRCELKLQKWYGDLRGKPFAIEAENSILDISGFSKQYNCAFIWQKDGVKKLNLYLIINYFKGGKLRFKKIKPEAFEANRFYTVINKKSGEIVPMEVNFNFDDPNLIILPLAFGKRQGREFIWNDLLSLETGSLKLANGRVIEKTLYNRRTRQDEPALFVALTFERREVLDSSNIKPMNLIGVDRGENIPAVIALTDPEGCPLSRFKDSLGNPTHILRIGESYKEKQRTIQAKKEVEQRRAGGYSRKYASKAKNLADDMVRNTARDLLYYAVTQDAMLIFENLSRGFGRQGKRTFMAERQYTRMEDWLTAKLAYEGLPSKTYLSKTLAQYTSKTCSNCGFTITSADYDRVLEKLKKTATGWMTTINGKELKVEGQITYYNRYKRQNVVKDLSVELDRLSEESVNNDISSWDKGRSGEALSLLKKRFSHRPVQEKFVCLNCGFETHADEQAALNIARSWLFLRSQEYKKYQTNKTTGNTDKRAFVETWQSFYRKKLKEVWKPAV

SEQ ID NO: 168 - protein, 979 aa, synthetic construct
QEIKRINKIRRRLVKDSNTKKAGKTGPMKTLLVRVMTPDLRERLENLRKKPENIPQPISNTSRANLNKLLTDYTEMKKAILHVYWEEFQKDPVGLMSRVAQPASKKIDQNKLKPEMDEKGNLTTAGFACSQCGQPLFVYKLEQVSEKGKAYTNYFGRCNVAEHEKLILLAQLKPEKDSDEAVTYSLGKFGQRALDFYSIHVTKESTHPVKPLAQIAGNRYASGPVGKALSDACMGTIASFLSKYQDIIIEHQKVVKGNQKRLESLRELAGKENLEYPSVTLPPQPHTKEGVDAYNEVIARVRMWVNLNLWQKLKLSRDDAKPLLRLKGFPSFPLVERQANEVDWWDMVCNVKKLINEKKEDGKVFWQNLAGYKRQEALRPYLSSEEDRKKGKKFARYQLGDLLLHLEKKHGEDWGKVYDEAWERIDKKVEGLSKHIKLEEERRSEDAQSKAALTDWLRAKASFVIEGLKEADKDEFCRCELKLQKWYGDLRGKPFAIEAENSILDISGFSKQYNCAFIWQKDGVKKLNLYLIINYFKGGKLRFKKIKPEAFEANRFYTVINKKSGEIVPMEVNFNFDDPNLIILPLAFGKRQGREFIWNDLLSLETGSLKLANGRVIEKTLYNRRTRQDEPALFVALTFERREVLDSSNIKPMNLIGVDRGENIPAVIALTDPEGCPLSRFKDSLGNPTHILRIGESYKEKQRTIQAKKEVEQRRAGGYSRKYASKAKNLADDMVRNTARDLLYYAVTQDAMLIFENLSRGFGRQGKRTFMAERQYTRMEDWLTAKLAYEGLPSKTYLSKTLAQYTSKTCSNCGFTITSADYDRVLEKLKKTATGWMTTINGKELKVEGQITYYNRYKRQNVVKDLSVELDRLSEESVNNDISSWTKGRSGNEALSLLKKRFSHRPVQEKFVCLNCGFETHADEQAALNIARSWLFLRSQEYKKYQTNKTTGNTDKRAFVETWQSFYRKKLKEVWKPAV

SEQ ID NO: 169 - protein, 978 aa, synthetic construct
QEIKRINKIRRRLVKDSNTKKAGKTGPMKTLLVRVMTPDLRERLENLRKKPENIPQPISNTSRANLNKLLTDYTEMKKAILHVYWEEFQKDPVGLMSRVAQPASKKIDQNKLKPEMDEKGNLTTAGFACSQCGQPLFVYKLEQVSEKGKAYTNYFGRCNVAEHEKLILLAQLKPEKDSDEAVTYSLGKFGQRALDFYSIHVTKESTHPVKPLAQIAGNRYASGPVGKALSDACMGTIASFLSKYQDIIIEHQKVVKGNQKRLESLRELAGKENLEYPSVTLPPQPHTKEGVDAYNEVIARVRMWVNLNLWQKLKLSRDDAKPLLRLKGFPSFPLVERQANEVDWWDMVCNVKKLINEKKEDGKVFWQNLAGYKRQEALRPYLSSEEDRKKGKKFARYQLGDLLLHLEKKHGEDWGKVYDEAWERIDKKVEGLSKHIKLEEERRSEDAQSKAALTDWLRAKASFVIEGLKEADKDEFCRCELKLQKWYGDLRGKPFAIEAENSILDISGFSKQYNCAFIWQKDGVKKLNLYLIINYFKGGKLRFKKIKPEAFEANRFYTVINKKSGEIVPMEVNFNFDDPNLIILPLAFGKRQGREFIWNDLLSLETGSLKLANGRVIEKTLYNRRTRQDEPALFVALTFERREVLDSSNIKPMNLIGVDRGENIPAVIALTDPEGCPLSRFKDSLGNPTHILRIGESYKEKQRTIQAKKEVEQRRAGGYSRKYASKAKNLADDMVRNTARDLLYYAVTQDAMLIFENLSRGFGRQGKRTFMAERQYTRMEDWLTAKLAYEGLPSKTYLSKTLAQYTSKTCSNCGFTITSADYDRVLEKLKKTATGWMTTINGKELKVEGQITYYNRYKRQNVVKDLSVELDRLSEESVNNDISSWTKGRSGEALSLLKKRFSHRPVQEKFVCLNCGFETHADEQAALNIARVWLFLRSQEYKKYQTNKTTGNTDKRAFVETWQSFYRKKLKEVWKPAV

SEQ ID NO: 170 - protein, 978 aa, synthetic construct
QEIKRINKIRRRLVKDSNTKKAGKTGPMKTLLVRVMTPDLRERLENLRKKPENIPQPISNTSRANLNKLLTDYTEMKKAILHVYWEEFQKDPVGLMSRVAQPASKKIDQNKLKPEMDEKGNLTTAGFACSQCGQPLFVYKLEQVSEKGKAYTNYFGRCNVAEHEKLILLAQLKPEKDSDEAVTYSLGKFGQRALDFYSIHVTKESTHPVKPLAQIAGNRYASGPVGKALSDACMGTIASFLSKYQDIIIEHQKVVKGNQKRLESLRELAGKENLEYPSVTLPPQPHTKEGVDAYNEVIARVRMWVNLNLWQKLKLSRDDAKPLLRLKGFPSFPLVERQANEVDWWDMVCNVKKLINEKKEDGKVFWQNLAGYKRQEALRPYLSSEEDRKKGKKFARYQLGDLLLHLEKKHGEDWGKVYDEAWERIDKKVEGLSKHIKLEEERRSEDAQSKAALTDWLRAKASFVIEGLKEADKDEFCRCELKLQKWYGDLRGKPFAIEAENSILDISGFSKQYNCAFIWQKDGVKKLNLYLIINYFKGGKLRFKKIKPEAFEANRFYTVINKKSGEIVPMEVNFNFDDPNLIILPLAFGKRQGREFIWNDLLSLETGSLKLANGRVIEKTLYNRRTRQDEPALFVALTFERREVLDSSNIKPMNLIGVDRGENIPAVIALTDPEGCPLSRFKDSLGNPTHILRIGESYKEKQRTIQAKKEVEQRRAGGYSRKYASKAKNLADDMVRNTARDLLYYAVTQDAMLIFENLSRGFGRQGKRTFMAERQYTRMEDWLTAKLAYEGLPSKTYLSKTLAQYTSKTCSNCGFTITSADYDRVLEKLKKTATGWMTTINGKELKVEGQITYYNRYKRQNVVKDLSVELDRLSEESVNNDISSWTKGRSGEALSLLKKRFSHRPVQEKFVCLNCGFETHADEQAALNIARSWLFLRSQEYKKYQTNKTTINTDKRAFVETWQSFYRKKLKEVWKPAV

SEQ ID NO: 171 - protein, 977 aa, synthetic construct
QEIKRINKIRRRLVKDSNTKKAGKTGPMKTLLVRVMTPDLRERLENLRKKPENIPQPISNTSRANLNKLLTDYTEMKKAILHVYWEEFQKDPVGLMSRVAQPASKKIDQNKLKPEMDEKGNLTTAGFACSQCGQPLFVYKLEQVSEKGKAYTNYFGRCNVAEHEKLILLAQLKPEKDSDEAVTYSLGKFGQRALDFYSIHVTKESTHPVKPLAQIAGNRYASGPVGKALSDACMGTIASFLSKYQDIIIEHQKVVKGNQKRLESLRELAGKENLEYPSVTLPPQPHTKEGVDAYNEVIARVRMWVNLNLWQKLKLSRDDAKPLLRLKGFPSFPLVERQANEVDWWDMVCNVKKLINEKKEDGKVFWQNLAGYKRQEALRPYLSSPEDRKKGKKFARYQFGDLLLHLEKKHGEDWGKVYDEAWERIDKKVEGLSKHIKLEEERRSEDAQSKAALTDWLRAKASFVIEGLKEADKDEFCRCELKLQKWYGDLRGKPFAIEAENSILDISGFSKQYNCAFIWQKDGVKKLNLYLIINYFKGGKLRFKKIKPEAFEANRFYTVINKKSGEIVPMEVNFNFDDPNLIILPLAFGKRQGREFIWNDLLSLETGSLKLANGRVIEKTLYNRRTRQDEPALFVALTFERREVLDSSNIKPMNLIGVDRGENIPAVIALTDPEGCPLSRFKDSLGNPTHILRIGESYKEKQRTIQAKKEVEQRRAGGYSRKYASKAKNLANDMVRNTARDLLYYAVTQDAMLIFENLSRGFGRQGKRTFMAERQYTRMEDWLTAKLAYEGLSKTYLSKTLAQYTSKTCSNCGFTITSADYDRVLEKLKKTATGWMTTINGKELKVEGQITYYNRRKRQNVVKDLSVELDRLSEESVNNDISSWTKGRSGEALSLLKKRFSHRPVQEKFVCLNCGFETHADEQAALNIARSWLFLRSQEYKKYQTNKTTGNTDKRAFVETWQSFYRKKLKEVWKPAV

SEQ ID NO: 172 - protein, 977 aa, synthetic construct
QEIKRINKIRRRLVKDSNTKKAGKTGPMKTLLVRVMTPDLRERLENLRKKPENIPQPISNTSRANLNKLLTDYTEMKKAILHVYWEEFQKDPVGLMSRVAQPASKKIDQNKLKPEMDEKGNLTTAGFACSQCGQPLFVYKLEQVSEKGKAYTNYFGRCNVAEHEKLILLAQLKPEKDSDEAVTYSLGKFGQRALDFYSIHVTKESTHPVKPLAQIAGNRYASGPVGKALSDACMGTIASFLSKYQDIIIEHQKVVKGNQKRLESLRELAGKENLEYPSVTLPPQPHTKEGVDAYNEVIARVRMWVNLNLWQKLKLSRDDAKPLLRLKGFPSFPLVERQANEVDWWDMVCNVKKLINEKKEDGKVFWQNLAGYKRQEALRPYLSSEEDRKKGKKFARYQLGDLLLHLEKKHGEDWGKVYDEAWERIDKKVEGLSKHIKLEEERRSEDAQSKAALTDWLRAKASFVIEGLKEADKDEFSRCELKLQKWYGDLRGKPFAIEAENSILDISGFSKQYNCAFIWQKDGVKKLNLYLIINYFKGGKLRFKKIKPEAFEANRFYTVINKKSGEIVPMEVNFNFDDPNLIILPLAFGKRQGREFIWNDLLSLETGSLKLANGRVIEKTLYNRRTRQDEPALFVALTFERREVLDSSNIKPMNLIGVDRGENIPAVIALTDPEGCPLSRFKDSLGNPTHILRIGESYKEKQRTIQAKKEVEQRRAGGYSRKYASKAKNLADDMVRNTARDLLYYAVTQDAMLIFENLSRGFGRQGKRTFMAERQYTRMEDWLTAKLAYEGLSKTYLSKTLAQYTSKTCSNCGFTITSADYDRVLEKLKKTATGWMTTINGKELKVEGQITYYNRRKRQNVVKDLSVELDRLSEESVNNDISSWTKGRSGEALSLLKKRFSHRPVQEKFVCLNCGFETHADEQAALNIARSWLFLRSQEYKKYQTNKTTGNTDKRAFVETWQSFYRKKLKEVWKPAV

SEQ ID NO: 173 - protein, 977 aa, synthetic construct
QEIKRINKIRRRLVKDSNTKKAGKTGPMKTLLVRVMTPDLRERLENLRKKPENIPQPISNTSRANLNKLLTDYTEMKKAILHVYWEEFQKDPVGLMSRVAQPASKKIDQNKLKPEMDEKGNLTTAGFACSQCGQPLFVYKLEQVSEKGKAYTNYFGRCNVAEHEKLILLAQLKPEKDSDEAVTYSLGKFGQRALDFYSIHVTKESTHPVKPLAQIAGNRYASGPVGKALSDACMGTIASFLSKYQDIIIEHQKVVKGNQKRLESLRELAGKENLEYPSVTLPPQPHTKEGVDAYNEVIARVRMWVNLNLWQKLKLSRDDAKPLLRLKGFPSFPLVERQANEVDWWDMVCNVKKLINEKKEDGKVFWQNLAGYKRQEALRPYLSSENDRKKGKKFARYQFGDLLKHLEKKHGEDWGKVYDEAWERIDKKVEGLSKHIKLEEERRSEDAQSKAALTDWLRAKASFVIEGLKEADKDEFSRCELKLQKWYGDLRGKPFAIEAENSILDISGFSKQYNCAFIWQKDGVKKLNLYLIINYFKGGKLRFKKIKPEAFEANRFYTVINKKSGEIVPMEVNFNFDDPNLIILPLAFGKRQGREFIWNDLLSLETGSLKLANGRVIEKTLYNRRTRQDEPALFVALTFERREVLDSSNIKPMNLIGVDRGENIPAVIALTDPEGCPLSRFKDSLGNPTHILRIGESYKEKQRTIQAKKEVEQRRAGGYSRKYASKAKNLADDMVRNTARDLLYYAVTQDAMLIFENLSRGFGRQGKRTFMAERQYTRMEDWLTAKLAYEGLSKTLLSKTLAQYTSKTCSNCGFTITSADYDRVLEKLKKTATGWMTTINGKELKVEGQITYYNRRKRQNVVKDLSVELDRLSEESVNNDISSWTKGRSGEALSLLKKRFSHRPVQEKFVCLNCGFETHADEQAALNIARSWLFLRSQEYKKYQTNKTTGNTDKRAFVETWQSFYRKKLKEVWKPAV

SEQ ID NO: 174 - protein, 977 aa, synthetic construct
QEIKRINKIRRRLVKDSNTKKAGKTGPMKTLLVRVMTPDLRERLENLRKKPENIPQPISNTSRANLNKLLTDYTEMKKAILHVYWEEFQKDPVGLMSRVAQPASKKIDQNKLKPEMDEKGNLTTAGFACSQCGQPLFVYKLEQVSEKGKAYTNYFGRCNVAEHEKLILLAQLKPEKDSDEAVTYSLGKFGQRALDFYSIHVTKESTHPVKPLAQIAGNRYASGPVGKALSDACMGTIASFLSKYQDIIIEHQKVVKGNQKRLESLRELAGKENLEYPSVTLPPQPHTKEGVDAYNEVIARVRMWVNLNLWQKLKLSRDDAKPLLRLKGFPSFPLVERQANEVDWWDMVCNVKKLINEKKEDGKVFWQNLAGYKRQEALRPYLSSPEDRKKGKKFARYQLGDLLLHLEKKHGEDWGKVYDEAWERIDKKVEGLSKHIKLEEERRSEDAQSKAALTDWLRAKASFVIEGLKEADKDEFCRCELKLQKWYGDLRGKPFAIEAENSILDISGFSKQYNCAFIWQKDGVKKLNLYLIINYFKGGKLRFKKIKPEAFEANRFYTVINKKSGEIVPMEVNFNFDDPNLIILPLAFGKRQGREFIWNDLLSLETGSLKLANGRVIEKTLYNRRTRQDEPALFVALTFERREVLDSSNIKPMNLIGVDRGENIPAVIALTDPEGCPLSRFKDSLGNPTHILRIGESYKEKQRTIQAKKEVEQRRAGGYSRKYASKAKNLANDMVRNTARDLLYYAVTQDAMLIFENLSRGFGRQGKRTFMAERQYTRMEDWLTAKLAYEGLSKTYLSKTLAQYTSKTCSNCGFTITSADYDRVLEKLKKTATGWMTTINGKELKVEGQITYYNRRKRQNVVKDLSVELDRLSEESVNNDISSWTKGRSGEALSLLKKRFSHRPVQEKFVCLNCGFETHADEQAALNIARSWLFLRSQEYKKYQTNKTTGNTDKRAFVETWQSFYRKKLKEVWKPAV

SEQ ID NO: 175 - protein, 977 aa, synthetic construct
QEIKRINKIRRRLVKDSNTKKAGKTGPMKTLLVRVMTPDLRERLENLRKKPENIPQPISNTSRANLNKLLTDYTEMKKAILHVYWEEFQKDPVGLMSRVAQPASKKIDQNKLKPEMDEKGNLTTAGFACSQCGQPLFVYKLEQVSEKGKAYTNYFGRCNVAEHEKLILLAQLKPEKDSDEAVTYSLGKFGQRALDFYSIHVTKESTHPVKPLAQIAGNRYASGPVGKALSDACMGTIASFLSKYQDIIIEHQKVVKGNQKRLESLRELAGKENLEYPSVTLPPQPHTKEGVDAYNEVIARVRMWVNLNLWQKLKLSRDDAKPLLRLKGFPSFPLVERQANEVDWWDMVCNVKKLINEKKEDGKVFWQNLAGYKRQEALRPYLSSPEDRKKGKKFARYQLGDLLLHLEKKHGEDWGKVYDEAWERIDKKVEGLSKHIKLEEERRSEDAQSKAALTDWLRAKASFVIEGLKEADKDEFCRCELKLQKWYGDLRGKPFAIEAENSILDISGFSKQYNCAFIWQKDGVKKLNLYLIINYFKGGKLRFKKIKPEAFEANRFYTVINKKSGEIVPMEVNFNFDDPNLIILPLAFGKRQGREFIWNDLLSLETGSLKLANGRVIEKPLYNRRTRQDEPALFVALTFERREVLDSSNIKPMNLIGVDRGENIPAVIALTDPEGCPLSRFKDSLGNPTHILRIGESYKEKQRTIQAKKEVEQRRAGGYSRKYASKAKNLADDMVRNTARDLLYYAVTQDAMLIFENLSRGFGRQGKRTFMAERQYTRMEDWLTAKLAYEGLSKTYLSKTLAQYTSKTCSNCGFTITSADYDRVLEKLKKTATGWMTTINGKELKVEGQITYYNRRKRQNVVKDLSVELDRLSEESVNNDISSWTKGRSGEALSLLKKRFSHRPVQEKFVCLNCGFETHADEQAALNIARSWLFLRSQEYKKYQTNKTTGNTDKRAFVETWQSFYRKKLKEVWKPAV

SEQ ID NO: 176 - protein, 978 aa, synthetic construct
QEIKRINKIRRRLVKDSNTKKAGKTGPMKTLLVRVMTPDLRERLENLRKKPENIPQPISNTSRANLNKLLTDYTEMKKAILHVYWEEFQKDPVGLMSRVAQPASKKIDQNKLKPEMDEKGNLTTAGFACSQCGQPLFVYKLEQVSEKGKAYTNYFGRCNVAEHEKLILLAQLKPEKDSDEAVTYSLGKFGQRALDFYSIHVTKESTHPVKPLAQIAGNRYASGPVGKALSDACMGTIASFLSKYQDIIIEHQKVVKGNQKRLESLRELAGKENLEYPSVTLPPQPHTKEGVDAYNEVIARVRMWVNLNLWQKLKLSRDDAKPLLRLKGFPSFPLVERQANEVDWWDMVCNVKKLINEKKEDGKVFWQNLAGYKRQEALRPYLSSEEDRKKGKKFARYQLGDLLLHLEKKHGEDWGKVYDEAWERIDKKVEGLSKHIKLEEERRSEDAQSKAALTDWLRAKASFVIEGLKEADKDEFCRCELKLQKWYGDLRGKPFAIEAENSILDISGFSKQYNCAFIWQKDGVKKLNLYLIINYFKGGKLRFKKIKPEAFEANRFYTVINKKSGEIVPMEVNFNFDDPNLIILPLAFGKRQGREFIWNDLLSLETGSLKLANGRVIEKTLYNRRTRQDEPALFVALTFEDREVLDSSNIKPMNLIGVDRGENIPAVIALTDPEGCPLSRFKDSLGNPTHILRIGESYKEKQRTIQAKKEVEQRRAGGYSRKYASKAKNLADDMVRNTARDLLYYAVTQDAMLIFENLSRGFGRQGKRTFMAERQYTRMEDWLTAKLAYEGLPSKTYLSKTLAQYTSKTCSNCGFTITSADYDRVLEKLKKTATGWMTTINGKELKVEGQITYYNRYKRQNVVKDLSVELDRLSEESVNNDISSWTKGRSGEALSLLKKRFSHRPVQEKFVCLNCGFETHADEQAALNIARSWLFLRSQEYKKYQTNKTTGNTDKRAFVETWQSFYRKKLKEVWKPAV

SEQ ID NO: 177 - protein, 979 aa, synthetic construct
QEIKRINKIRRRLVKDSNTKKAGKTGPMKTLLVRVMTPDLRERLENLRKKPENIPQPISNTSRANLNKLLTDYTEMKKAILHVYWEEFQKDPVGLMSRVAQPASKKIDQNKLKPEMDEKGNLTTAGFACSQCGQPLFVYKLEQVSEKGKAYTNYFGRCNVAEHEKLILLAQLKPEKDSDEAVTYSLGKFGQRALDFYSIHVTKESTHPVKPLAQIAGNRYASGPVGKALSDACMGTIASFLSKYQDIIIEHQKVVKGNQKRLESLRELAGKENLEYPSVTLPPQPHTKEGVDAYNEVIARVRMWVNLNLWQKLKLSRDDAKPLLRLKGFPSFPLVERQANEVDWWDMVCNVKKLINEKKEDGKVFWQNLAGYKRQEALRPYLSSEEDRKKGKKFARYQLGDLLLHLEKKHGEDWGKVYDEAWERIDKKVEGLSKHIKLEEERRSEDAQSKAALTDWLRAKASFVIEGLKEADKDEFCRCELKLQKWYGDLRGKHPFAIEAENSILDISGFSKQYNCAFIWQKDGVKKLNLYLIINYFKGGKLRFKKIKPEAFEANRFYTVINKKSGEIVPMEVNFNFDDPNLIILPLAFGKRQGREFIWNDLLSLETGSLKLANGRVIEKTLYNRRTRQDEPALFVALTFERREVLDSSNIKPMNLIGVDRGENIPAVIALTDPEGCPLSRFKDSLGNPTHILRIGESYKEKQRTIQAKKEVEQRRAGGYSRKYASKAKNLADDMVRNTARDLLYYAVTQDAMLIFENLSRGFGRQGKRTFMAERQYTRMEDWLTAKLAYEGLPSKTYLSKTLAQYTSKTCSNCGFTITSADYDRVLEKLKKTATGWMTTINGKELKVEGQITYYNRYKRQNVVKDLSVELDRLSEESVNNDISSWTKGRSGEALSLLKKRFSHRPVQEKFVCLNCGFETHADEQAALNIARSWLFLRSQEYKKYQTNKTTGNTDKRAFVETWQSFYRKKLKEVWKPAV

SEQ ID NO: 178 - protein, 979 aa, synthetic construct
QEIKRINKIRRRLVKDSNTKKAGKTGPMKTLLVRVMTPDLRERLENLRKKPENIPQPISNTSRANLNKLLTDYTEMKKAILHVYWEEFQKDPVGLMSRVAQPASKKIDQNKLKPEMDEKGNLTTAGFACSQCGQPLFVYKLEQVSEKGKAYTNYFGRCNVAEHEKLILLAQLKPEKDSDEAVTYSLGKFGQRALDFYSIHVTKESTHPVKPLAQIAGNRYASGPVGKALSDACMGTIASFLSKYQDIIIEHQKVVKGNQKRLESLRELAGKENLEYPSVTLPPQPHTKEGVDAYNEVIARVRMWVNLNLWQKLKLSRDDAKPLLRLKGFPSFPLVERQANEVDWWDMVCNVKKLIINEKKEDGKVFWQNLAGYKRQEALRPYLSSEEDRKKGKKFARYQLGDLLLHLEKKHGEDWGKVYDEAWERIDKKVEGLSKHIKLEEERRSEDAQSKAALTDWLRAKASFVIEGLKEADKDEFCRCELKLQKWYGDLRGKPFAIEAENSILDISGFSKQYNCAFIWQKDGVKKLNLYLIINYFKGGKLRFKKIKPEAFEANRFYTVINKKSGEIVPMEVNFNFDDPNLIILPLAFGKRQGREFIWNDLLSLETGSLKLANGRVIEKTLYNRRTRQDEPALFVALTFERREVLDSSNIKPMNLIGVDRGENIPAVIALTDPEGCPLSRFKDSLGNPTHILRIGESYKEKQRTIQAKKEVEQRRAGGYSRKYASKAKNLADDMVRNTARDLLYYAVTQDAMLIFENLSRGFGRQGKRTFMAERQYTRMEDWLTAKLAYEGLPSKTYLSKTLAQYTSKTCSNCGFTITSADYDRVLEKLKKTATGWMTTINGKELKVEGQITYYNRYKRQNVVKDLSVELDRLSEESVNNDISSWTKGRSGEALSLLKKRFSHRPVQEKFVCLNCGFETHADEQAALNIARSWLFLRSQEYKKYQTNKTTGNTDKRAFVETWQSFYRKKLKEVWKPAV

SEQ ID NO: 179 - protein, 979 aa, synthetic construct
QEIKRINKIRRRLVKDSNTKKAGKTRGPMKTLLVRVMTPDLRERLENLRKKPENIPQPISNTSRANLNKLLTDYTEMKKAILHVYWEEFQKDPVGLMSRVAQPASKKIDQNKLKPEMDEKGNLTTAGFACSQCGQPLFVYKLEQVSEKGKAYTNYFGRCNVAEHEKLILLAQLKPEKDSDEAVTYSLGKFGQRALDFYSIHVTKESTHPVKPLAQIAGNRYASSPVGKALSDACMGTIASFLSKYQDIIIEHQKVVKGNQKRLESLRELAGKENLEYPSVTLPPQPHTKEGVDAYNEVIARVRMWVNLNLWQKLKLSRDDAKPLLRLKGFPSFPLVERQANEVDWWDMVCNVKKLINEKKEDGKVFWQNLAGYKRQEALRPYLSSEEDRKKGKKFARYQLGDLLLHLEKKHGEDWGKVYDEAWERIDKKVEGLSKHIKLEEERRSEDAQSKAALTDWLRAKASFVIEGLKEADKDEFCRCELKLQKWYGDLRGKPFAIEAENSILDISGFSKQYNCAFIWQKDGVKKLNLYLIINYFKGGKLRFKKIKPEAFEANRFYTVINKKSGEIVPMEVNFNFDDPNLIILPLAFGKRQGREFIWNDLLSLETGSLKLANGRVIEKTLYNRRTRQDEPALFVALTFERREVLDSSNIKPMNLIGVDRGENIPAVIALTDPEGCPLSRFKDSLGNPTHILRIGESYKEKQRTIQAKKEVEQRRAGGYSRKYASKAKNLADDMVRNTARDLLYYAVTQDAMLIFENLSRGFGRQGKRTFMAERQYTRMEDWLTAKLAYEGLPSKTYLSKTLAQYTSKTCSNCGFTITSADYDRVLEKLKKTATGWMTTINGKELKVEGQITYYNRYKRQNVVKDLSVELDRLSEESVNNDISSWTKGRSGEALSLLKKRFSHRPVQEKFVCLNCGFETHADEQAALNIARSWLFLRSQEYKKYQTNKTTGNTDKRAFVETWQSFYRKKLKEVWKPAV

SEQ ID NO: 180 - protein, 979 aa, synthetic construct
QEIKRINKIRRRLVKDSNTKKAGKTRGPMKTLLVRVMTPDLRERLENLRKKPENIPQPISNTSRANLNKLLTDYTEMKKAILHVYWEEFQKDPVGLMSRVAQPASKKIDQNKLKPEMDEKGNLTTAGFACSQCGQPLFVYKLEQVSEKGKAYTNYFGRCNVAEHEKLILLAQLKPEKDSDEAVTYSLGKFGQRALDFYSIHVTKESTHPVKPLAQIAGNRYASGPVGKALSGACMGTIASFLSKYQDIIIEHQKVVKGNQKRLESLRELAGKENLEYPSVTLPPQPHTKEGVDAYNEVIARVRMWVNLNLWQKLKLSRDDAKPLLRLKGFPSFPLVERQANEVDWWDMVCNVKKLINEKKEDGKVFWQNLAGYKRQEALRPYLSSEEDRKKGKKFARYQLGDLLLHLEKKHGEDWGKVYDEAWERIDKKVEGLSKHIKLEEERRSEDAQSKAALTDWLRAKASFVIEGLKEADKDEFCRCELKLQKWYGDLRGKPFAIEAENSILDISGFSKQYNCAFIWQKDGVKKLNLYLIINYFKGGKLRFKKIKPEAFEANRFYTVINKKSGEIVPMEVNFNFDDPNLIILPLAFGKRQGREFIWNDLLSLETGSLKLANGRVIEKTLYNRRTRQDEPALFVALTFERREVLDSSNIKPMNLIGVDRGENIPAVIALTDPEGCPLSRFKDSLGNPTHILRIGESYKEKQRTIQAKKEVEQRRAGGYSRKYASKAKNLADDMVRNTARDLLYYAVTQDAMLIFENLSRGFGRQGKRTFMAERQYTRMEDWLTAKLAYEGLPSKTYLSKTLAQYTSKTCSNCGFTITSADYDRVLEKLKKTATGWMTTINGKELKVEGQITYYNRYKRQNVVKDLSVELDRLSEESVNNDISSWTKGRSGEALSLLKKRFSHRPVQEKFVCLNCGFETHADEQAALNIARSWLFLRSQEYKKYQTNKTTGNTDKRAFVETWQSFYRKKLKEVWKPAV

SEQ ID NO: 181 - protein, 979 aa, synthetic construct
QEIKRINKIRRRLVKDSNTKKAGKTRGPMKTLLVRVMTPDLRERLENLRKKPENIPQPISNTSRANLNKLLTDYTEMKKAILHVYWEEFQKDPVGLMSRVAQPASKKIDQNKLKPEMDEKGNLTTAGFACSQCGQPLFVYKLEQVSEKGKAYTNYFGRCNVAEHEKLILLAQLKPEKDSDEAVTYSLGKFGQRALDFYSIHVTKESTHPVKPLAQIAGNRYASSPVGKALSGACMGTIASFLSKYQDIIIEHQKVVKGNQKRLESLRELAGKENLEYPSVTLPPQPHTKEGVDAYNEVIARVRMWVNLNLWQKLKLSRDDAKPLLRLKGFPSFPLVERQANEVDWWDMVCNVKKLINEKKEDGKVFWQNLAGYKRQEALRPYLSSEEDRKKGKKFARYQLGDLLLHLEKKHGEDWGKVYDEAWERIDKKVEGLSKHIKLEEERRSEDAQSKAALTDWLRAKASFVIEGLKEADKDEFCRCELKLQKWYGDLRGKPFAIEAENSILDISGFSKQYNCAFIWQKDGVKKLNLYLIINYFKGGKLRFKKIKPEAFEANRFYTVINKKSGEIVPMEVNFNFDDPNLIILPLAFGKRQGREFIWNDLLSLETGSLKLANGRVIEKTLYNRRTRQDEPALFVALTFERREVLDSSNIKPMNLIGVDRGENIPAVIALTDPEGCPLSRFKDSLGNPTHILRIGESYKEKQRTIQAKKEVEQRRAGGYSRKYASKAKNLADDMVRNTARDLLYYAVTQDAMLIFENLSRGFGRQGKRTFMAERQYTRMEDWLTAKLAYEGLPSKTYLSKTLAQYTSKTCSNCGFTITSADYDRVLEKLKKTATGWMTTINGKELKVEGQITYYNRYKRQNVVKDLSVELDRLSEESVNNDISSWTKGRSGEALSLLKKRFSHRPVQEKFVCLNCGFETHADEQAALNIARSWLFLRSQEYKKYQTNKTTGNTDKRAFVETWQSFYRKKLKEVWKPAV

SEQ ID NO: 182 - protein, 978 aa, synthetic construct
QEIKRINKIRRRLVKDSNTKKAGKTGPMKTLLVRVMTPDLRERLENLRKKPENIPQPISNTSRANLNKLLTDYTEMKKAILHVYWEEFQKDPVGLMSRVAQPASKKIDQNKLKPEMDEKGNLTTAGFACSQCGQPLFVYKLEQVSEKGKAYTNYFGRCNVAEHEKLILLAQLKPEKDSDEAVTYSLGKFGQRALDFYSIHVTKESTHPVKPLAQIAGNRYASGPVGKALSDACMGTIASFLSKYQDIIIEHQKVVKGNQKRLESLRELAGKENLEYPSVTLPPQPHTKEGVDAYNEVIARVRMWVNLNLWQKLKLSRDDAKPLLRLKGFPSFPLVERQANEVDWWDMVCNVKKLINEKKEDGKVFWQNLAGYKRQEALRPYLSSPEDRKKGKKFARYQFGDLLLHLEKKHGEDWGKVYDEAWERIDKKVEGLSKHIKLEEERRSEDAQSKAALTDWLRAKASFVIEGLKEADKDEFCRCELKLQKWYGDLRGKPFAIEAENSILDISGFSKQYNCAFIWQKDGVKKLNLYLIINYFKGGKLRFKKIKPEAFEANRFYTVINKKSGEIVPMEVNFNFDDPNLIILPLAFGKRQGREFIWNDLLSLETGSLKLANGRVIEKTLYNRRTRQDEPALFVALTFERREVLDSSNIKPMNLIGVDRGENIPAVIALTDPEGCPLSRFKDSLGNPTHILRIGESYKEKQRTIQAKKEVEQRRAGGYSRKYASKAKNLANDMVRNTARDLLYYAVTQDAMLIFENLSRGFGRQGKRTFMAERQYTRMEDWLTAKLAYEGLPSKTYLSKTLAQYTSKTCSNCGFTITSADYDRVLEKLKKTATGWMTTINGKELKVEGQITYYNRRKRQNVVKDLSVELDRLSEESVNNDISSWTKGRSGEALSLLKKRFSHRPVQEKFVCLNCGFETHADEQAALNIARSWLFLRSQEYKKYQTNKTTGNTDKRAFVETWQSFYRKKLKEVWKPAV

SEQ ID NO: 183 - protein, 978 aa, synthetic construct
QEIKRINKIRRRLVKDSNTKKAGKTGPMKTLLVRVMTPDLRERLENLRKKPENIPQPISNTSRANLNKLLTDYTEMKKAILHVYWEEFQKDPVGLMSRVAQPASKKIDQNKLKPEMDEKGNLTTAGFACSQCGQPLFVYKLEQVSEKGKAYTNYFGRCNVAEHEKLIKLAQLKPEKDSDEAVTYSLGKFGQRALDFYSIHVTKESTHPVKPLAQIAGNRYASSPVGKALSDACMGTIASFLSKYQDIIIEHQKVVKGNQKRLESLRELAGKENLEYPSVTLPPQPHTKEGVDAYNEVIARVRMWVNLNLWQKLKLSRDDAKPLLRLKGFPSFPLVERQANEVDWWDMVCNVKKLINEKKEDGKVFWQNLAGYKRQEALRPYLSSEEDRKKGKKFARYQLGDLLLHLEKKHGEDWGKVYDEAWERIDKKVEGLSKHIKLEEERRSEDAQSKAALTDWLRAKASFVIEGLKEADKDEFCRCELKLQKWYGDLRGKPFAIEAENSILDISGFSKQYNCAFIWQKDGVKKLNLYLIINYFKGGKLRFKKIKPEAFEANRFYTVINKKSGEIVPMEVNFNFDDPNLIILPLAFGKRQGREFIWNDLLSLETGSLKLANGRVIEKTLYNRRTRQDEPALFVALTFERREVLDSSNIKPMNLIGVDRGENIPAVIALTDPEGCPLSRFKDSLGNPTHILRIGESYKEKQRTIQAKKEVEQRRAGGYSRKYASKAKNLADDMVRNTARDLLYYAVTQDAMLIFENLSRGFGRQGKRTFMAERQYTRMEDWLTAKLAYEGLPSKTYLSKTLAQYTSKTCSNCGFTITSADYDRVLEKLKKTATGWMTTINGKELKVEGQITYYNRYKRQNVVKDLSVELDRLSEESVNNDISSWTKGRSGEALSLLKKRFSHRPVQEKFVCLNCGFETHADEQAALNIARSWLFLRSQEYKKYQTNKTTGNTDKRAFVETWQSFYRKKLKEVWKPAV

SEQ ID NO: 184 - protein, 978 aa, synthetic construct
QEIKRINKIRRRLVKDSNTKKAGKTGPMKTLLVRVMTPDLRERLENLRKKPENIPQPISNTSRANLNKLLTDYTEMKKAILHVYWEEFQKDPVGLMSRVAQPASKKIDQNKLKPEMDEKGNLTTAGFACSQCGQPLFVYKLEQVSEKGKAYTNYFGRCNVAEHEKLILLAQLKPEKDSDEAVTYSLGKFGQRALDFYSIHVTKESTHPVKPLAQIAGNRYASSPVGKALSGACMGTIASFLSKYQDIIIEHQKVVKGNQKRLESLRELAGKENLEYPSVTLPPQPHTKEGVDAYNEVIARVRMWVNLNLWQKLKLSRDDAKPLLRLKGFPSFPLVERQANEVDWWDMVCNVKKLINEKKEDGKVFWQNLAGYKRQEALRPYLSSEEDRKKGKKFARYQLGDLLLHLEKKHGEDWGKVYDEAWERIDKKVEGLSKHIKLEEERRSEDAQSKAALTDWLRAKASFVIEGLKEADKDEFCRCELKLQKWYGDLRGKPFAIEAENSILDISGFSKQYNCAFIWQKDGVKKLNLYLIINYFKGGKLRFKKIKPEAFEANRFYTVINKKSGEIVPMEVNFNFDDPNLIILPLAFGKRQGREFIWNDLLSLETGSLKLANGRVIEKTLYNRRTRQDEPALFVALTFERREVLDSSNIKPMNLIGVDRGENIPAVIALTDPEGCPLSRFKDSLGNPTHILRIGESYKEKQRTIQAKKEVEQRRAGGYSRKYASKAKNLADDMVRNTARDLLYYAVTQDAMLIFENLSRGFGRQGKRTFMAERQYTRMEDWLTAKLAYEGLPSKTYLSKTLAQYTSKTCSNCGFTITSADYDRVLEKLKKTATGWMTTINGKELKVEGQITYYNRYKRQNVVKDLSVELDRLSEESVNNDISSWTKGRSGEALSLLKKRFSHRPVQEKFVCLNCGFETHADEQAALNIARSWLFLRSQEYKKYQTNKTTGNTDKRAFVETWQSFYRKKLKEVWKPAV

SEQ ID NO: 185 - protein, 978 aa, synthetic construct
QEIKRINKIRRRLVKDSNTKKAGKTGPMKTLLVRVMTPDLRERLENLRKKPENIPQPISNTSRANLNKLLTDYTEMKKAILHVYWEEFQKDPVGLMSRVAQPASKKIDQNKLKPEMDEKGNLTTAGFACSQCGQPLFVYKLEQVSEKGKAYTNYFGRCNVAEHEKLIKLAQLKPEKDSDEAVTYSLGKFGQRALDFYSIHVTKESTHPVKPLAQIAGNRYASSPVGKALSGACMGTIASFLSKYQDIIIEHQKVVKGNQKRLESLRELAGKENLEYPSVTLPPQPHTKEGVDAYNEVIARVRMWVNLNLWQKLKLSRDDAKPLLRLKGFPSFPLVERQANEVDWWDMVCNVKKLINEKKEDGKVFWQNLAGYKRQEALRPYLSSEEDRKKGKKFARYQLGDLLLHLEKKHGEDWGKVYDEAWERIDKKVEGLSKHIKLEEERRSEDAQSKAALTDWLRAKASFVIEGLKEADKDEFCRCELKLQKWYGDLRGKPFAIEAENSILDISGFSKQYNCAFIWQKDGVKKLNLYLIINYFKGGKLRFKKIKPEAFEANRFYTVINKKSGEIVPMEVNFNFDDPNLIILPLAFGKRQGREFIWNDLLSLETGSLKLANGRVIEKTLYNRRTRQDEPALFVALTFERREVLDSSNIKPMNLIGVDRGENIPAVIALTDPEGCPLSRFKDSLGNPTHILRIGESYKEKQRTIQAKKEVEQRRAGGYSRKYASKAKNLADDMVRNTARDLLYYAVTQDAMLIFENLSRGFGRQGKRTFMAERQYTRMEDWLTAKLAYEGLPSKTYLSKTLAQYTSKTCSNCGFTITSADYDRVLEKLKKTATGWMTTINGKELKVEGQITYYNRYKRQNVVKDLSVELDRLSEESVNNDISSWTKGRSGEALSLLKKRFSHRPVQEKFVCLNCGFETHADEQAALNIARSWLFLRSQEYKKYQTNKTTGNTDKRAFVETWQSFYRKKLKEVWKPAV

SEQ ID NO: 186 - protein, 978 aa, synthetic construct
QEIKRINKIRRRLVKDSNTKKAGKTRGPMKTLLVRVMTPDLRERLENLRKKPENIPQPISNTSRANLNKLLTDYTEMKKAILHVYWEEFQKDPVGLMSRVAQPASKKIDQNKLKPEMDEKGNLTTAGFACSQCGQPLFVYKLEQVSEKGKAYTNYFGRCNVAEHEKLIKLAQLKPEKDSDEAVTYSLGKFGQRALDFYSIHVTKESTHPVKPLAQIAGNRYASGPVGKALSDACMGTIASFLSKYQDIIIEHQKVVKGNQKRLESLRELAGKENLEYPSVTLPPQPHTKEGVDAYNEVIARVRMWVNLNLWQKLKLSRDDAKPLLRLKGFPSFPLVERQANEVDWWDMVCNVKKLINEKKEDGKVFWQNLAGYKRQEALRPYLSSEEDRKKGKKFARYQLGDLLLHLEKKHGEDWGKVYDEAWERIDKKVEGLSKHIKLEEERRSEDAQSKAALTDWLRAKASFVIEGLKEADKDEFCRCELKLQKWYGDLRGKPFAIEAENSILDISGFSKQYNCAFIWQKDGVKKLNLYLIINYFKGGKLRFKKIKPEAFEANRFYTVINKKSGEIVPMEVNFNFDDPNLIILPLAFGKRQGREFIWNDLLSLETGSLKLANGRVIEKTLYNRRTRQDEPALFVALTFERREVLDSSNIKPMNLIGVDRGENIPAVIALTDPEGCPLSRFKDSLGNPTHILRIGESYKEKQRTIQAKKEVEQRRAGGYSRKYASKAKNLADDMVRNTARDLLYYAVTQDAMLIFENLSRGFGRQGKRTFMAERQYTRMEDWLTAKLAYEGLSKTYLSKTLAQYTSKTCSNCGFTITSADYDRVLEKLKKTATGWMTTINGKELKVEGQITYYNRYKRQNVVKDLSVELDRLSEESVNNDISSWTKGRSGEALSLLKKRFSHRPVQEKFVCLNCGFETHADEQAALNIARSWLFLRSQEYKKYQTNKTTGNTDKRAFVETWQSFYRKKLKEVWKPAV

SEQ ID NO: 187 - protein, 979 aa, synthetic construct
QEIKRINKIRRRLVKDSNTKKAGKTRGPMKTLLVRVMTPDLRERLENLRKKPENIPQPISNTSRANLNKLLTDYTEMKKAILHVYWEEFQKDPVGLMSRVAQPASKKIDQNKLKPEMDEKGNLTTAGFACSQCGQPLFVYKLEQVSEKGKAYTNYFGRCNVAEHEKLIKLAQLKPEKDSDEAVTYSLGKFGQRALDFYSIHVTKESTHPVKPLAQIAGNRYASSPVGKALSGACMGTIASFLSKYQDIIIEHQKVVKGNQKRLESLRELAGKENLEYPSVTLPPQPHTKEGVDAYNEVIARVRMWVNLNLWQKLKLSRDDAKPLLRLKGFPSFPLVERQANEVDWWDMVCNVKKLINEKKEDGKVFWQNLAGYKRQEALRPYLSSEEDRKKGKKFARYQLGDLLLHLEKKHGEDWGKVYDEAWERIDKKVEGLSKHIKLEEERRSEDAQSKAALTDWLRAKASFVIEGLKEADKDEFCRCELKLQKWYGDLRGKPFAIEAENSILDISGFSKQYNCAFIWQKDGVKKLNLYLIINYFKGGKLRFKKIKPEAFEANRFYTVINKKSGEIVPMEVNFNFDDPNLIILPLAFGKRQGREFIWNDLLSLETGSLKLANGRVIEKTLYNRRTRQDEPALFVALTFERREVLDSSNIKPMNLIGVDRGENIPAVIALTDPEGCPLSRFKDSLGNPTHILRIGESYKEKQRTIQAKKEVEQRRAGGYSRKYASKAKNLADDMVRNTARDLLYYAVTQDAMLIFENLSRGFGRQGKRTFMAERQYTRMEDWLTAKLAYEGLPSKTYLSKTLAQYTSKTCSNCGFTITSADYDRVLEKLKKTATGWMTTINGKELKVEGQITYYNRYKRQNVVKDLSVELDRLSEESVNNDISSWTKGRSGEALSLLKKRFSHRPVQEKFVCLNCGFETHADEQAALNIARSWLFLRSQEYKKYQTNKTTGNTDKRAFVETWQSFYRKKLKEVWKPAV

SEQ ID NO: 188 - protein, 978 aa, synthetic construct
QEIKRINKIRRRLVKDSNTKKAGKTGPMKTLLVRVMTPDLRERLENLRKKPENIPQPISNTSRANLNKLLTDYTEMKKAILHVYWEEFQKDPVGLMSRVAQPASKKIDQNKLKPEMDEKGNLTTAGFACSQCGQPLFVYKLEQVSEKGKAYTNYFGRCNVAEHEKLILLAQLKPEKDSDEAVTYSLGKFGQRALDFYSIHVTKESTHPVKPLAQIAGNRYASYPVGKALSGACMGTIASFLSKYQDIIIEHQKVVKGNQKRLESLRELAGKENLEYPSVTLPPQPHTKEGVDAYNEVIARVRMWVNLNLWQKLKLSRDDAKPLLRLKGFPSFPLVERQANEVDWWDMVCNVKKLINEKKEDGKVFWQNLAGYKRQEALRPYLSSEEDRKKGKKFARYQLGDLLLHLEKKHGEDWGKVYDEAWERIDKKVEGLSKHIKLEEERRSEDAQSKAALTDWLRAKASFVIEGLKEADKDEFCRCELKLQKWYGDLRGKPFAIEAENSILDISGFSKQYNCAFIWQKDGVKKLNLYLIINYFKGGKLRFKKIKPEAFEANRFYTVINKKSGEIVPMEVNFNFDDPNLIILPLAFGKRQGREFIWNDLLSLETGSLKLANGRVIEKTLYNRRTRQDEPALFVALTFERREVLDSSNIKPMNLIGVDRGENIPAVIALTDPEGCPLSRFKDSLGNPTHILRIGESYKEKQRTIQAKKEVEQRRAGGYSRKYASKAKNLADDMVRNTARDLLYYAVTQDAMLIFENLSRGFGRQGKRTFMAERQYTRMEDWLTAKLAYEGLPSKTYLSKTLAQYTSKTCSNCGFTITSADYDRVLEKLKKTATGWMTTINGKELKVEGQITYYNRYKRQNVVKDLSVELDRLSEESVNNDISSWTKGRSGEALSLLKKRFSHRPVQEKFVCLNCGFETHADEQAALNIARSWLFLRSQEYKKYQTNKTTGNTDKRAFVETWQSFYRKKLKEVWKPAV

SEQ ID NO: 189 - protein, 978 aa, synthetic construct
QEIKRINKIRRRLVKDSNTKKAGKTGPMKTLLVRVMTPDLRERLENLRKKPENIPQPISNTSRANLNKLLTDYTEMKKAILHVYWEEFQKDPVGLMSRVAQPASKKIDQNKLKPEMDEKGNLTTAGFACSQCGQPLFVYKLEQVSEKGKAYTNYFGRCNVAEHEKLILLAQLKPEKDSDEAVTYSLGKFGQRALDFYSIHVTKESTHPVKPLAQIAGNRYASHPVGKALSGACMGTIASFLSKYQDIIIEHQKVVKGNQKRLESLRELAGKENLEYPSVTLPPQPHTKEGVDAYNEVIARVRMWVNLNLWQKLKLSRDDAKPLLRLKGFPSFPLVERQANEVDWWDMVCNVKKLINEKKEDGKVFWQNLAGYKRQEALRPYLSSEEDRKKGKKFARYQLGDLLLHLEKKHGEDWGKVYDEAWERIDKKVEGLSKHIKLEEERRSEDAQSKAALTDWLRAKASFVIEGLKEADKDEFCRCELKLQKWYGDLRGKPFAIEAENSILDISGFSKQYNCAFIWQKDGVKKLNLYLIINYFKGGKLRFKKIKPEAFEANRFYTVINKKSGEIVPMEVNFNFDDPNLIILPLAFGKRQGREFIWNDLLSLETGSLKLANGRVIEKTLYNRRTRQDEPALFVALTFERREVLDSSNIKPMNLIGVDRGENIPAVIALTDPEGCPLSRFKDSLGNPTHILRIGESYKEKQRTIQAKKEVEQRRAGGYSRKYASKAKNLADDMVRNTARDLLYYAVTQDAMLIFENLSRGFGRQGKRTFMAERQYTRMEDWLTAKLAYEGLPSKTYLSKTLAQYTSKTCSNCGFTITSADYDRVLEKLKKTATGWMTTINGKELKVEGQITYYNRYKRQNVVKDLSVELDRLSEESVNNDISSWTKGRSGEALSLLKKRFSHRPVQEKFVCLNCGFETHADEQAALNIARSWLFLRSQEYKKYQTNKTTGNTDKRAFVETWQSFYRKKLKEVWKPAV

SEQ ID NO: 190 - protein, 979 aa, synthetic construct
QEIKRINKIRRRLVKDSNTKKAGKTRGPMKTLLVRVMTPDLRERLENLRKKPENIPQPISNTSRANLNKLLTDYTEMKKAILHVYWEEFQKDPVGLMSRVAQPASKKIDQNKLKPEMDEKGNLTTAGFACSQCGQPLFVYKLEQVSEKGKAYTNYFGRCNVAEHEKLILLAQLKPEKDSDEAVTYSLGKFGQRALDFYSIHVTKESTHPVKPLAQIAGNRYASYPVGKALSGACMGTIASFLSKYQDIIIEHQKVVKGNQKRLESLRELAGKENLEYPSVTLPPQPHTKEGVDAYNEVIARVRMWVNLNLWQKLKLSRDDAKPLLRLKGFPSFPLVERQANEVDWWDMVCNVKKLINEKKEDGKVFWQNLAGYKRQEALRPYLSSEEDRKKGKKFARYQLGDLLLHLEKKHGEDWGKVYDEAWERIDKKVEGLSKHIKLEEERRSEDAQSKAALTDWLRAKASFVIEGLKEADKDEFCRCELKLQKWYGDLRGKPFAIEAENSILDISGFSKQYNCAFIWQKDGVKKLNLYLIINYFKGGKLRFKKIKPEAFEANRFYTVINKKSGEIVPMEVNFNFDDPNLIILPLAFGKRQGREFIWNDLLSLETGSLKLANGRVIEKTLYNRRTRQDEPALFVALTFERREVLDSSNIKPMNLIGVDRGENIPAVIALTDPEGCPLSRFKDSLGNPTHILRIGESYKEKQRTIQAKKEVEQRRAGGYSRKYASKAKNLADDMVRNTARDLLYYAVTQDAMLIFENLSRGFGRQGKRTFMAERQYTRMEDWLTAKLAYEGLPSKTYLSKTLAQYTSKTCSNCGFTITSADYDRVLEKLKKTATGWMTTINGKELKVEGQITYYNRYKRQNVVKDLSVELDRLSEESVNNDISSWTKGRSGEALSLLKKRFSHRPVQEKFVCLNCGFETHADEQAALNIARSWLFLRSQEYKKYQTNKTTGNTDKRAFVETWQSFYRKKLKEVWKPAV

SEQ ID NO: 191 - protein, 979 aa, synthetic construct
QEIKRINKIRRRLVKDSNTKKAGKTRGPMKTLLVRVMTPDLRERLENLRKKPENIPQPISNTSRANLNKLLTDYTEMKKAILHVYWEEFQKDPVGLMSRVAQPASKKIDQNKLKPEMDEKGNLTTAGFACSQCGQPLFVYKLEQVSEKGKAYTNYFGRCNVAEHEKLILLAQLKPEKDSDEAVTYSLGKFGQRALDFYSIHVTKESTHPVKPLAQIAGNRYASHPVGKALSGACMGTIASFLSKYQDIIIEHQKVVKGNQKRLESLRELAGKENLEYPSVTLPPQPHTKEGVDAYNEVIARVRMWVNLNLWQKLKLSRDDAKPLLRLKGFPSFPLVERQANEVDWWDMVCNVKKLINEKKEDGKVFWQNLAGYKRQEALRPYLSSEEDRKKGKKFARYQLGDLLLHLEKKHGEDWGKVYDEAWERIDKKVEGLSKHIKLEEERRSEDAQSKAALTDWLRAKASFVIEGLKEADKDEFCRCELKLQKWYGDLRGKPFAIEAENSILDISGFSKQYNCAFIWQKDGVKKLNLYLIINYFKGGKLRFKKIKPEAFEANRFYTVINKKSGEIVPMEVNFNFDDPNLIILPLAFGKRQGREFIWNDLLSLETGSLKLANGRVIEKTLYNRRTRQDEPALFVALTFERREVLDSSNIKPMNLIGVDRGENIPAVIALTDPEGCPLSRFKDSLGNPTHILRIGESYKEKQRTIQAKKEVEQRRAGGYSRKYASKAKNLADDMVRNTARDLLYYAVTQDAMLIFENLSRGFGRQGKRTFMAERQYTRMEDWLTAKLAYEGLPSKTYLSKTLAQYTSKTCSNCGFTITSADYDRVLEKLKKTATGWMTTINGKELKVEGQITYYNRYKRQNVVKDLSVELDRLSEESVNNDISSWTKGRSGEALSLLKKRFSHRPVQEKFVCLNCGFETHADEQAALNIARSWLFLRSQEYKKYQTNKTTGNTDKRAFVETWQSFYRKKLKEVWKPAV

SEQ ID NO: 192 - protein, 978 aa, synthetic construct
QEIKRINKIRRRLVKDSNTKKAGKTGPMKTLLVRVMTPDLRERLENLRKKPENIPQPISNTSRANLNKLLTDYTEMKKAILHVYWEEFQKDPVGLMSRVAQPASKKIDQNKLKPEMDEKGNLTTAGFACSQCGQPLFVYKLEQVSEKGKAYTNYFGRCNVAEHEKLIKLAQLKPEKDSDEAVTYSLGKFGQRALDFYSIHVTKESTHPVKPLAQIAGNRYASGPVGKALSGACMGTIASFLSKYQDIIIEHQKVVKGNQKRLESLRELAGKENLEYPSVTLPPQPHTKEGVDAYNEVIARVRMWVNLNLWQKLKLSRDDAKPLLRLKGFPSFPLVERQANEVDWWDMVCNVKKLINEKKEDGKVFWQNLAGYKRQEALRPYLSSEEDRKKGKKFARYQLGDLLLHLEKKHGEDWGKVYDEAWERIDKKVEGLSKHIKLEEERRSEDAQSKAALTDWLRAKASFVIEGLKEADKDEFCRCELKLQKWYGDLRGKPFAIEAENSILDISGFSKQYNCAFIWQKDGVKKLNLYLIINYFKGGKLRFKKIKPEAFEANRFYTVINKKSGEIVPMEVNFNFDDPNLIILPLAFGKRQGREFIWNDLLSLETGSLKLANGRVIEKTLYNRRTRQDEPALFVALTFERREVLDSSNIKPMNLIGVDRGENIPAVIALTDPEGCPLSRFKDSLGNPTHILRIGESYKEKQRTIQAKKEVEQRRAGGYSRKYASKAKNLADDMVRNTARDLLYYAVTQDAMLIFENLSRGFGRQGKRTFMAERQYTRMEDWLTAKLAYEGLPSKTYLSKTLAQYTSKTCSNCGFTITSADYDRVLEKLKKTATGWMTTINGKELKVEGQITYYNRYKRQNVVKDLSVELDRLSEESVNNDISSWTKGRSGEALSLLKKRFSHRPVQEKFVCLNCGFETHADEQAALNIARSWLFLRSQEYKKYQTNKTTGNTDKRAFVETWQSFYRKKLKEVWKPAV

SEQ ID NO: 193 - protein, 978 aa, synthetic construct
QEIKRINKIRRRLVKDSNTKKAGKTGPMKTLLVRVMTPDLRERLENLRKKPENIPQPISNTSRANLNKLLTDYTEMKKAILHVYWEEFQKDPVGLMSRVAQPASKKIDQNKLKPEMDEKGNLTTAGFACSQCGQPLFVYKLEQVSEKGKAYTNYFGRCNVAEHEKLIKLAQLKPEKDSDEAVTYSLGKFGQRALDFYSIHVTKESTHPVKPLAQIAGNRYASYPVGKALSGACMGTIASFLSKYQDIIIEHQKVVKGNQKRLESLRELAGKENLEYPSVTLPPQPHTKEGVDAYNEVIARVRMWVNLNLWQKLKLSRDDAKPLLRLKGFPSFPLVERQANEVDWWDMVCNVKKLINEKKEDGKVFWQNLAGYKRQEALRPYLSSEEDRKKGKKFARYQLGDLLLHLEKKHGEDWGKVYDEAWERIDKKVEGLSKHIKLEEERRSEDAQSKAALTDWLRAKASFVIEGLKEADKDEFCRCELKLQKWYGDLRGKPFAIEAENSILDISGFSKQYNCAFIWQKDGVKKLNLYLIINYFKGGKLRFKKIKPEAFEANRFYTVINKKSGEIVPMEVNFNFDDPNLIILPLAFGKRQGREFIWNDLLSLETGSLKLANGRVIEKTLYNRRTRQDEPALFVALTFERREVLDSSNIKPMNLIGVDRGENIPAVIALTDPEGCPLSRFKDSLGNPTHILRIGESYKEKQRTIQAKKEVEQRRAGGYSRKYASKAKNLADDMVRNTARDLLYYAVTQDAMLIFENLSRGFGRQGKRTFMAERQYTRMEDWLTAKLAYEGLPSKTYLSKTLAQYTSKTCSNCGFTITSADYDRVLEKLKKTATGWMTTINGKELKVEGQITYYNRYKRQNVVKDLSVELDRLSEESVNNDISSWTKGRSGEALSLLKKRFSHRPVQEKFVCLNCGFETHADEQAALNIARSWLFLRSQEYKKYQTNKTTGNTDKRAFVETWQSFYRKKLKEVWKPAV

SEQ ID NO: 194 - protein, 979 aa, synthetic construct
QEIKRINKIRRRLVKDSNTKKAGKTRGPMKTLLVRVMTPDLRERLENLRKKPENIPQPISNTSRANLNKLLTDYTEMKKAILHVYWEEFQKDPVGLMSRVAQPASKKIDQNKLKPEMDEKGNLTTAGFACSQCGQPLFVYKLEQVSEKGKAYTNYFGRCNVAEHEKLIKLAQLKPEKDSDEAVTYSLGKFGQRALDFYSIHVTKESTHPVKPLAQIAGNRYASGPVGKALSGACMGTIASFLSKYQDIIIEHQKVVKGNQKRLESLRELAGKENLEYPSVTLPPQPHTKEGVDAYNEVIARVRMWVNLNLWQKLKLSRDDAKPLLRLKGFPSFPLVERQANEVDWWDMVCNVKKLINEKKEDGKVFWQNLAGYKRQEALRPYLSSEEDRKKGKKFARYQLGDLLLHLEKKHGEDWGKVYDEAWERIDKKVEGLSKHIKLEEERRSEDAQSKAALTDWLRAKASFVIEGLKEADKDEFCRCELKLQKWYGDLRGKPFAIEAENSILDISGFSKQYNCAFIWQKDGVKKLNLYLIINYFKGGKLRFKKIKPEAFEANRFYTVINKKSGEIVPMEVNFNFDDPNLIILPLAFGKRQGREFIWNDLLSLETGSLKLANGRVIEKTLYNRRTRQDEPALFVALTFERREVLDSSNIKPMNLIGVDRGENIPAVIALTDPEGCPLSRFKDSLGNPTHILRIGESYKEKQRTIQAKKEVEQRRAGGYSRKYASKAKNLADDMVRNTARDLLYYAVTQDAMLIFENLSRGFGRQGKRTFMAERQYTRMEDWLTAKLAYEGLPSKTYLSKTLAQYTSKTCSNCGFTITSADYDRVLEKLKKTATGWMTTINGKELKVEGQITYYNRYKRQNVVKDLSVELDRLSEESVNNDISSWTKGRSGEALSLLKKRFSHRPVQEKFVCLNCGFETHADEQAALNIARSWLFLRSQEYKKYQTNKTTGNTDKRAFVETWQSFYRKKLKEVWKPAV

SEQ ID NO: 195 - protein, 979 aa, synthetic construct
QEIKRINKIRRRLVKDSNTKKAGKTRGPMKTLLVRVMTPDLRERLENLRKKPENIPQPISNTSRANLNKLLTDYTEMKKAILHVYWEEFQKDPVGLMSRVAQPASKKIDQNKLKPEMDEKGNLTTAGFACSQCGQPLFVYKLEQVSEKGKAYTNYFGRCNVAEHEKLIKLAQLKPEKDSDEAVTYSLGKFGQRALDFYSIHVTKESTHPVKPLAQIAGNRYASYPVGKALSGACMGTIASFLSKYQDIIIEHQKVVKGNQKRLESLRELAGKENLEYPSVTLPPQPHTKEGVDAYNEVIARVRMWVNLNLWQKLKLSRDDAKPLLRLKGFPSFPLVERQANEVDWWDMVCNVKKLINEKKEDGKVFWQNLAGYKRQEALRPYLSSEEDRKKGKKFARYQLGDLLLHLEKKHGEDWGKVYDEAWERIDKKVEGLSKHIKLEEERRSEDAQSKAALTDWLRAKASFVIEGLKEADKDEFCRCELKLQKWYGDLRGKPFAIEAENSILDISGFSKQYNCAFIWQKDGVKKLNLYLIINYFKGGKLRFKKIKPEAFEANRFYTVINKKSGEIVPMEVNFNFDDPNLIILPLAFGKRQGREFIWNDLLSLETGSLKLANGRVIEKTLYNRRTRQDEPALFVALTFERREVLDSSNIKPMNLIGVDRGENIPAVIALTDPEGCPLSRFKDSLGNPTHILRIGESYKEKQRTIQAKKEVEQRRAGGYSRKYASKAKNLADDMVRNTARDLLYYAVTQDAMLIFENLSRGFGRQGKRTFMAERQYTRMEDWLTAKLAYEGLPSKTYLSKTLAQYTSKTCSNCGFTITSADYDRVLEKLKKTATGWMTTINGKELKVEGQITYYNRYKRQNVVKDLSVELDRLSEESVNNDISSWTKGRSGEALSLLKKRFSHRPVQEKFVCLNCGFETHADEQAALNIARSWLFLRSQEYKKYQTNKTTGNTDKRAFVETWQSFYRKKLKEVWKPAV

SEQ ID NO: 196 - protein, 979 aa, synthetic construct
QEIKRINKIRRRLVKDSNTKKAGKTRGPMKTLLVRVMTPDLRERLENLRKKPENIPQPISNTSRANLNKLLTDYTEMKKAILHVYWEEFQKDPVGLMSRVAQPASKKIDQNKLKPEMDEKGNLTTAGFACSQCGQPLFVYKLEQVSEKGKAYTNYFGRCNVAEHEKLIKLAQLKPEKDSDEAVTYSLGKFGQRALDFYSIHVTKESTHPVKPLAQIAGNRYASHPVGKALSGACMGTIASFLSKYQDIIIEHQKVVKGNQKRLESLRELAGKENLEYPSVTLPPQPHTKEGVDAYNEVIARVRMWVNLNLWQKLKLSRDDAKPLLRLKGFPSFPLVERQANEVDWWDMVCNVKKLINEKKEDGKVFWQNLAGYKRQEALRPYLSSEEDRKKGKKFARYQLGDLLLHLEKKHGEDWGKVYDEAWERIDKKVEGLSKHIKLEEERRSEDAQSKAALTDWLRAKASFVIEGLKEADKDEFCRCELKLQKWYGDLRGKPFAIEAENSILDISGFSKQYNCAFIWQKDGVKKLNLYLIINYFKGGKLRFKKIKPEAFEANRFYTVINKKSGEIVPMEVNFNFDDPNLIILPLAFGKRQGREFIWNDLLSLETGSLKLANGRVIEKTLYNRRTRQDEPALFVALTFERREVLDSSNIKPMNLIGVDRGENIPAVIALTDPEGCPLSRFKDSLGNPTHILRIGESYKEKQRTIQAKKEVEQRRAGGYSRKYASKAKNLADDMVRNTARDLLYYAVTQDAMLIFENLSRGFGRQGKRTFMAERQYTRMEDWLTAKLAYEGLPSKTYLSKTLAQYTSKTCSNCGFTITSADYDRVLEKLKKTATGWMTTINGKELKVEGQITYYNRYKRQNVVKDLSVELDRLSEESVNNDISSWTKGRSGEALSLLKKRFSHRPVQEKFVCLNCGFETHADEQAALNIARSWLFLRSQEYKKYQTNKTTGNTDKRAFVETWQSFYRKKLKEVWKPAV

SEQ ID NO: 197 - protein, 979 aa, synthetic construct
QEIKRINKIRRRLVKDSNTKKAGKTRGPMKTLLVRVMTPDLRERLENLRKKPENIPQPISNTSRANLNKLLTDYTEMKKAILHVYWEEFQKDPVGLMSRVAQPASKKIDQNKLKPEMDEKGNLTTAGFACSQCGQPLFVYKLEQVSEKGKAYTNYFGRCNVAEHEKLILLAQLKPEKDSDEAVTYSLGKFGQRALDFYSIHVTKESTHPVKPLAQIAGNRYASHPVGKALSDACMGTIASFLSKYQDIIIEHQKVVKGNQKRLESLRELAGKENLEYPSVTLPPQPHTKEGVDAYNEVIARVRMWVNLNLWQKLKLSRDDAKPLLRLKGFPSFPLVERQANEVDWWDMVCNVKKLINEKKEDGKVFWQNLAGYKRQEALRPYLSSEEDRKKGKKFARYQLGDLLLHLEKKHGEDWGKVYDEAWERIDKKVEGLSKHIKLEEERRSEDAQSKAALTDWLRAKASFVIEGLKEADKDEFCRCELKLQKWYGDLRGKPFAIEAENSILDISGFSKQYNCAFIWQKDGVKKLNLYLIINYFKGGKLRFKKIKPEAFEANRFYTVINKKSGEIVPMEVNFNFDDPNLIILPLAFGKRQGREFIWNDLLSLETGSLKLANGRVIEKTLYNRRTRQDEPALFVALTFERREVLDSSNIKPMNLIGVDRGENIPAVIALTDPEGCPLSRFKDSLGNPTHILRIGESYKEKQRTIQAKKEVEQRRAGGYSRKYASKAKNLADDMVRNTARDLLYYAVTQDAMLIFENLSRGFGRQGKRTFMAERQYTRMEDWLTAKLAYEGLPSKTYLSKTLAQYTSKTCSNCGFTITSADYDRVLEKLKKTATGWMTTINGKELKVEGQITYYNRYKRQNVVKDLSVELDRLSEESVNNDISSWTKGRSGEALSLLKKRFSHRPVQEKFVCLNCGFETHADEQAALNIARSWLFLRSQEYKKYQTNKTTGNTDKRAFVETWQSFYRKKLKEVWKPAV

SEQ ID NO: 198 - protein, 978 aa, synthetic construct
QEIKRINKIRRRLVKDSNTKKAGKTGPMKTLLVRVMTPDLRERLENLRKKPENIPQPISNTSRANLNKLLTDYTEMKKAILHVYWEEFQKDPVGLMSRVAQPASKKIDQNKLKPEMDEKGNLTTAGFACSQCGQPLFVYKLEQVSEKGKAYTNYFGRCNVAEHEKLIKLAQLKPEKDSDEAVTYSLGKFGQRALDFYSIHVTKESTHPVKPLAQIAGNRYASYPVGKALSDACMGTIASFLSKYQDIIIEHQKVVKGNQKRLESLRELAGKENLEYPSVTLPPQPHTKEGVDAYNEVIARVRMWVNLNLWQKLKLSRDDAKPLLRLKGFPSFPLVERQANEVDWWDMVCNVKKLINEKKEDGKVFWQNLAGYKRQEALRPYLSSEEDRKKGKKFARYQLGDLLLHLEKKHGEDWGKVYDEAWERIDKKVEGLSKHIKLEEERRSEDAQSKAALTDWLRAKASFVIEGLKEADKDEFCRCELKLQKWYGDLRGKPFAIEAENSILDISGFSKQYNCAFIWQKDGVKKLNLYLIINYFKGGKLRFKKIKPEAFEANRFYTVINKKSGEIVPMEVNFNFDDPNLIILPLAFGKRQGREFIWNDLLSLETGSLKLANGRVIEKTLYNRRTRQDEPALFVALTFERREVLDSSNIKPMNLIGVDRGENIPAVIALTDPEGCPLSRFKDSLGNPTHILRIGESYKEKQRTIQAKKEVEQRRAGGYSRKYASKAKNLADDMVRNTARDLLYYAVTQDAMLIFENLSRGFGRQGKRTFMAERQYTRMEDWLTAKLAYEGLPSKTYLSKTLAQYTSKTCSNCGFTITSADYDRVLEKLKKTATGWMTTINGKELKVEGQITYYNRYKRQNVVKDLSVELDRLSEESVNNDISSWTKGRSGEALSLLKKRFSHRPVQEKFVCLNCGFETHADEQAALNIARSWLFLRSQEYKKYQTNKTTGNTDKRAFVETWQSFYRKKLKEVWKPAV

SEQ ID NO: 199 - protein, 978 aa, synthetic construct
QEIKRINKIRRRLVKDSNTKKAGKTGPMKTLLVRVMTPDLRERLENLRKKPENIPQPISNTSRANLNKLLTDYTEMKKAILHVYWEEFQKDPVGLMSRVAQPASKKIDQNKLKPEMDEKGNLTTAGFACSQCGQPLFVYKLEQVSEKGKAYTNYFGRCNVAEHEKLIKLAQLKPEKDSDEAVTYSLGKFGQRALDFYSIHVTKESTHPVKPLAQIAGNRYASHPVGKALSDACMGTIASFLSKYQDIIIEHQKVVKGNQKRLESLRELAGKENLEYPSVTLPPQPHTKEGVDAYNEVIARVRMWVNLNLWQKLKLSRDDAKPLLRLKGFPSFPLVERQANEVDWWDMVCNVKKLINEKKEDGKVFWQNLAGYKRQEALRPYLSSEEDRKKGKKFARYQLGDLLLHLEKKHGEDWGKVYDEAWERIDKKVEGLSKHIKLEEERRSEDAQSKAALTDWLRAKASFVIEGLKEADKDEFCRCELKLQKWYGDLRGKPFAIEAENSILDISGFSKQYNCAFIWQKDGVKKLNLYLIINYFKGGKLRFKKIKPEAFEANRFYTVINKKSGEIVPMEVNFNFDDPNLIILPLAFGKRQGREFIWNDLLSLETGSLKLANGRVIEKTLYNRRTRQDEPALFVALTFERREVLDSSNIKPMNLIGVDRGENIPAVIALTDPEGCPLSRFKDSLGNPTHILRIGESYKEKQRTIQAKKEVEQRRAGGYSRKYASKAKNLADDMVRNTARDLLYYAVTQDAMLIFENLSRGFGRQGKRTFMAERQYTRMEDWLTAKLAYEGLPSKTYLSKTLAQYTSKTCSNCGFTITSADYDRVLEKLKKTATGWMTTINGKELKVEGQITYYNRYKRQNVVKDLSVELDRLSEESVNNDISSWTKGRSGEALSLLKKRFSHRPVQEKFVCLNCGFETHADEQAALNIARSWLFLRSQEYKKYQTNKTTGNTDKRAFVETWQSFYRKKLKEVWKPAV

SEQ ID NO: 200 - protein, 979 aa, synthetic construct
QEIKRINKIRRRLVKDSNTKKAGKTRGPMKTLLVRVMTPDLRERLENLRKKPENIPQPISNTSRANLNKLLTDYTEMKKAILHVYWEEFQKDPVGLMSRVAQPASKKIDQNKLKPEMDEKGNLTTAGFACSQCGQPLFVYKLEQVSEKGKAYTNYFGRCNVAEHEKLIKLAQLKPEKDSDEAVTYSLGKFGQRALDFYSIHVTKESTHPVKPLAQIAGNRYASYPVGKALSDACMGTIASFLSKYQDIIIEHQKVVKGNQKRLESLRELAGKENLEYPSVTLPPQPHTKEGVDAYNEVIARVRMWVNLNLWQKLKLSRDDAKPLLRLKGFPSFPLVERQANEVDWWDMVCNVKKLINEKKEDGKVFWQNLAGYKRQEALRPYLSSEEDRKKGKKFARYQLGDLLLHLEKKHGEDWGKVYDEAWERIDKKVEGLSKHIKLEEERRSEDAQSKAALTDWLRAKASFVIEGLKEADKDEFCRCELKLQKWYGDLRGKPFAIEAENSILDISGFSKQYNCAFIWQKDGVKKLNLYLIINYFKGGKLRFKKIKPEAFEANRFYTVINKKSGEIVPMEVNFNFDDPNLIILPLAFGKRQGREFIWNDLLSLETGSLKLANGRVIEKTLYNRRTRQDEPALFVALTFERREVLDSSNIKPMNLIGVDRGENIPAVIALTDPEGCPLSRFKDSLGNPTHILRIGESYKEKQRTIQAKKEVEQRRAGGYSRKYASKAKNLADDMVRNTARDLLYYAVTQDAMLIFENLSRGFGRQGKRTFMAERQYTRMEDWLTAKLAYEGLPSKTYLSKTLAQYTSKTCSNCGFTITSADYDRVLEKLKKTATGWMTTINGKELKVEGQITYYNRYKRQNVVKDLSVELDRLSEESVNNDISSWTKGRSGEALSLLKKRFSHRPVQEKFVCLNCGFETHADEQAALNIARSWLFLRSQEYKKYQTNKTTGNTDKRAFVETWQSFYRKKLKEVWKPAV

SEQ ID NO: 201 - protein, 979 aa, synthetic construct
QEIKRINKIRRRLVKDSNTKKAGKTRGPMKTLLVRVMTPDLRERLENLRKKPENIPQPISNTSRANLNKLLTDYTEMKKAILHVYWEEFQKDPVGLMSRVAQPASKKIDQNKLKPEMDEKGNLTTAGFACSQCGQPLFVYKLEQVSEKGKAYTNYFGRCNVAEHEKLIKLAQLKPEKDSDEAVTYSLGKFGQRALDFYSIHVTKESTHPVKPLAQIAGNRYASHPVGKALSDACMGTIASFLSKYQDIIIEHQKVVKGNQKRLESLRELAGKENLEYPSVTLPPQPHTKEGVDAYNEVIARVRMWVNLNLWQKLKLSRDDAKPLLRLKGFPSFPLVERQANEVDWWDMVCNVKKLINEKKEDGKVFWQNLAGYKRQEALRPYLSSEEDRKKGKKFARYQLGDLLLHLEKKHGEDWGKVYDEAWERIDKKVEGLSKHIKLEEERRSEDAQSKAALTDWLRAKASFVIEGLKEADKDEFCRCELKLQKWYGDLRGKPFAIEAENSILDISGFSKQYNCAFIWQKDGVKKLNLYLIINYFKGGKLRFKKIKPEAFEANRFYTVINKKSGEIVPMEVNFNFDDPNLIILPLAFGKRQGREFIWNDLLSLETGSLKLANGRVIEKTLYNRRTRQDEPALFVALTFERREVLDSSNIKPMNLIGVDRGENIPAVIALTDPEGCPLSRFKDSLGNPTHILRIGESYKEKQRTIQAKKEVEQRRAGGYSRKYASKAKNLADDMVRNTARDLLYYAVTQDAMLIFENLSRGFGRQGKRTFMAERQYTRMEDWLTAKLAYEGLPSKTYLSKTLAQYTSKTCSNCGFTITSADYDRVLEKLKKTATGWMTTINGKELKVEGQITYYNRYKRQNVVKDLSVELDRLSEESVNNDISSWTKGRSGEALSLLKKRFSHRPVQEKFVCLNCGFETHADEQAALNIARSWLFLRSQEYKKYQTNKTTGNTDKRAFVETWQSFYRKKLKEVWKPAV

SEQ ID NO: 202 - protein, 978 aa, synthetic construct
QEIKRINKIRRRLVKDSNTKKAGKTGPMKTLLVRVMTPDLRERLENLRKKPENIPQPISNTSRANLNKLLTDYTEMKKAILHVYWEEFQKDPVGLMSRVAQPASKKIDQNKLKPEMDEKGNLTTAGFACSQCGQPLFVYKLEQVSEKGKAYTNYFGRCNVAEHEKLIKLAQLKPEKDSDEAVTYSLGKFGQRALDFYSIHVTKESTHPVKPLAQIAGNRYASHPVGKALSGACMGTIASFLSKYQDIIIEHQKVVKGNQKRLESLRELAGKENLEYPSVTLPPQPHTKEGVDAYNEVIARVRMWVNLNLWQKLKLSRDDAKPLLRLKGFPSFPLVERQANEVDWWDMVCNVKKLINEKKEDGKVFWQNLAGYKRQEALRPYLSSEEDRKKGKKFARYQLGDLLLHLEKKHGEDWGKVYDEAWERIDKKVEGLSKHIKLEEERRSEDAQSKAALTDWLRAKASFVIEGLKEADKDEFCRCELKLQKWYGDLRGKPFAIEAENSILDISGFSKQYNCAFIWQKDGVKKLNLYLIINYFKGGKLRFKKIKPEAFEANRFYTVINKKSGEIVPMEVNFNFDDPNLIILPLAFGKRQGREFIWNDLLSLETGSLKLANGRVIEKTLYNRRTRQDEPALFVALTFERREVLDSSNIKPMNLIGVDRGENIPAVIALTDPEGCPLSRFKDSLGNPTHILRIGESYKEKQRTIQAKKEVEQRRAGGYSRKYASKAKNLADDMVRNTARDLLYYAVTQDAMLIFENLSRGFGRQGKRTFMAERQYTRMEDWLTAKLAYEGLPSKTYLSKTLAQYTSKTCSNCGFTITSADYDRVLEKLKKTATGWMTTINGKELKVEGQITYYNRYKRQNVVKDLSVELDRLSEESVNNDISSWTKGRSGEALSLLKKRFSHRPVQEKFVCLNCGFETHADEQAALNIARSWLFLRSQEYKKYQTNKTTGNTDKRAFVETWQSFYRKKLKEVWKPAV

SEQ ID NO: 203 - protein, 978 aa, synthetic construct
QEIKSINKIRRRLVKDSNTKKAGKTGPMKTLLVRVMTPDLRERLENLRKKPENIPQPISNTSRANLNKLLTDYTEMKKAILHVYWEEFQKDPVGLMSRVAQPASKKIDQNKLKPEMDEKGNLTTAGFACSQCGQPLFVYKLEQVSEKGKAYTNYFGRCNVAEHEKLIKLAQLKPEKDSDEAVTYSLGKFGQRALDFYSIHVTKESTHPVKPLAQIAGNRYASGPVGKALSDACMGTIASFLSKYQDIIIEHQKVVKGNQKRLESLRELAGKENLEYPSVTLPPQPHTKEGVDAYNEVIARVRMWVNLNLWQKLKLSRDDAKPLLRLKGFPSFPLVERQANEVDWWDMVCNVKKLINEKKEDGKVFWQNLAGYKRQEALRPYLSSEEDRKKGKKFARYQLGDLLLHLEKKHGEDWGKVYDEAWERIDKKVEGLSKHIKLEEERRSEDAQSKAALTDWLRAKASFVIEGLKEADKDEFCRCELKLQKWYGDLRGKPFAIEAENSILDISGFSKQYNCAFIWQKDGVKKLNLYLIINYFKGGKLRFKKIKPEAFEANRFYTVINKKSGEIVPMEVNFNFDDPNLIILPLAFGKRQGREFIWNDLLSLETGSLKLANGRVIEKTLYNRRTRQDEPALFVALTFERREVLDSSNIKPMNLIGVDRGENIPAVIALTDPEGCPLSRFKDSLGNPTHILRIGESYKEKQRTIQAKKEVEQRRAGGYSRKYASKAKNLADDMVRNTARDLLYYAVTQDAMLIFENLSRGFGRQGKRTFMAERQYTRMEDWLTAKLAYEGLPSKTYLSKTLAQYTSKTCSNCGFTITSADYDRVLEKLKKTATGWMTTINGKELKVEGQITYYNRYKRQNVVKDLSVELDRLSEESVNNDISSWTKGRSGEALSLLKKRFSHRPVQEKFVCLNCGFETHADEQAALNIARSWLFLRSQEYKKYQTNKTTGNTDKRAFVETWQSFYRKKLKEVWKPAV

SEQ ID NO: 204 - protein, 978 aa, synthetic construct
QEISRINKIRRRLVKDSNTKKAGKTGPMKTLLVRVMTPDLRERLENLRKKPENIPQPISNTSRANLNKLLTDYTEMKKAILHVYWEEFQKDPVGLMSRVAQPASKKIDQNKLKPEMDEKGNLTTAGFACSQCGQPLFVYKLEQVSEKGKAYTNYFGRCNVAEHEKLIKLAQLKPEKDSDEAVTYSLGKFGQRALDFYSIHVTKESTHPVKPLAQIAGNRYASGPVGKALSDACMGTIASFLSKYQDIIIEHQKVVKGNQKRLESLRELAGKENLEYPSVTLPPQPHTKEGVDAYNEVIARVRMWVNLNLWQKLKLSRDDAKPLLRLKGFPSFPLVERQANEVDWWDMVCNVKKLINEKKEDGKVFWQNLAGYKRQEALRPYLSSEEDRKKGKKFARYQLGDLLLHLEKKHGEDWGKVYDEAWERIDKKVEGLSKHIKLEEERRSEDAQSKAALTDWLRAKASFVIEGLKEADKDEFCRCELKLQKWYGDLRGKPFAIEAENSILDISGFSKQYNCAFIWQKDGVKKLNLYLIINYFKGGKLRFKKIKPEAFEANRFYTVINKKSGEIVPMEVNFNFDDPNLIILPLAFGKRQGREFIWNDLLSLETGSLKLANGRVIEKTLYNRRTRQDEPALFVALTFERREVLDSSNIKPMNLIGVDRGENIPAVIALTDPEGCPLSRFKDSLGNPTHILRIGESYKEKQRTIQAKKEVEQRRAGGYSRKYASKAKNLADDMVRNTARDLLYYAVTQDAMLIFENLSRGFGRQGKRTFMAERQYTRMEDWLTAKLAYEGLPSKTYLSKTLAQYTSKTCSNCGFTITSADYDRVLEKLKKTATGWMTTINGKELKVEGQITYYNRYKRQNVVKDLSVELDRLSEESVNNDISSWTKGRSGEALSLLKKRFSHRPVQEKFVCLNCGFETHADEQAALNIARSWLFLRSQEYKKYQTNKTTGNTDKRAFVETWQSFYRKKLKEVWKPAV

SEQ ID NO: 205 - protein, 979 aa, synthetic construct
QEIKSINKIRRRLVKDSNTKKAGKTRGPMKTLLVRVMTPDLRERLENLRKKPENIPQPISNTSRANLNKLLTDYTEMKKAILHVYWEEFQKDPVGLMSRVAQPASKKIDQNKLKPEMDEKGNLTTAGFACSQCGQPLFVYKLEQVSEKGKAYTNYFGRCNVAEHEKLIKLAQLKPEKDSDEAVTYSLGKFGQRALDFYSIHVTKESTHPVKPLAQIAGNRYASSPVGKALSDACMGTIASFLSKYQDIIIEHQKVVKGNQKRLESLRELAGKENLEYPSVTLPPQPHTKEGVDAYNEVIARVRMWVNLNLWQKLKLSRDDAKPLLRLKGFPSFPLVERQANEVDWWDMVCNVKKLINEKKEDGKVFWQNLAGYKRQEALRPYLSSEEDRKKGKKFARYQLGDLLLHLEKKHGEDWGKVYDEAWERIDKKVEGLSKHIKLEEERRSEDAQSKAALTDWLRAKASFVIEGLKEADKDEFCRCELKLQKWYGDLRGKPFAIEAENSILDISGFSKQYNCAFIWQKDGVKKLNLYLIINYFKGGKLRFKKIKPEAFEANRFYTVINKKSGEIVPMEVNFNFDDPNLIILPLAFGKRQGREFIWNDLLSLETGSLKLANGRVIEKTLYNRRTRQDEPALFVALTFERREVLDSSNIKPMNLIGVDRGENIPAVIALTDPEGCPLSRFKDSLGNPTHILRIGESYKEKQRTIQAKKEVEQRRAGGYSRKYASKAKNLADDMVRNTARDLLYYAVTQDAMLIFENLSRGFGRQGKRTFMAERQYTRMEDWLTAKLAYEGLPSKTYLSKTLAQYTSKTCSNCGFTITSADYDRVLEKLKKTATGWMTTINGKELKVEGQITYYNRYKRQNVVKDLSVELDRLSEESVNNDISSWTKGRSGEALSLLKKRFSHRPVQEKFVCLNCGFETHADEQAALNIARSWLFLRSQEYKKYQTNKTTGNTDKRAFVETWQSFYRKKLKEVWKPAV

SEQ ID NO: 206 - protein, 979 aa, synthetic construct
QEISRINKIRRRLVKDSNTKKAGKTRGPMKTLLVRVMTPDLRERLENLRKKPENIPQPISNTSRANLNKLLTDYTEMKKAILHVYWEEFQKDPVGLMSRVAQPASKKIDQNKLKPEMDEKGNLTTAGFACSQCGQPLFVYKLEQVSEKGKAYTNYFGRCNVAEHEKLIKLAQLKPEKDSDEAVTYSLGKFGQRALDFYSIHVTKESTHPVKPLAQIAGNRYASSPVGKALSDACMGTIASFLSKYQDIIIEHQKVVKGNQKRLESLRELAGKENLEYPSVTLPPQPHTKEGVDAYNEVIARVRMWVNLNLWQKLKLSRDDAKPLLRLKGFPSFPLVERQANEVDWWDMVCNVKKLINEKKEDGKVFWQNLAGYKRQEALRPYLSSEEDRKKGKKFARYQLGDLLLHLEKKHGEDWGKVYDEAWERIDKKVEGLSKHIKLEEERRSEDAQSKAALTDWLRAKASFVIEGLKEADKDEFCRCELKLQKWYGDLRGKPFAIEAENSILDISGFSKQYNCAFIWQKDGVKKLNLYLIINYFKGGKLRFKKIKPEAFEANRFYTVINKKSGEIVPMEVNFNFDDPNLIILPLAFGKRQGREFIWNDLLSLETGSLKLANGRVIEKTLYNRRTRQDEPALFVALTFERREVLDSSNIKPMNLIGVDRGENIPAVIALTDPEGCPLSRFKDSLGNPTHILRIGESYKEKQRTIQAKKEVEQRRAGGYSRKYASKAKNLADDMVRNTARDLLYYAVTQDAMLIFENLSRGFGRQGKRTFMAERQYTRMEDWLTAKLAYEGLPSKTYLSKTLAQYTSKTCSNCGFTITSADYDRVLEKLKKTATGWMTTINGKELKVEGQITYYNRYKRQNVVKDLSVELDRLSEESVNNDISSWTKGRSGEALSLLKKRFSHRPVQEKFVCLNCGFETHADEQAALNIARSWLFLRSQEYKKYQTNKTTGNTDKRAFVETWQSFYRKKLKEVWKPAV

SEQ ID NO: 207 - protein, 979 aa, synthetic construct
QEIKSINKIRRRLVKDSNTKKAGKTRGPMKTLLVRVMTPDLRERLENLRKKPENIPQPISNTSRANLNKLLTDYTEMKKAILHVYWEEFQKDPVGLMSRVAQPASKKIDQNKLKPEMDEKGNLTTAGFACSQCGQPLFVYKLEQVSEKGKAYTNYFGRCNVAEHEKLIKLAQLKPEKDSDEAVTYSLGKFGQRALDFYSIHVTKESTHPVKPLAQIAGNRYASSPVGKALSGACMGTIASFLSKYQDIIIEHQKVVKGNQKRLESLRELAGKENLEYPSVTLPPQPHTKEGVDAYNEVIARVRMWVNLNLWQKLKLSRDDAKPLLRLKGFPSFPLVERQANEVDWWDMVCNVKKLINEKKEDGKVFWQNLAGYKRQEALRPYLSSEEDRKKGKKFARYQLGDLLLHLEKKHGEDWGKVYDEAWERIDKKVEGLSKHIKLEEERRSEDAQSKAALTDWLRAKASFVIEGLKEADKDEFCRCELKLQKWYGDLRGKPFAIEAENSILDISGFSKQYNCAFIWQKDGVKKLNLYLIINYFKGGKLRFKKIKPEAFEANRFYTVINKKSGEIVPMEVNFNFDDPNLIILPLAFGKRQGREFIWNDLLSLETGSLKLANGRVIEKTLYNRRTRQDEPALFVALTFERREVLDSSNIKPMNLIGVDRGENIPAVIALTDPEGCPLSRFKDSLGNPTHILRIGESYKEKQRTIQAKKEVEQRRAGGYSRKYASKAKNLADDMVRNTARDLLYYAVTQDAMLIFENLSRGFGRQGKRTFMAERQYTRMEDWLTAKLAYEGLPSKTYLSKTLAQYTSKTCSNCGFTITSADYDRVLEKLKKTATGWMTTINGKELKVEGQITYYNRYKRQNVVKDLSVELDRLSEESVNNDISSWTKGRSGEALSLLKKRFSHRPVQEKFVCLNCGFETHADEQAALNIARSWLFLRSQEYKKYQTNKTTGNTDKRAFVETWQSFYRKKLKEVWKPAV

SEQ ID NO: 208 - protein, 979 aa, synthetic construct
QEISRINKIRRRLVKDSNTKKAGKTRGPMKTLLVRVMTPDLRERLENLRKKPENIPQPISNTSRANLNKLLTDYTEMKKAILHVYWEEFQKDPVGLMSRVAQPASKKIDQNKLKPEMDEKGNLTTAGFACSQCGQPLFVYKLEQVSEKGKAYTNYFGRCNVAEHEKLIKLAQLKPEKDSDEAVTYSLGKFGQRALDFYSIHVTKESTHPVKPLAQIAGNRYASSPVGKALSGACMGTIASFLSKYQDIIIEHQKVVKGNQKRLESLRELAGKENLEYPSVTLPPQPHTKEGVDAYNEVIARVRMWVNLNLWQKLKLSRDDAKPLLRLKGFPSFPLVERQANEVDWWDMVCNVKKLINEKKEDGKVFWQNLAGYKRQEALRPYLSSEEDRKKGKKFARYQLGDLLLHLEKKHGEDWGKVYDEAWERIDKKVEGLSKHIKLEEERRSEDAQSKAALTDWLRAKASFVIEGLKEADKDEFCRCELKLQKWYGDLRGKPFAIEAENSILDISGFSKQYNCAFIWQKDGVKKLNLYLIINYFKGGKLRFKKIKPEAFEANRFYTVINKKSGEIVPMEVNFNFDDPNLIILPLAFGKRQGREFIWNDLLSLETGSLKLANGRVIEKTLYNRRTRQDEPALFVALTFERREVLDSSNIKPMNLIGVDRGENIPAVIALTDPEGCPLSRFKDSLGNPTHILRIGESYKEKQRTIQAKKEVEQRRAGGYSRKYASKAKNLADDMVRNTARDLLYYAVTQDAMLIFENLSRGFGRQGKRTFMAERQYTRMEDWLTAKLAYEGLPSKTYLSKTLAQYTSKTCSNCGFTITSADYDRVLEKLKKTATGWMTTINGKELKVEGQITYYNRYKRQNVVKDLSVELDRLSEESVNNDISSWTKGRSGEALSLLKKRFSHRPVQEKFVCLNCGFETHADEQAALNIARSWLFLRSQEYKKYQTNKTTGNTDKRAFVETWQSFYRKKLKEVWKPAV

SEQ ID NO: 209 - protein, 979 aa, synthetic construct
QEIKRINKIRRRLVKDSNTKKAGKTGPMKTLLVRVMTPDLRERLENLRKKPENIPQPISNTSRANLNKLLTDYTEMKKAILHVYWEEFQKDPVGLMSRVAQPASKKIDQNKLKPEMDEKGNLTTAGFACSQCGQPLFVYKLEQVSEKGKAYTNYFGRCNVAEHEKLILLAQLKPEKDSDEAVTYSLGKFGQRALDFYSIHVTKESTHPVKPLAQIAGNRYASGPVGKALSDACMGTIASFLSKYQDIIIEHQKVVKGNQKRLESLRELAGKENLEYPSVTLPPQPHTKEGVDAYNEVIARVRMWVNLNLWQKLKLSRDDAKPLLRLKGFPSFPLVERQANEVDWWDMVCNVKKLINEKKEDGKVFWQNLAGYKRQEALRPYLSSEEDRKKGKKFARYQLGDLLLHLEKKHGEDWGKVYDEAWERIDKKVEGLSKHIKLEEERRSEDAQSKAALTDWLRAKASFVIEGLKEADKDEFCRCELKLQKWYGDLRGKPFAIEAENSILDISGFSKQYNCAFIWQKDGVKKLNLYLIINYFKGGKLRFKKIKPEAFEANRFYTVINKKSGEIVPMEVNFNFDDPNLIILPLAFGKRQGREFIWNDLLSLETGSLKLANGRVIEKTLYNARRTRQDEPALFVALTFERREVLDSSNIKPMNLIGVDRGENIPAVIALTDPEGCPLSRFKDSLGNPTHILRIGESYKEKQRTIQAKKEVEQRRAGGYSRKYASKAKNLADDMVRNTARDLLYYAVTQDAMLIFENLSRGFGRQGKRTFMAERQYTRMEDWLTAKLAYEGLPSKTYLSKTLAQYTSKTCSNCGFTITSADYDRVLEKLKKTATGWMTTINGKELKVEGQITYYNRYKRQNVVKDLSVELDRLSEESVNNDISSWTKGRSGEALSLLKKRFSHRPVQEKFVCLNCGFETHADEQAALNIARSWLFLRSQEYKKYQTNKTTGNTDKRAFVETWQSFYRKKLKEVWKPAV

SEQ ID NO: 210 - protein, 978 aa, synthetic construct
QEIKRINKIRRRLVKDSNTKKAGKTGPMKTLLVRVMTPDLRERLENLRKKPENIPQPISNTSRANLNKLLTDYTEMKKAILHVYWEEFQVDPVGLMSRVAQPASKKIDQNKLKPEMDEKGNLTTAGFACSQCGQPLFVYKLEQVSEKGKAYTNYFGRCNVAEHEKLILLAQLKPEKDSDEAVTYSLGKFGQRALDFYSIHVTKESTHPVKPLAQIAGNRYASGPVGKALSDACMGTIASFLSKYQDIIIEHQKVVKGNQKRLESLRELAGKENLEYPSVTLPPQPHTKEGVDAYNEVIARVRMWVNLNLWQKLKLSRDDAKPLLRLKGFPSFPLVERQANEVDWWDMVCNVKKLINEKKEDGKVFWQNLAGYKRQEALRPYLSSEEDRKKGKKFARYQLGDLLLHLEKKHGEDWGKVYDEAWERIDKKVEGLSKHIKLEEERRSEDAQSKAALTDWLRAKASFVIEGLKEADKDEFCRCELKLQKWYGDLRGKPFAIEAENSILDISGFSKQYNCAFIWQKDGVKKLNLYLIINYFKGGKLRFKKIKPEAFEANRFYTVINKKSGEIVPMEVNFNFDDPNLIILPLAFGKRQGREFIWNDLLSLETGSLKLANGRVIEKTLYNRRTRQDEPALFVALTFERREVLDSSNIKPMNLIGVDRGENIPAVIALTDPEGCPLSRFKDSLGNPTHILRIGESYKEKQRTIQAKKEVEQRRAGGYSRKYASKAKNLADDMVRNTARDLLYYAVTQDAMLIFENLSRGFGRQGKRTFMAERQYTRMEDWLTAKLAYEGLPSKTYLSKTLAQYTSKTCSNCGFTITSADYDRVLEKLKKTATGWMTTINGKELKVEGQITYYNRYKRQNVVKDLSVELDRLSEESVNNDISSWTKGRSGEALSLLKKRFSHRPVQEKFVCLNCGFETHADEQAALNIARSWLFLRSQEYKKYQTNKTTGNTDKRAFVETWQSFYRKKLKEVWKPAV

SEQ ID NO: 211 - protein, 979 aa, synthetic construct
QEIKRINKIRRRLVKDSNTKKAGKTGPMKTLLVRVMTPDLRERLENLRKKPENIPQPISNTSRANLNKLLTDYTEMKKAILHVYWEGEFQKDPVGLMSRVAQPASKKIDQNKLKPEMDEKGNLTTAGFACSQCGQPLFVYKLEQVSEKGKAYTNYFGRCNVAEHEKLILLAQLKPEKDSDEAVTYSLGKFGQRALDFYSIHVTKESTHPVKPLAQIAGNRYASGPVGKALSDACMGTIASFLSKYQDIIIEHQKVVKGNQKRLESLRELAGKENLEYPSVTLPPQPHTKEGVDAYNEVIARVRMWVNLNLWQKLKLSRDDAKPLLRLKGFPSFPLVERQANEVDWWDMVCNVKKLINEKKEDGKVFWQNLAGYKRQEALRPYLSSEEDRKKGKKFARYQLGDLLLHLEKKHGEDWGKVYDEAWERIDKKVEGLSKHIKLEEERRSEDAQSKAALTDWLRAKASFVIEGLKEADKDEFCRCELKLQKWYGDLRGKPFAIEAENSILDISGFSKQYNCAFIWQKDGVKKLNLYLIINYFKGGKLRFKKIKPEAFEANRFYTVINKKSGEIVPMEVNFNFDDPNLIILPLAFGKRQGREFIWNDLLSLETGSLKLANGRVIEKTLYNRRTRQDEPALFVALTFERREVLDSSNIKPMNLIGVDRGENIPAVIALTDPEGCPLSRFKDSLGNPTHILRIGESYKEKQRTIQAKKEVEQRRAGGYSRKYASKAKNLADDMVRNTARDLLYYAVTQDAMLIFENLSRGFGRQGKRTFMAERQYTRMEDWLTAKLAYEGLPSKTYLSKTLAQYTSKTCSNCGFTITSADYDRVLEKLKKTATGWMTTINGKELKVEGQITYYNRYKRQNVVKDLSVELDRLSEESVNNDISSWTKGRSGEALSLLKKRFSHRPVQEKFVCLNCGFETHADEQAALNIARSWLFLRSQEYKKYQTNKTTGNTDKRAFVETWQSFYRKKLKEVWKPAV

SEQ ID NO: 212 - protein, 978 aa, synthetic construct
QEIKRINKIRRRLVKDSNTKKAGKTGPMKTLLVRVMTPDLRERLENLRKKPENIPQPISNTSRANLNKLLTDYTEMKKAILHVYWEEFQKDPVGLMSRVAQPASKKIDQNKLKPEMDEKGNLTTAGFACSQCGQPLFVYKLEQVSEKGKAYTNYFGRCNVAEHEKLILLAQLKPEKDSDEAVTYSLGKFGQRALDFYSIHVTKESTHPVKPLAQIAGNRYASGPVGKALSDACMGTIASFLSKYQDIIIEHQKVVKGNQKRLEHLRELAGKENLEYPSVTLPPQPHTKEGVDAYNEVIARVRMWVNLNLWQKLKLSRDDAKPLLRLKGFPSFPLVERQANEVDWWDMVCNVKKLINEKKEDGKVFWQNLAGYKRQEALRPYLSSEEDRKKGKKFARYQLGDLLLHLEKKHGEDWGKVYDEAWERIDKKVEGLSKHIKLEEERRSEDAQSKAALTDWLRAKASFVIEGLKEADKDEFCRCELKLQKWYGDLRGKPFAIEAENSILDISGFSKQYNCAFIWQKDGVKKLNLYLIINYFKGGKLRFKKIKPEAFEANRFYTVINKKSGEIVPMEVNFNFDDPNLIILPLAFGKRQGREFIWNDLLSLETGSLKLANGRVIEKTLYNRRTRQDEPALFVALTFERREVLDSSNIKPMNLIGVDRGENIPAVIALTDPEGCPLSRFKDSLGNPTHILRIGESYKEKQRTIQAKKEVEQRRAGGYSRKYASKAKNLADDMVRNTARDLLYYAVTQDAMLIFENLSRGFGRQGKRTFMAERQYTRMEDWLTAKLAYEGLPSKTYLSKTLAQYTSKTCSNCGFTITSADYDRVLEKLKKTATGWMTTINGKELKVEGQITYYNRYKRQNVVKDLSVELDRLSEESVNNDISSWTKGRSGEALSLLKKRFSHRPVQEKFVCLNCGFETHADEQAALNIARSWLFLRSQEYKKYQTNKTTGNTDKRAFVETWQSFYRKKLKEVWKPAV

SEQ ID NO: 213 - protein, 979 aa, synthetic construct
QEIKRINKIRRRLVKDSNTKKAGKTGPMKTLLVRVMTPDLRERLENLRKKPENIPQPISNTSRANLNKLLTDYTEMKKAILHVYWEEFQKDPVGLMSRVAQPASKKIDQNKLKPEMDEKGNLTTAGFACSQCGQPLFVYKLEQVSEKGKAYTNYFGRCNVAEHEKLILLAQLKPEKDSDEAVTYSLGKFGQRALDFYSIHVTKESTHPVKPLAQICAGNRYASGPVGKALSDACMGTIASFLSKYQDIIIEHQKVVKGNQKRLESLRELAGKENLEYPSVTLPPQPHTKEGVDAYNEVIARVRMWVNLNLWQKLKLSRDDAKPLLRLKGFPSFPLVERQANEVDWWDMVCNVKKLINEKKEDGKVFWQNLAGYKRQEALRPYLSSEEDRKKGKKFARYQLGDLLLHLEKKHGEDWGKVYDEAWERIDKKVEGLSKHIKLEEERRSEDAQSKAALTDWLRAKASFVIEGLKEADKDEFCRCELKLQKWYGDLRGKPFAIEAENSILDISGFSKQYNCAFIWQKDGVKKLNLYLIINYFKGGKLRFKKIKPEAFEANRFYTVINKKSGEIVPMEVNFNFDDPNLIILPLAFGKRQGREFIWNDLLSLETGSLKLANGRVIEKTLYNRRTRQDEPALFVALTFERREVLDSSNIKPMNLIGVDRGENIPAVIALTDPEGCPLSRFKDSLGNPTHILRIGESYKEKQRTIQAKKEVEQRRAGGYSRKYASKAKNLADDMVRNTARDLLYYAVTQDAMLIFENLSRGFGRQGKRTFMAERQYTRMEDWLTAKLAYEGLPSKTYLSKTLAQYTSKTCSNCGFTITSADYDRVLEKLKKTATGWMTTINGKELKVEGQITYYNRYKRQNVVKDLSVELDRLSEESVNNDISSWTKGRSGEALSLLKKRFSHRPVQEKFVCLNCGFETHADEQAALNIARSWLFLRSQEYKKYQTNKTTGNTDKRAFVETWQSFYRKKLKEVWKPAV

SEQ ID NO: 214 - protein, 976 aa, synthetic construct
QEIKRINKIRRRLVKDSNTKKAGKTGPMKTLLVRVMTPDLRERLENLRKKPENIPQPISNTSRANLNKLLTDYTEMKKAILHVYWEEFQKDPVGLMSRVAQPASKKIDQNKLKPEMDEKGNLTTAGFACSQCGQPLFVYKLEQVSEKGKAYTNYFGRCNVAEHEKLILLAQLKPEKDSDEAVTYSLGKFGQRALDFYSIHVTKESTHPVKPLAQIAGNRYASGPVGKALSDACMGTIASFLSKYQDIIIEHQKVVKGNQKRLESLRELAGKENLEYPSVTLPPQPHTKEGVDAYNEVIARVRMWVNLNLWQKLKLSRDDAKPLLRLKGFPSFPLVERQANEVDWWVCNVKKLINEKKEDGKVFWQNLAGYKRQEALRPYLSSEEDRKKGKKFARYQLGDLLLHLEKKHGEDWGKVYDEAWERIDKKVEGLSKHIKLEEERRSEDAQSKAALTDWLRAKASFVIEGLKEADKDEFCRCELKLQKWYGDLRGKPFAIEAENSILDISGFSKQYNCAFIWQKDGVKKLNLYLIINYFKGGKLRFKKIKPEAFEANRFYTVINKKSGEIVPMEVNFNFDDPNLIILPLAFGKRQGREFIWNDLLSLETGSLKLANGRVIEKTLYNRRTRQDEPALFVALTFERREVLDSSNIKPMNLIGVDRGENIPAVIALTDPEGCPLSRFKDSLGNPTHILRIGESYKEKQRTIQAKKEVEQRRAGGYSRKYASKAKNLADDMVRNTARDLLYYAVTQDAMLIFENLSRGFGRQGKRTFMAERQYTRMEDWLTAKLAYEGLPSKTYLSKTLAQYTSKTCSNCGFTITSADYDRVLEKLKKTATGWMTTINGKELKVEGQITYYNRYKRQNVVKDLSVELDRLSEESVNNDISSWTKGRSGEALSLLKKRFSHRPVQEKFVCLNCGFETHADEQAALNIARSWLFLRSQEYKKYQTNKTTGNTDKRAFVETWQSFYRKKLKEVWKPAV

SEQ ID NO: 215 - protein, 978 aa, synthetic construct
QEIKRINKIRRRLVKDSNTKKAGKTGPMKTLLVRVMTPDLRERLENLRKKPENIPQPISNTSRANLNKLLTDYTEMKKAILHVYWEEFQKDPVGLMSRVAQPASKKIDQNKLKPEMDEKGNLTTAGFACSQCGQPLFVYKLEQVSEKGKAYTNYFGRCNVAEHEKLILLAQLKPEKDSDEAVTYSLGKFGQRALDFYSIHVTKESTHPVKPLAQIAGNRYASGPVGKALSDACMGTIASFLSKYQDIIIEHQKVVKGNQKRLESLRELAGKENLEYPSVTLPPQPHTKEGVDAYNEVIARVRMWVNLNLWQKLKLSRDDAKPLLRLKGFPSFPLVERQANEVDWWDMVCNVKKLINEKKEDGKVFWQNLAGYKRQEALRPYLSSEEDRKKGKKFARYQLGDLLLHLEKKHGEDWGKVYDEAWERIDKKVEGLSKHIKLEEERRSEDAQSKAALTDWLRAKASFVIEGLKEADKDEFCRCELKLQKWYGDLRGKPFAIEAENSILDISGFSKQYNCAFIWQKDGVKKLNLYLIINYFGGGKLRFKKIKPEAFEANRFYTVINKKSGEIVPMEVNFNFDDPNLIILPLAFGKRQGREFIWNDLLSLETGSLKLANGRVIEKTLYNRRTRQDEPALFVALTFERREVLDSSNIKPMNLIGVDRGENIPAVIALTDPEGCPLSRFKDSLGNPTHILRIGESYKEKQRTIQAKKEVEQRRAGGYSRKYASKAKNLADDMVRNTARDLLYYAVTQDAMLIFENLSRGFGRQGKRTFMAERQYTRMEDWLTAKLAYEGLPSKTYLSKTLAQYTSKTCSNCGFTITSADYDRVLEKLKKTATGWMTTINGKELKVEGQITYYNRYKRQNVVKDLSVELDRLSEESVNNDISSWTKGRSGEALSLLKKRFSHRPVQEKFVCLNCGFETHADEQAALNIARSWLFLRSQEYKKYQTNKTTGNTDKRAFVETWQSFYRKKLKEVWKPAV

SEQ ID NO: 216 - protein, 979 aa, synthetic construct
QEIKRINKIRRRLVKDSNTKKAGKTGPMKTLLVRVMTPDLRERLENLRKKPENIPQPISNTSRANLNKLLTDYTEMKKAILHVYWEEFQKDPVGLMSRVAQPASKKIDQNKLKPEMDEKGNLTTAGFACSQCGQPLFVYKLEQVSEKGKAYTNYFGRCNVAEHEKLILLAQLKPEKDSDEAVTYSLGKFGQRALDFYSIHVTKESTHPVKPLAQIAGNRYASGPVGKALSDACMGTIASFLSKYQDIIIEHQKVVKGNQKRLESLRELAGKENLEYPSVTLPPQPHTKEGVDAYNEVIARVRMWVNLNLWQKLKLSRDDAKPLLRLKGFPSFPLVERQANEVDWWDMVCNVKKLINEKKEDGKVFWQNLAGYKRQEALRPYLSSEEDRKKGKKFARYQLGDLLLHLEKKHGEDWGKLVYDEAWERIDKKVEGLSKHIKLEEERRSEDAQSKAALTDWLRAKASFVIEGLKEADKDEFCRCELKLQKWYGDLRGKPFAIEAENSILDISGFSKQYNCAFIWQKDGVKKLNLYLIINYFKGGKLRFKKIKPEAFEANRFYTVINKKSGEIVPMEVNFNFDDPNLIILPLAFGKRQGREFIWNDLLSLETGSLKLANGRVIEKTLYNRRTRQDEPALFVALTFERREVLDSSNIKPMNLIGVDRGENIPAVIALTDPEGCPLSRFKDSLGNPTHILRIGESYKEKQRTIQAKKEVEQRRAGGYSRKYASKAKNLADDMVRNTARDLLYYAVTQDAMLIFENLSRGFGRQGKRTFMAERQYTRMEDWLTAKLAYEGLPSKTYLSKTLAQYTSKTCSNCGFTITSADYDRVLEKLKKTATGWMTTINGKELKVEGQITYYNRYKRQNVVKDLSVELDRLSEESVNNDISSWTKGRSGEALSLLKKRFSHRPVQEKFVCLNCGFETHADEQAALNIARSWLFLRSQEYKKYQTNKTTGNTDKRAFVETWQSFYRKKLKEVWKPAV

SEQ ID NO: 217 - protein, 979 aa, synthetic construct
QEIKRINKIRRRLVKDSNTKKAGKTGPMKTLLVRVMTPDLRERLENLRKKPENIPQPISNTSRANLNKLLTDYTEMKKAILHVYWEEFQKDPVGLMSRVAQPASKKIDQNKLKPEMDEKGNLTTAGFACSQCGQPLFVYKLEQVSEKGKAYTNYFGRCNVAEHEKLILLAQLKPEKDSDEAVTYSLGKFGQRALDFYSIHVTKESTHPVKPLAQIAGNRYASGPVGKALSDACMGTIASFLSKYQDIIIEHQKVVKGNQKRLESLRELAGKENLEYPSVTLPPQPHTKEGVDAYNEVIARVRMWVNLNLWQKLKLSRDDAKPLLRLKGQFPSFPLVERQANEVDWWDMVCNVKKLINEKKEDGKVFWQNLAGYKRQEALRPYLSSEEDRKKGKKFARYQLGDLLLHLEKKHGEDWGKVYDEAWERIDKKVEGLSKHIKLEEERRSEDAQSKAALTDWLRAKASFVIEGLKEADKDEFCRCELKLQKWYGDLRGKPFAIEAENSILDISGFSKQYNCAFIWQKDGVKKLNLYLIINYFKGGKLRFKKIKPEAFEANRFYTVINKKSGEIVPMEVNFNFDDPNLIILPLAFGKRQGREFIWNDLLSLETGSLKLANGRVIEKTLYNRRTRQDEPALFVALTFERREVLDSSNIKPMNLIGVDRGENIPAVIALTDPEGCPLSRFKDSLGNPTHILRIGESYKEKQRTIQAKKEVEQRRAGGYSRKYASKAKNLADDMVRNTARDLLYYAVTQDAMLIFENLSRGFGRQGKRTFMAERQYTRMEDWLTAKLAYEGLPSKTYLSKTLAQYTSKTCSNCGFTITSADYDRVLEKLKKTATGWMTTINGKELKVEGQITYYNRYKRQNVVKDLSVELDRLSEESVNNDISSWTKGRSGEALSLLKKRFSHRPVQEKFVCLNCGFETHADEQAALNIARSWLFLRSQEYKKYQTNKTTGNTDKRAFVETWQSFYRKKLKEVWKPAV

SEQ ID NO: 218 - protein, 978 aa, synthetic construct
QEIKRINKIRRRLVKDSNTKKAGKTGPMKTLLVRVMTPDLRERLENLRKKPENIPQPISNTSRANLNKLLTDYTEMKKAILHVYWEEFQKDPVGLMSRVAQPASKKIDQNKLKPEMDEKGNLTTAGFACSQCGQPLFVYKLEQVSEKGKAYTNYFGRCNVAEHEKLILLAQLKPEKDSDEAVTYSLGKFGQRALDFYSIHVTKESTHPVKPLAQIAGNRYASGPVGKALSDACMGTIASFLSKYQDIIIEHQKVVKGNQKRLESLRELAGKENLEYPSVTLPPQPHTKEGVDAYNEVIARVRMWVNLNLWQKLKLSRDDAKPLLRLKGFPSFPLVERQANEVSWWDMVCNVKKLINEKKEDGKVFWQNLAGYKRQEALRPYLSSEEDRKKGKKFARYQLGDLLLHLEKKHGEDWGKVYDEAWERIDKKVEGLSKHIKLEEERRSEDAQSKAALTDWLRAKASFVIEGLKEADKDEFCRCELKLQKWYGDLRGKPFAIEAENSILDISGFSKQYNCAFIWQKDGVKKLNLYLIINYFKGGKLRFKKIKPEAFEANRFYTVINKKSGEIVPMEVNFNFDDPNLIILPLAFGKRQGREFIWNDLLSLETGSLKLANGRVIEKTLYNRRTRQDEPALFVALTFERREVLDSSNIKPMNLIGVDRGENIPAVIALTDPEGCPLSRFKDSLGNPTHILRIGESYKEKQRTIQAKKEVEQRRAGGYSRKYASKAKNLADDMVRNTARDLLYYAVTQDAMLIFENLSRGFGRQGKRTFMAERQYTRMEDWLTAKLAYEGLPSKTYLSKTLAQYTSKTCSNCGFTITSADYDRVLEKLKKTATGWMTTINGKELKVEGQITYYNRYKRQNVVKDLSVELDRLSEESVNNDISSWTKGRSGEALSLLKKRFSHRPVQEKFVCLNCGFETHADEQAALNIARSWLFLRSQEYKKYQTNKTTGNTDKRAFVETWQSFYRKKLKEVWKPAV

SEQ ID NO: 219 - protein, 978 aa, synthetic construct
QEIKRINKIRRRLVKDSNTKKAGKTGPMKTLLVRVMTPDLRERLENLRKKPENIPQPISNTSRANLNKLLTDYTEMKKAILHVYWEEFQKDPVGLMSRVAQPASKKIDQNKLKPEMDEKGNLTTAGFACSQCGQPLFVYKLEQVSEKGKAYTNYFGRCNVAEHEKLILLAQLKPEKDSDEAVTYSLGKFGQRALDFYSIHVTKESTHPVKPLAQIAGNRYASGPVGKALSDACMGTIASFLSKYQDIIIEHQKVVKGNQKRLESLRELAGKENLEYPSVTLPPQPHTKEGVDAYNEVIARVRMWVNLNLWQKLKLSRDDAKPLLRLKGFPSFPLVERQANEVDWWDMVCNVKKLINEKKEDGKVFWQNLAGYKRQEALRPYLSSEEDRKKGKKFARYQLGDLLLHLEKKHGEDWGKVYDEAWERIDKKVEGLSKHIKLEEERRSEDAQSKAALTDWLREKASFVIEGLKEADKDEFCRCELKLQKWYGDLRGKPFAIEAENSILDISGFSKQYNCAFIWQKDGVKKLNLYLIINYFKGGKLRFKKIKPEAFEANRFYTVINKKSGEIVPMEVNFNFDDPNLIILPLAFGKRQGREFIWNDLLSLETGSLKLANGRVIEKTLYNRRTRQDEPALFVALTFERREVLDSSNIKPMNLIGVDRGENIPAVIALTDPEGCPLSRFKDSLGNPTHILRIGESYKEKQRTIQAKKEVEQRRAGGYSRKYASKAKNLADDMVRNTARDLLYYAVTQDAMLIFENLSRGFGRQGKRTFMAERQYTRMEDWLTAKLAYEGLPSKTYLSKTLAQYTSKTCSNCGFTITSADYDRVLEKLKKTATGWMTTINGKELKVEGQITYYNRYKRQNVVKDLSVELDRLSEESVNNDISSWTKGRSGEALSLLKKRFSHRPVQEKFVCLNCGFETHADEQAALNIARSWLFLRSQEYKKYQTNKTTGNTDKRAFVETWQSFYRKKLKEVWKPAV

SEQ ID NO: 220 - protein, 978 aa, synthetic construct
QEIKRINKIRRRLVKDSNTKKAGKTGPMKTLLVRVMTPDLRERLENLRKKPENIPQPISNTSRANLNKLLTDYTEMKKAILHVYWEEFQKDPVGLMSRVAQPASKKIDQNKLKPEMDEKGNLTTAGFACSQCGQPLFVYKLEQVSEKGKAYTNYFGRCNVAEHEKLILLAQLKPEKDSDEAVTYSLGKFGQRALDFYSIHVTKESTHPVKPLAQIAGNRYASGPVGKALSDACMGTIASFLSKYQDIIIEHQKVVKGNQKRLESLRELAGKENLEYPSVTLPPQPHTKEGVDAYNEVIARVRMWVNLNLWQKLKLSRDDAKPLLRLKGFPSFPLVERQANEVDWWDMVCNVKKLINEKKEDGKVFWQNLAGYKRQEALRPYLSSEEDRKKGKKFARYQLGDLLLHLEKKHGEDWGKVYDEAWERIDKKVEGLSKHIKLEEERRSEDAQSKAALTDWLRAKASFVIEGLKEADKDEFCRCELKLQKWYGDLRGKPFAIEAENSILDISGFSKQYNCAFIWQKDGVKKLNLYLIINYFKGGKLRFKKIKPEAFEANRFYTVINKKSGEIVPMEVNFNFDDPNLIILPLAFGKRQGREFIWNDLLSLETGSLKLANGRVIEKTTYNRRTRQDEPALFVALTFERREVLDSSNIKPMNLIGVDRGENIPAVIALTDPEGCPLSRFKDSLGNPTHILRIGESYKEKQRTIQAKKEVEQRRAGGYSRKYASKAKNLADDMVRNTARDLLYYAVTQDAMLIFENLSRGFGRQGKRTFMAERQYTRMEDWLTAKLAYEGLPSKTYLSKTLAQYTSKTCSNCGFTITSADYDRVLEKLKKTATGWMTTINGKELKVEGQITYYNRYKRQNVVKDLSVELDRLSEESVNNDISSWTKGRSGEALSLLKKRFSHRPVQEKFVCLNCGFETHADEQAALNIARSWLFLRSQEYKKYQTNKTTGNTDKRAFVETWQSFYRKKLKEVWKPAV

SEQ ID NO: 221 - protein, 978 aa, synthetic construct
QEIKRINKIRRRLVKDSNTKKAGKTGPMKTLLVRVMTPDLRERLENLRKKPENIPQPISNTSRANLNKLLTDYTEMKKAILHVYWEEFQKDPVGLMSRVAQPASKKIDQNKLKPEMDEKGNLTTAGFACSQCGQPLFVYKLEQVSEKGKAYTNYFGRCNVAEHEKLILLAQLKPEKDSDEAVTYSLGKFGQRALDFYSIHVTKESTHPVKPLAQIAGNRYASGPVGKALSDACMGTIASFLSKYQDIIIEHQKVVKGNQKRLESLRELAGKENLEYPSVTLPPQPHTKEGVDAYNEVIARVRMWVNLNLWQKLKLSRDDAKPLLRLKGFPSFPLVERQANEVDWWDMVCNVKKLINEKKEDGKVFWQNLAGYKRQEANRPYLSSEEDRKKGKKFARYQLGDLLLHLEKKHGEDWGKVYDEAWERIDKKVEGLSKHIKLEEERRSEDAQSKAALTDWLRAKASFVIEGLKEADKDEFCRCELKLQKWYGDLRGKPFAIEAENSILDISGFSKQYNCAFIWQKDGVKKLNLYLIINYFKGGKLRFKKIKPEAFEANRFYTVINKKSGEIVPMEVNFNFDDPNLIILPLAFGKRQGREFIWNDLLSLETGSLKLANGRVIEKTLYNRRTRQDEPALFVALTFERREVLDSSNIKPMNLIGVDRGENIPAVIALTDPEGCPLSRFKDSLGNPTHILRIGESYKEKQRTIQAKKEVEQRRAGGYSRKYASKAKNLADDMVRNTARDLLYYAVTQDAMLIFENLSRGFGRQGKRTFMAERQYTRMEDWLTAKLAYEGLPSKTYLSKTLAQYTSKTCSNCGFTITSADYDRVLEKLKKTATGWMTTINGKELKVEGQITYYNRYKRQNVVKDLSVELDRLSEESVNNDISSWTKGRSGEALSLLKKRFSHRPVQEKFVCLNCGFETHADEQAALNIARSWLFLRSQEYKKYQTNKTTGNTDKRAFVETWQSFYRKKLKEVWKPAV

SEQ ID NO: 222 - protein, 978 aa, synthetic construct
QEIKRINKIRRRLVKDSNTKKAGKTGPMKTLLVRVMTPDLRERLENLRKKPENIPQPISNTSRANLNKLLTDYTEMKKAILHVYWEEFQKDPVGLMSRVAQPASKKIDQNKLKPEMDEKGNLTTAGFACSQCGQPLFVYKLEQVSEKGKAYTNYFGRCNVAEHEKLILLAQLKPEKDSDEAVTYSLGKFGQRALDFYSIHVTKESTHPVKPLAQIAGNRYASGPVGKALSDACMGTIASFLSKYQDIIIEHQKVVKGNQKRLESLRELAGKENLEYPSVTLPPQPHTKEGVDAYNEVIARVRMWVNLNLWQKLKLSRDDAKPLLRLKGFPSFPLVERQANEVDWWDMVCNVKKLINEKKEDGKVFWQNLAGYKRQEALRPYLSSEEDRKKGKKFARYQLGDLLLHLEKKHGEDWGKVYDEAWERIDKKVEGLSKHIKLEELRRSEDAQSKAALTDWLRAKASFVIEGLKEADKDEFCRCELKLQKWYGDLRGKPFAIEAENSILDISGFSKQYNCAFIWQKDGVKKLNLYLIINYFKGGKLRFKKIKPEAFEANRFYTVINKKSGEIVPMEVNFNFDDPNLIILPLAFGKRQGREFIWNDLLSLETGSLKLANGRVIEKTLYNRRTRQDEPALFVALTFERREVLDSSNIKPMNLIGVDRGENIPAVIALTDPEGCPLSRFKDSLGNPTHILRIGESYKEKQRTIQAKKEVEQRRAGGYSRKYASKAKNLADDMVRNTARDLLYYAVTQDAMLIFENLSRGFGRQGKRTFMAERQYTRMEDWLTAKLAYEGLPSKTYLSKTLAQYTSKTCSNCGFTITSADYDRVLEKLKKTATGWMTTINGKELKVEGQITYYNRYKRQNVVKDLSVELDRLSEESVNNDISSWTKGRSGEALSLLKKRFSHRPVQEKFVCLNCGFETHADEQAALNIARSWLFLRSQEYKKYQTNKTTGNTDKRAFVETWQSFYRKKLKEVWKPAV

SEQ ID NO: 223 - protein, 976 aa, synthetic construct
QEIKRINKIRRRLVKDSNTKKAGKTGPMKTLLVRVMTPDLRERLENLRKKPENIPQPISNTSRANLNKLLTDYTEMKKAILHVYWEEFQKDPVGLMSRVAQPASKKIDQNKLKPEMDEKGNLTTAGFACSQCGQPLFVYKLEQVSEKGKAYTNYFGRCNVAEHEKLILLAQLKPEKDSDEAVTYSLGKFGQRALDFYSIHVTKESTHPVKPLAQIAGNRYASGPVGKALSDACMGTIASFLSKYQDIIIEHQKVVKGNQKRLESLRELAGKENLEYPSVTLPPQPHTKEGVDAYNEVIARVRMWVNLNLWQKLKLSRDDAKPLLRLKGFPSFPLVERQANEVDWWDMVCNVKKLINEKKEDGKVFWQNLAGYKRQEALRPYLSSEEDRKKGKKFARYQLGDLLLHLEKKHGEDWGKVYDEAWERIDKKVEGLSKHIKLEEERRSEDAQSKAALTDWLRAKASFVIEGLKEADKDERCELKLQKWYGDLRGKPFAIEAENSILDISGFSKQYNCAFIWQKDGVKKLNLYLIINYFKGGKLRFKKIKPEAFEANRFYTVINKKSGEIVPMEVNFNFDDPNLIILPLAFGKRQGREFIWNDLLSLETGSLKLANGRVIEKTLYNRRTRQDEPALFVALTFERREVLDSSNIKPMNLIGVDRGENIPAVIALTDPEGCPLSRFKDSLGNPTHILRIGESYKEKQRTIQAKKEVEQRRAGGYSRKYASKAKNLADDMVRNTARDLLYYAVTQDAMLIFENLSRGFGRQGKRTFMAERQYTRMEDWLTAKLAYEGLPSKTYLSKTLAQYTSKTCSNCGFTITSADYDRVLEKLKKTATGWMTTINGKELKVEGQITYYNRYKRQNVVKDLSVELDRLSEESVNNDISSWTKGRSGEALSLLKKRFSHRPVQEKFVCLNCGFETHADEQAALNIARSWLFLRSQEYKKYQTNKTTGNTDKRAFVETWQSFYRKKLKEVWKPAV

SEQ ID NO: 224 - protein, 976 aa, synthetic construct
QEIKRINKIRRRLVKDSNTKKAGKTGPMKTLLVRVMTPDLRERLENLRKKPENIPQPISNTSRANLNKLLTDYTEMKKAILHVYWEEFQKDPVGLMSRVAQPASKKIDQNKLKPEMDEKGNLTTAGFACSQCGQPLFVYKLEQVSEKGKAYTNYFGRCNVAEHEKLILLAQLKPEKDSDEAVTYSLGKFGQRALDFYSIHVTKESTHPVKPLAQIAGNRYASGPVGKALSDACMGTIASFLSKYQDIIIEHQKVVKGNQKRLESLRELAGKENLEYPSVTLPPQPHTKEGVDAYNEVIARVRMWVNLNLWQKLKLSRDDAKPLLRLKGFPSFPLVERQANEVDWWDMVCNVKKLINEKKEDGKVFWQNLAGYKRALRPYLSSEEDRKKGKKFARYQLGDLLLHLEKKHGEDWGKVYDEAWERIDKKVEGLSKHIKLEEERRSEDAQSKAALTDWLRAKASFVIEGLKEADKDEFCRCELKLQKWYGDLRGKPFAIEAENSILDISGFSKQYNCAFIWQKDGVKKLNLYLIINYFKGGKLRFKKIKPEAFEANRFYTVINKKSGEIVPMEVNFNFDDPNLIILPLAFGKRQGREFIWNDLLSLETGSLKLANGRVIEKTLYNRRTRQDEPALFVALTFERREVLDSSNIKPMNLIGVDRGENIPAVIALTDPEGCPLSRFKDSLGNPTHILRIGESYKEKQRTIQAKKEVEQRRAGGYSRKYASKAKNLADDMVRNTARDLLYYAVTQDAMLIFENLSRGFGRQGKRTFMAERQYTRMEDWLTAKLAYEGLPSKTYLSKTLAQYTSKTCSNCGFTITSADYDRVLEKLKKTATGWMTTINGKELKVEGQITYYNRYKRQNVVKDLSVELDRLSEESVNNDISSWTKGRSGEALSLLKKRFSHRPVQEKFVCLNCGFETHADEQAALNIARSWLFLRSQEYKKYQTNKTTGNTDKRAFVETWQSFYRKKLKEVWKPAV

SEQ ID NO: 225 - protein, 978 aa, synthetic construct
QEIKRINKIRRRLVKDSNTKKAGKTGPMKTLLVRVMTPDLRERLENLRKKPENIPQPISNTSRANLNKLLTDYTEMKKAILHVYWEEFQKDPVGLMSRVAQPASKKIDQNKLKPEMDEKGNLTTAGFACSQCGQPLFVYKLEQVSEKGKAYTNYFGRCNVAEHEKLILLAQLKPEKDSDEAVTYSLGKFGQRALDFYSIHVTKESTHPVKPLAQIAGNRYASGPVGKALSDACMGTIASFLSKYQDIIIEHQKVVKGNQKRLESLRELAGKENLEYPSVTLPPQPHTKEGVDAYNEVIARVRMWVNLNLWQKLKLSRDDAKPLLRLKGFPSFPLVERQANEVDWWDMVCNVKKLINEKKEDGKVFWQNLAGYKRQEALRPYLSSEEDRQKGKKFARYQLGDLLLHLEKKHGEDWGKVYDEAWERIDKKVEGLSKHIKLEEERRSEDAQSKAALTDWLRAKASFVIEGLKEADKDEFCRCELKLQKWYGDLRGKPFAIEAENSILDISGFSKQYNCAFIWQKDGVKKLNLYLIINYFKGGKLRFKKIKPEAFEANRFYTVINKKSGEIVPMEVNFNFDDPNLIILPLAFGKRQGREFIWNDLLSLETGSLKLANGRVIEKTLYNRRTRQDEPALFVALTFERREVLDSSNIKPMNLIGVDRGENIPAVIALTDPEGCPLSRFKDSLGNPTHILRIGESYKEKQRTIQAKKEVEQRRAGGYSRKYASKAKNLADDMVRNTARDLLYYAVTQDAMLIFENLSRGFGRQGKRTFMAERQYTRMEDWLTAKLAYEGLPSKTYLSKTLAQYTSKTCSNCGFTITSADYDRVLEKLKKTATGWMTTINGKELKVEGQITYYNRYKRQNVVKDLSVELDRLSEESVNNDISSWTKGRSGEALSLLKKRFSHRPVQEKFVCLNCGFETHADEQAALNIARSWLFLRSQEYKKYQTNKTTGNTDKRAFVETWQSFYRKKLKEVWKPAV

SEQ ID NO: 226 - protein, 978 aa, synthetic construct
QEIKRLNKIRRRLVKDSNTKKAGKTGPMKTLLVRVMTPDLRERLENLRKKPENIPQPISNTSRANLNKLLTDYTEMKKAILHVYWEEFQKDPVGLMSRVAQPASKKIDQNKLKPEMDEKGNLTTAGFACSQCGQPLFVYKLEQVSEKGKAYTNYFGRCNVAEHEKLILLAQLKPEKDSDEAVTYSLGKFGQRALDFYSIHVTKESTHPVKPLAQIAGNRYASGPVGKALSDACMGTIASFLSKYQDIIIEHQKVVKGNQKRLESLRELAGKENLEYPSVTLPPQPHTKEGVDAYNEVIARVRMWVNLNLWQKLKLSRDDAKPLLRLKGFPSFPLVERQANEVDWWDMVCNVKKLINEKKEDGKVFWQNLAGYKRQEALRPYLSSEEDRKKGKKFARYQLGDLLLHLEKKHGEDWGKVYDEAWERIDKKVEGLSKHIKLEEERRSEDAQSKAALTDWLRAKASFVIEGLKEADKDEFCRCELKLQKWYGDLRGKPFAIEAENSILDISGFSKQYNCAFIWQKDGVKKLNLYLIINYFKGGKLRFKKIKPEAFEANRFYTVINKKSGEIVPMEVNFNFDDPNLIILPLAFGKRQGREFIWNDLLSLETGSLKLANGRVIEKTLYNRRTRQDEPALFVALTFERREVLDSSNIKPMNLIGVDRGENIPAVIALTDPEGCPLSRFKDSLGNPTHILRIGESYKEKQRTIQAKKEVEQRRAGGYSRKYASKAKNLADDMVRNTARDLLYYAVTQDAMLIFENLSRGFGRQGKRTFMAERQYTRMEDWLTAKLAYEGLPSKTYLSKTLAQYTSKTCSNCGFTITSADYDRVLEKLKKTATGWMTTINGKELKVEGQITYYNRYKRQNVVKDLSVELDRLSEESVNNDISSWTKGRSGEALSLLKKRFSHRPVQEKFVCLNCGFETHADEQAALNIARSWLFLRSQEYKKYQTNKTTGNTDKRAFVETWQSFYRKKLKEVWKPAV

SEQ ID NO: 227 - protein, 978 aa, synthetic construct
QEIKRINKIRRRLVKDSNTKKAGKTGPMKTLLVRVMTPDLRERLENLRKKPENIPQPISNTSRANLNKLLTDYTEMKKAILHVYWEEFQKDPVGLMSRVAQPASKKIDQNKLKPEMDEKGNLTTAGFACSQCGQPLFVYKLEQVSEKGKAYTNYFGRCNVAEHEKLILLAQLKPEKDSDEAVTYSLGKFGQRALDFYSIHVTKESTHPVKPLAQIAGNRYASGPVGKALSDACMGTIASFLSKYQDIIIEHQKVVKGNQKRLESLRELAGKENLEYPSVTLPPQPHTKEGVDAYNEVIARVRMWVNLNLWQKLKLSRDDAKPLLRLKGFPSFPLVERQANEVDWWDMVCNVKKLINEKKEDGKVFWQNLAGYKRQEALRPYLSSEEDRKKGKKFARYQLGDLLLHLEKKHGEDWGKVYDEAWERIDKKVEGLSKHIKLEEERRSEDAQSKAALTDWLDAKASFVIEGLKEADKDEFCRCELKLQKWYGDLRGKPFAIEAENSILDISGFSKQYNCAFIWQKDGVKKLNLYLIINYFKGGKLRFKKIKPEAFEANRFYTVINKKSGEIVPMEVNFNFDDPNLIILPLAFGKRQGREFIWNDLLSLETGSLKLANGRVIEKTLYNRRTRQDEPALFVALTFERREVLDSSNIKPMNLIGVDRGENIPAVIALTDPEGCPLSRFKDSLGNPTHILRIGESYKEKQRTIQAKKEVEQRRAGGYSRKYASKAKNLADDMVRNTARDLLYYAVTQDAMLIFENLSRGFGRQGKRTFMAERQYTRMEDWLTAKLAYEGLPSKTYLSKTLAQYTSKTCSNCGFTITSADYDRVLEKLKKTATGWMTTINGKELKVEGQITYYNRYKRQNVVKDLSVELDRLSEESVNNDISSWTKGRSGEALSLLKKRFSHRPVQEKFVCLNCGFETHADEQAALNIARSWLFLRSQEYKKYQTNKTTGNTDKRAFVETWQSFYRKKLKEVWKPAV

SEQ ID NO: 228 - protein, 976 aa, synthetic construct
QEIKRINKIRRRLVKDSNTKKAGKTGPMKTLLVRVMTPDLRERLENLRKKPENIPQPISNTSRANLNKLLTDYTEMKKAILHVYWEEFQKDPVGLMSRVAQPASKKIDQNKLKPEMDEKGNLTTAGFACSQCGQPLFVYKLEQVSEKGKAYTNYFGRCNVAEHEKLILLAQLKPEKDSDEAVTYSLGKFGQRALDFYSIHVTKESTHPVKPLAQIAGNRYASGPVGKALSDACMGTIASFLSKYQDIIIEHQKVVKGNQKRLESLRELAGKENLEYPSVTLPPQPHTKEGVDAYNEVIARVRMWVNLNLWQKLKLSRDDAKPLLRLKGFPSFPLVERQANEVDWWDMVCNVKKLINEKKEDGKVFWQNLAGYKRQEALRPYLSSEEDRKKGKKFARYQLGDLLLHLEKKHGEDWGKVYDEAWERIDKKVEGLSKHIKLEEERRSEDAQSKAALTDWLRAKASFVIEGLKEADKDEFCRCELKLQKWYGDLRGKPFAIEAENSDISGFSKQYNCAFIWQKDGVKKLNLYLIINYFKGGKLRFKKIKPEAFEANRFYTVINKKSGEIVPMEVNFNFDDPNLIILPLAFGKRQGREFIWNDLLSLETGSLKLANGRVIEKTLYNRRTRQDEPALFVALTFERREVLDSSNIKPMNLIGVDRGENIPAVIALTDPEGCPLSRFKDSLGNPTHILRIGESYKEKQRTIQAKKEVEQRRAGGYSRKYASKAKNLADDMVRNTARDLLYYAVTQDAMLIFENLSRGFGRQGKRTFMAERQYTRMEDWLTAKLAYEGLPSKTYLSKTLAQYTSKTCSNCGFTITSADYDRVLEKLKKTATGWMTTINGKELKVEGQITYYNRYKRQNVVKDLSVELDRLSEESVNNDISSWTKGRSGEALSLLKKRFSHRPVQEKFVCLNCGFETHADEQAALNIARSWLFLRSQEYKKYQTNKTTGNTDKRAFVETWQSFYRKKLKEVWKPAV

SEQ ID NO: 229 - protein, 978 aa, synthetic construct
QEIKRINKIRRRLVKDSNTKKAGKTGPMKTLLVRVMTPDLRERLENLRKKPENIPQPISNTSRANLNKLLTDYTEMKKAILHVYWEEFQKDPVGLMSRVAQPASKKIDQNKLKPEMDEKGNLTTAGFACSQCGQPLFVYKLEQVSEKGKAYTNYVGRCNVAEHEKLILLAQLKPEKDSDEAVTYSLGKFGQRALDFYSIHVTKESTHPVKPLAQIAGNRYASGPVGKALSDACMGTIASFLSKYQDIIIEHQKVVKGNQKRLESLRELAGKENLEYPSVTLPPQPHTKEGVDAYNEVIARVRMWVNLNLWQKLKLSRDDAKPLLRLKGFPSFPLVERQANEVDWWDMVCNVKKLINEKKEDGKVFWQNLAGYKRQEALRPYLSSEEDRKKGKKFARYQLGDLLLHLEKKHGEDWGKVYDEAWERIDKKVEGLSKHIKLEEERRSEDAQSKAALTDWLRAKASFVIEGLKEADKDEFCRCELKLQKWYGDLRGKPFAIEAENSILDISGFSKQYNCAFIWQKDGVKKLNLYLIINYFKGGKLRFKKIKPEAFEANRFYTVINKKSGEIVPMEVNFNFDDPNLIILPLAFGKRQGREFIWNDLLSLETGSLKLANGRVIEKTLYNRRTRQDEPALFVALTFERREVLDSSNIKPMNLIGVDRGENIPAVIALTDPEGCPLSRFKDSLGNPTHILRIGESYKEKQRTIQAKKEVEQRRAGGYSRKYASKAKNLADDMVRNTARDLLYYAVTQDAMLIFENLSRGFGRQGKRTFMAERQYTRMEDWLTAKLAYEGLPSKTYLSKTLAQYTSKTCSNCGFTITSADYDRVLEKLKKTATGWMTTINGKELKVEGQITYYNRYKRQNVVKDLSVELDRLSEESVNNDISSWTKGRSGEALSLLKKRFSHRPVQEKFVCLNCGFETHADEQAALNIARSWLFLRSQEYKKYQTNKTTGNTDKRAFVETWQSFYRKKLKEVWKPAV

SEQ ID NO: 230 - protein, 979 aa, synthetic construct
QEIKRINKIRRRLVKDSNTKKAGKTGPMKTLLVRVMTPDLRERLENLRKKPENIPQPISNTSRANLNKLLTDYTEMKKAILHVYWEEFQKDPVGLMSRVAQPASKKIDQNKLKPEMDEKGNLTTAGFACSQCGQPLFVYKLEQVSEKGKAYTNYFGRCNVAEHEKLILLAQLKPEKDSDEAVTYSLGKFGQRALDFYSIHVTKESTHPVKPLAQIAGNRYASGPVGKALSDACMGTIASFLSKYQDIIIEHQKVVKGNQKRLESLRELAGKENLEYPSVTLPPQPHTKEGVDAYNEVIARVRMWVNLNLWQKLKLSRDDAKPLLRLKGFPSFPLVERQANEVDWWDMVCNVKKLINGEKKEDGKVFWQNLAGYKRQEALRPYLSSEEDRKKGKKFARYQLGDLLLHLEKKHGEDWGKVYDEAWERIDKKVEGLSKHIKLEEERRSEDAQSKAALTDWLRAKASFVIEGLKEADKDEFCRCELKLQKWYGDLRGKPFAIEAENSILDISGFSKQYNCAFIWQKDGVKKLNLYLIINYFKGGKLRFKKIKPEAFEANRFYTVINKKSGEIVPMEVNFNFDDPNLIILPLAFGKRQGREFIWNDLLSLETGSLKLANGRVIEKTLYNRRTRQDEPALFVALTFERREVLDSSNIKPMNLIGVDRGENIPAVIALTDPEGCPLSRFKDSLGNPTHILRIGESYKEKQRTIQAKKEVEQRRAGGYSRKYASKAKNLADDMVRNTARDLLYYAVTQDAMLIFENLSRGFGRQGKRTFMAERQYTRMEDWLTAKLAYEGLPSKTYLSKTLAQYTSKTCSNCGFTITSADYDRVLEKLKKTATGWMTTINGKELKVEGQITYYNRYKRQNVVKDLSVELDRLSEESVNNDISSWTKGRSGEALSLLKKRFSHRPVQEKFVCLNCGFETHADEQAALNIARSWLFLRSQEYKKYQTNKTTGNTDKRAFVETWQSFYRKKLKEVWKPAV

SEQ ID NO: 231 - protein, 978 aa, synthetic construct
QEIKRINKIRRRLVKDSNTKKAGKTGPMKTLLVRVMTPDLRERLENLRKKPENIPQPISNTSRANLNKLLTDYTEMKKAILHVYWEEFQKDPVGLMSRVAQPASKKIDQNKLKPEMDEKGNLTTAGFACSQCGQPLFVYKLEQVSEKGKAYTNYFGRCNVAEHEKLILLAQLKPEKDSDEAVTYSLGKFGQRALDFYSIHVTKESTHPVKPLAQIAGNRFASGPVGKALSDACMGTIASFLSKYQDIIIEHQKVVKGNQKRLESLRELAGKENLEYPSVTLPPQPHTKEGVDAYNEVIARVRMWVNLNLWQKLKLSRDDAKPLLRLKGFPSFPLVERQANEVDWWDMVCNVKKLINEKKEDGKVFWQNLAGYKRQEALRPYLSSEEDRKKGKKFARYQLGDLLLHLEKKHGEDWGKVYDEAWERIDKKVEGLSKHIKLEEERRSEDAQSKAALTDWLRAKASFVIEGLKEADKDEFCRCELKLQKWYGDLRGKPFAIEAENSILDISGFSKQYNCAFIWQKDGVKKLNLYLIINYFKGGKLRFKKIKPEAFEANRFYTVINKKSGEIVPMEVNFNFDDPNLIILPLAFGKRQGREFIWNDLLSLETGSLKLANGRVIEKTLYNRRTRQDEPALFVALTFERREVLDSSNIKPMNLIGVDRGENIPAVIALTDPEGCPLSRFKDSLGNPTHILRIGESYKEKQRTIQAKKEVEQRRAGGYSRKYASKAKNLADDMVRNTARDLLYYAVTQDAMLIFENLSRGFGRQGKRTFMAERQYTRMEDWLTAKLAYEGLPSKTYLSKTLAQYTSKTCSNCGFTITSADYDRVLEKLKKTATGWMTTINGKELKVEGQITYYNRYKRQNVVKDLSVELDRLSEESVNNDISSWTKGRSGEALSLLKKRFSHRPVQEKFVCLNCGFETHADEQAALNIARSWLFLRSQEYKKYQTNKTTGNTDKRAFVETWQSFYRKKLKEVWKPAV

SEQ ID NO: 232 - protein, 978 aa, synthetic construct
QEIKRINKIRRRLVKDSNTKKAGKTGPMKTLLVRVMTPDLRERLENLRKKPENIPQPISNTSRANLNKLLTDYTEMKKAILHVYWEEFQKDPVGLMSRVAQPASKKIDQNKLKPEMDEKGNLTTAGFACSQCGQPLFVYKLEQVSEKGKAYTNYFGRCNVAEHEKLILLAQLKPEKDSDEAVTYSLGKFGQRALDFYSIHVTKESTHPVKPLAQIAGNRYASGPVGKALSDACMGTIASFLSKYQDIIIEHQKVVKGNQKRLESLRELAGKENLEYPSVTLPPQPHTKEGVDAYNEVIARVRMWVNLNLWQKLKLSRDDAKPLLRLKGFPSFPLVERQANEVDWWDMVCNVKKLINEKKEDGKVFWQNLAGYKRQEALRPYLSSEEDRKKGKKFARYQLGDLLLHLEKKHGEDWGKVYDEAWERIDKKVEGLSKHIKLEEERRSEDAQSKAALTDWLRAKASFVIEGLKEADKDEFCRCELKLQKWYGDLRGKPFAIEAENSILDISGFSKQYNCAFIWQKDGVKKLNLYLIINYFKGGKLRFKKIKPEAFEANRFYTVINKKSGEIVPMEVNFNFDDPNLIILPLAFGKRQGREFIWNDLLSLETGSLKLANGRVIEKTLYNRRTRQDEPALFVALTFERREVLDSSNIKPMNLIGVDRGENIPAVIALTDPEGCPLSRFKDSLGNPTHILRIGESYKEKQRTIQAKKEVEQRRAGGYSRKYASKAKNLADDMVRNTARDLLYYAVTQDAMLIFENLSRGFGRQGKRTFMAERQYTRMEDWYTAKLAYEGLPSKTYLSKTLAQYTSKTCSNCGFTITSADYDRVLEKLKKTATGWMTTINGKELKVEGQITYYNRYKRQNVVKDLSVELDRLSEESVNNDISSWTKGRSGEALSLLKKRFSHRPVQEKFVCLNCGFETHADEQAALNIARSWLFLRSQEYKKYQTNKTTGNTDKRAFVETWQSFYRKKLKEVWKPAV

SEQ ID NO: 233 - protein, 979 aa, synthetic construct
QEIKRINKIRRRLVKDSNTKKAGKTGPMKTLLVRVMTPDLRERLENLRKKPENIPQPISNTSRANLNKLLTDYTEMKKAILHVYWEEFQKDPVGLMSRVAQPASKKIDQNKLKPEMDEKGNLTTAGFACSQCGQPLFVYKLEQVSEKGKAYTNYFGRCNVAEHEKLILLAQLKPEKDSDEAVTYSLGKFGQRALDFYSIHVTKESTHPVKPLAQIAGNRYASGPVGKALSDACMGTIASFLSKYQDIIIEHQKVVKGNQKRLESLRELAGKENLEYPSVTLPPQPHTKEGVDAYNEVIARVRMWVNLNLWQKLKLSRDDAKPLLRLKGFPSFPLVERQANEVDWWDMVPCNVKKLINEKKEDGKVFWQNLAGYKRQEALRPYLSSEEDRKKGKKFARYQLGDLLLHLEKKHGEDWGKVYDEAWERIDKKVEGLSKHIKLEEERRSEDAQSKAALTDWLRAKASFVIEGLKEADKDEFCRCELKLQKWYGDLRGKPFAIEAENSILDISGFSKQYNCAFIWQKDGVKKLNLYLIINYFKGGKLRFKKIKPEAFEANRFYTVINKKSGEIVPMEVNFNFDDPNLIILPLAFGKRQGREFIWNDLLSLETGSLKLANGRVIEKTLYNRRTRQDEPALFVALTFERREVLDSSNIKPMNLIGVDRGENIPAVIALTDPEGCPLSRFKDSLGNPTHILRIGESYKEKQRTIQAKKEVEQRRAGGYSRKYASKAKNLADDMVRNTARDLLYYAVTQDAMLIFENLSRGFGRQGKRTFMAERQYTRMEDWLTAKLAYEGLPSKTYLSKTLAQYTSKTCSNCGFTITSADYDRVLEKLKKTATGWMTTINGKELKVEGQITYYNRYKRQNVVKDLSVELDRLSEESVNNDISSWTKGRSGEALSLLKKRFSHRPVQEKFVCLNCGFETHADEQAALNIARSWLFLRSQEYKKYQTNKTTGNTDKRAFVETWQSFYRKKLKEVWKPAV

SEQ ID NO: 234 - protein, 979 aa, synthetic construct
QEIKRINKIRRRLVKDSNTKKAGKTGPMKTLLVRVMTPDLRERLENLRKKPENIPQPISNTSRANLNKLLTDYTEMKKAILHVYWEEFQKDPVGLMSRVAQPASKKIDQNKLKPEMDEKGNLTTAGFACSQCGQPLFVYKLEQVSEKGKAYTNYFGRCNVAEHEKLILLAQLKPEKDSDEAVTYSLGKFGQRALDFYSIHVTKESTHPVKPLAQTIAGNRYASGPVGKALSDACMGTIASFLSKYQDIIIEHQKVVKGNQKRLESLRELAGKENLEYPSVTLPPQPHTKEGVDAYNEVIARVRMWVNLNLWQKLKLSRDDAKPLLRLKGFPSFPLVERQANEVDWWDMVCNVKKLINEKKEDGKVFWQNLAGYKRQEALRPYLSSEEDRKKGKKFARYQLGDLLLHLEKKHGEDWGKVYDEAWERIDKKVEGLSKHIKLEEERRSEDAQSKAALTDWLRAKASFVIEGLKEADKDEFCRCELKLQKWYGDLRGKPFAIEAENSILDISGFSKQYNCAFIWQKDGVKKLNLYLIINYFKGGKLRFKKIKPEAFEANRFYTVINKKSGEIVPMEVNFNFDDPNLIILPLAFGKRQGREFIWNDLLSLETGSLKLANGRVIEKTLYNRRTRQDEPALFVALTFERREVLDSSNIKPMNLIGVDRGENIPAVIALTDPEGCPLSRFKDSLGNPTHILRIGESYKEKQRTIQAKKEVEQRRAGGYSRKYASKAKNLADDMVRNTARDLLYYAVTQDAMLIFENLSRGFGRQGKRTFMAERQYTRMEDWLTAKLAYEGLPSKTYLSKTLAQYTSKTCSNCGFTITSADYDRVLEKLKKTATGWMTTINGKELKVEGQITYYNRYKRQNVVKDLSVELDRLSEESVNNDISSWTKGRSGEALSLLKKRFSHRPVQEKFVCLNCGFETHADEQAALNIARSWLFLRSQEYKKYQTNKTTGNTDKRAFVETWQSFYRKKLKEVWKPAV

SEQ ID NO: 235 - protein, 978 aa, synthetic construct
QEIKRINKIRRRLVKDSNTKKAGKTGPMKTLLVRVMTPDLRERLENLRKKPENIPQPISNTSRANLNKLLTDYTEMKKAILHVYWEEFQKDPVGLMSRVAQPASKKIDQNKLKPEMDEKGNLTTAGFACSQCGQPLFVYKLEQVSEKGKAYTNYFGRCNVAEHEKLILLAQLKPEKDSDEAVTYSLGKFGQRALDFYSIHVTKESTHPVKPLAQIAGNRYASGPVGKALSDACMGTIASFLSKYQDIIIEHQKVVKGNQKRLESLRELAGKENLEYPSVTLPPQPHTKEGVDAYNEVIARVRMWVNLNLWQKLKLSRDDAKPLLRLKGFPSFPLVERQANEVDWWDMVCNVKKLINEKKEDGKVFWQNLAGYKRQEALRPYLSSEEDRKKGKKFARYQLGDLLLHLEKKHGEDWGKVYDEAWERIDKKVEGLSKHIKLEEERRSEDAQSKAALTDWLRAKASFVIEGLKEADKDEFCRCELKLQKWYGDLRGKPFAIEAENSILDISGFSKQYNCAFIWQKDGVKKLNLYLIINYFKGGKLRFKKIKPEAFEANRFYTVINKKSGEIVPMEVNFNFDDPNLIILPLAFGKRQGREFIWNDLLSLETGSLKLANGRVIEKTLYNRRTRQDEPALFVALTFERREVLDSSNIKPMNLIGVDRGENIPAVIALTDPEGCPLSRFKDSLGNPTHILRIGESYKEKQRTIQAKKEVEQRRAGGYSRKYASKAKNLADDMVRNTARDLLYYAVTQDAMLIFENLSRGFGRQGKRTFMAERQYTRMEDWLTAKLAYEGLPSKTYLSKTLAQYTSKTCSNCGFTITSADYDRVLEKLKKTATGWMTTINGKELKVEGQITYYNRYKRQNVVKDLSVELDRLSEESVNNDISSWTKGRSGEALSLLKKRFSHRPCQEKFVCLNCGFETHADEQAALNIARSWLFLRSQEYKKYQTNKTTGNTDKRAFVETWQSFYRKKLKEVWKPAV

SEQ ID NO: 236 - protein, 979 aa, synthetic construct
QEIKRINKIRRRLVKDSNTKKAGKTGPMKTLLVRVMTPDLRERLENLPRKKPENIPQPISNTSRANLNKLLTDYTEMKKAILHVYWEEFQKDPVGLMSRVAQPASKKIDQNKLKPEMDEKGNLTTAGFACSQCGQPLFVYKLEQVSEKGKAYTNYFGRCNVAEHEKLILLAQLKPEKDSDEAVTYSLGKFGQRALDFYSIHVTKESTHPVKPLAQIAGNRYASGPVGKALSDACMGTIASFLSKYQDIIIEHQKVVKGNQKRLESLRELAGKENLEYPSVTLPPQPHTKEGVDAYNEVIARVRMWVNLNLWQKLKLSRDDAKPLLRLKGFPSFPLVERQANEVDWWDMVCNVKKLINEKKEDGKVFWQNLAGYKRQEALRPYLSSEEDRKKGKKFARYQLGDLLLHLEKKHGEDWGKVYDEAWERIDKKVEGLSKHIKLEEERRSEDAQSKAALTDWLRAKASFVIEGLKEADKDEFCRCELKLQKWYGDLRGKPFAIEAENSILDISGFSKQYNCAFIWQKDGVKKLNLYLIINYFKGGKLRFKKIKPEAFEANRFYTVINKKSGEIVPMEVNFNFDDPNLIILPLAFGKRQGREFIWNDLLSLETGSLKLANGRVIEKTLYNRRTRQDEPALFVALTFERREVLDSSNIKPMNLIGVDRGENIPAVIALTDPEGCPLSRFKDSLGNPTHILRIGESYKEKQRTIQAKKEVEQRRAGGYSRKYASKAKNLADDMVRNTARDLLYYAVTQDAMLIFENLSRGFGRQGKRTFMAERQYTRMEDWLTAKLAYEGLPSKTYLSKTLAQYTSKTCSNCGFTITSADYDRVLEKLKKTATGWMTTINGKELKVEGQITYYNRYKRQNVVKDLSVELDRLSEESVNNDISSWTKGRSGEALSLLKKRFSHRPVQEKFVCLNCGFETHADEQAALNIARSWLFLRSQEYKKYQTNKTTGNTDKRAFVETWQSFYRKKLKEVWKPAV

SEQ ID NO: 237 - protein, 978 aa, synthetic construct
QEIKRINKIRRRLVKDSNTKKAGKTGPMKTLLVRVMTPDLRERLENLRKKPENIPQPISNTSRANLNKLLTDYTEMKKAILHVYWEEFQKDPVGLMSRVAQPASKKIDQNKLKPEMDEKGNLTTAGFACSQCGQPLFVYKLEQVSEKGKAYTNYFGRCNVAEHEKLILLAQLKPEKDSDEAVTYSLGKFGQRALDFYSIHVTKESTHPVKPLAQIAGNRYASGPVGKALSDACMGTIASFLSKYQDIIIEHQKVVKGNQKRLESLRELAGKENLEYPSVTLPPQPHTKEGVDAYNEVIARVRMWVNLNLWQKLKLSRDDAKPLLRLKGFPSFPLVERQANEVDWWDMVCNVKKLINEKKEDGKVFWQNLAGYKRQEALRPYLSSEEDRKKGKKFARYQLGDLLLHLEKKHGEDWGKVYDEAWERIDKKVEGLSKHIKLEEERRSEDAQSKAALTDWLRAKASFVIEGLKEADKDEFCRCELKLQKWYGDLRGKPFAIEAENSILDISGFSKQYNCAFIWQKDGVKKLNLYLIINYFKGGKLRFKKIKPEAFEANRFYTVINKKSGEIVPMEVNFNFDDPNLIILPLAFGKRQGREFIWNDLLSLETGSLKLANGRVIEKTLYNRRTRQDEPALFVALTFERREVLDSSNIKPMNLIGVDRGENIPAVIALTDPEGCPLSRFKDSLGNPTHILRIGESYKEKQRTIQAKKEVEQRRAGGYSRKYASKAKNLADDMVRNTARDLLYYAVTQDAMLIFENLSRGFGRQGKRTFMAERQYTRMEDWLTAKLAYEGLPSKTYLSKTLAQYTSKTCSNCGFTITSADYDRVLEGLKKTATGWMTTINGKELKVEGQITYYNRYKRQNVVKDLSVELDRLSEESVNNDISSWTKGRSGEALSLLKKRFSHRPVQEKFVCLNCGFETHADEQAALNIARSWLFLRSQEYKKYQTNKTTGNTDKRAFVETWQSFYRKKLKEVWKPAV

SEQ ID NO: 238 - protein, 977 aa, synthetic construct
QEIKRINKIRRRLVKDSNTKKAGKTGPMKTLLVRVMTPDLRERLENLRKKPENIPQPISNTSRANLNKLLTDYTEMKKAILHVYWEEFQKDPVGLMSRVAQPASKKIDQNKLKPEMDEKGNLTTAGFACSQCGQPLFVYKLEQVSEKGKAYTNYFGRCNVAEHEKLILLAQLKPEKDSDEAVTYSLGKFGQRALDFYSIHVTKESTHPVKPLAQIAGNRYASGPVGKALSDACMGTIASFLSKYQDIIIEHQKVVKGNQKRLESLRELAGKENLEYPSVTLPPQPHTKEGVDAYNEVIARVRMWVNLNLWQKLKLSRDDAKPLLRLKGFPSFPLVERQANEVDWWDMVCNVKKLINEKKEDGKVFWQNLAGYKRQEALRPYLSSEEDRKKGKKFARYQLGDLLLHLEKKHGEDWGKVYDEAWERIDKKVEGLSKHIKLEEERRSEDAQSKAALTDWLRAKASFVIEGLKEADKDEFCRCELKLQKWYGDLRGKPFAIEAENSILDISGFSKQYNCAFIWQKDGVKKLNLYLIINYFKGGKLRFKKIKPEAFEANRFYTVINKKSGEIVPMEVNFNFDDPNLIILPLAFGKRQGREFIWNDLLSLETGSLKLANGRVIEKTLYNRRTRQDEPALFVALTFERREVLDSSNIKPMNLIGVDRGENIPAVIALTDPEGCPLSRFKDSLGNPTHILRIGESYKEKQRTIQAKKEVEQRRAGGYSRKYASKAKNLADDMVRNTARDLLYYAVTQDAMLIFENLSRGFGRQGKRTFMAERQYTRMEDWLTAKLAYEGLPSKTYLSKTLAQTSKTCSNCGFTITSADYDRVLEKLKKTATGWMTTINGKELKVEGQITYYNRYKRQNVVKDLSVELDRLSEESVNNDISSWTKGRSGEALSLLKKRFSHRPVQEKFVCLNCGFETHADEQAALNIARSWLFLRSQEYKKYQTNKTTGNTDKRAFVETWQSFYRKKLKEVWKPAV

SEQ ID NO: 239 - protein, 979 aa, synthetic construct
QEIKRINKIRRRLVKDSNTKKAGKTGPMKTLLVRVMTPDLRERLENLRKKPENIPQPISNTSRANLNKLLTDYTEMKKAILHVYWEEFQKDPVGLMSRVAQPASKKIDQNKLKPEMDEKGNLTTAGFACSQCGQPLFVYKLEQVSEKGKAYTNYFGRCNVAEHEKLILLAQLKPEKDSDEAVTYSLGKFGQRALDFYSIHVTKESTHPVKPLAQIAGNRYASGPVGKALSDACMGTIASFLSKYQDIIIEHQKVVKGNQKRLESLRELAGKENLEYPSVTLPPQPHTKEGVDAYNEVIARVRMWVNLNLWQKLKLSRDDAKPLLRLKGFPSFPLVERQANEVDWWDMVCNVKKLINEKKEDGKVFWQNLAGYKRQEALRPYLSSEEDRKKGKKFARYQLGDLLLHLEKKHGEDWGKVYDEAWERIDKKVEGLSKHIKLEEERRSEDAQSKAALTDWLRAKASFVIEGLKEADKDEFCRCELKLQKWYGDLRGKPFAIEAENSILDISGFSKQYNCAFIWQKDGVKKLNLYLIINYFKGGKLRFKKIKPEAFEANRFYTVINKKSGEIVPMEVNFNFDDPNLIILPLAFGKRQGREFIWNDLLSLETGSLKLANGRVIEKTLYNRRTRQDEPALFVALTFERREVLDSSNIKPMNLIGVDRGENIPAVIALTDPEGCPLSRFKDSLGNPTHILRIGESYKEKQRTIQAKKEVEQRRAGGYSRKYASKAKNLADDMVRNTARDLLYYAVTQDAMLIFENLSRGFGRQGKRTFMAERQYTRMEDWLTAKLAYEGLPSKTYLSKTLAQYTISKTCSNCGFTITSADYDRVLEKLKKTATGWMTTINGKELKVEGQITYYNRYKRQNVVKDLSVELDRLSEESVNNDISSWTKGRSGEALSLLKKRFSHRPVQEKFVCLNCGFETHADEQAALNIARSWLFLRSQEYKKYQTNKTTGNTDKRAFVETWQSFYRKKLKEVWKPAV

SEQ ID NO: 240 - protein, 978 aa, synthetic construct
QEIKRINKIRRRLVKDSNTKKAGKTGPMKTLLVRVMTPDLRERLENLRKKPENIPQPISNTSRANLNKLLTDYTEMKKAILHVYWEEFQKDPVGLMSRVAQPASKKIDQNKLKPEMDEKGNLTTAGFACSQCGQPLFVYKLEQVSEKGKAYTNYFGRCNVAEHEKLILLAQLKPEKDSDEAVTYSLGKFGQRALDFYSIHVTKESTHPVKPLAQIAGNRYASGPVGKALSDACMGTIASFLSKYQDIIIEHQKVVKGNQKRLESLRELAGKENLEYPSVTLPPQPHTKEGVDAYNEVIARVRMWVNLNLWQKLKLSRDDAKPLLRLKGFPSFPLVERQANEVDWWDMVCNVKKLINEKKEDGKVFWQNLAGYKRQEALRPYLSSEEDRKKGKKFARYQLGDLLLHLEKKHGEDWGKVYDEAWERIDKKVEGLSKHIKLEEERRSEDAQSKAALTDWLRAKASFVIEGLKEADKDEFCRCELKLQKWYGDLRGKPFAIEAENSILDISGFSKQYNCAFIWQKDGVKKLNLYLIINYFKGGKLRFKKIKPEAFEANRFYTVINKKSGEIVPMEVNFNFDDPNLIILPLAFGKRQGREFIWNDLLSLETGSLKLANGRVIEKTLYNRRTRQDEPALFVALTFERREVLDSSNIKPMNLIGVDRGENIPAVIALTDPEGCPLSRFKDSLGNPTHILRIGESYKEKQRTIQAKKEVEQRRAGGYSRKYASKAKNLADDMVRNTARDLLYYAVTQDAMLIFENLSRGFGRQGKRTFMAERQYTRMEDWLTAKLAYEGLPSKTYLSKTLAQYTSKTKSNCGFTITSADYDRVLEKLKKTATGWMTTINGKELKVEGQITYYNRYKRQNVVKDLSVELDRLSEESVNNDISSWTKGRSGEALSLLKKRFSHRPVQEKFVCLNCGFETHADEQAALNIARSWLFLRSQEYKKYQTNKTTGNTDKRAFVETWQSFYRKKLKEVWKPAV

SEQ ID NO: 241 - protein, 978 aa, synthetic construct
QEIKRINKIRRRLVKDSNTKKAGKTGPMKTLLVRVMTPDLRERLENLRKKPENIPQPISNTSRANLNKLLTDYTEMKKAILHVYWEEFQKDPVGLMSRVAQPASKKIDQNKLKPEMDEKGNLTTAGFACSQCGQPLFVYKLEQVSEKGKAYTNYFGRCNVAEHEKLILLAQLKPEKDSDEAVTYSLGKFGQRALDFYSIHVTKESTHPVKPLAQIAGNRYASGPVGKALSDACMGTIASFLSKYQDIIIEHQKVVKGNQKRLESLRELAGKENLEYPSVTLPPQPHTKEGVDAYNEVIARVRMWVNLNLWQKLKLSRDDAKPLLRLKGFPSFPLVERQANEVDWWDMVCNVKKLINEKKEDGKVFWQNLAGYKRQEALRPYLSSEEDRKKGKKFARYQLGDLLLHLEKKHGEDWGKVYDEAWERIDKKVEGLSKHIKLEEERRSEDAQSKAALTDWLRAKASFVIEGLKEADKDEFCRCELKLQKWYGDLRGKPFAIEAENSILDISGFSKQYNCAFIWQKDGVKKLNLYLIINYFKGGKLRFKKIKPEAFEANRFYTVINKKSGEIVPMEVNFNFDDPNLIILPLAFGKRQGREFIWNDLLSLETGSLKLANGRVIEKTLYNRRTRQDEPALFVALTFERREVLDSSNIKPMNLIGVDRGENIPAVIALTDPEGCPLSRFKDSLGNPTHILRIGESYKEKQRTIQAKKEVEQRRAGGYSRKYASKAKNLADDMVRNTARDLLYYAVTQDAMLIFENLSRGFGRQGKRTFMAERQYTRMEDWLTAKLAYEGLPSKTYLSKQLAQYTSKTCSNCGFTITSADYDRVLEKLKKTATGWMTTINGKELKVEGQITYYNRYKRQNVVKDLSVELDRLSEESVNNDISSWTKGRSGEALSLLKKRFSHRPVQEKFVCLNCGFETHADEQAALNIARSWLFLRSQEYKKYQTNKTTGNTDKRAFVETWQSFYRKKLKEVWKPAV

SEQ ID NO: 242 - protein, 978 aa, synthetic construct
QEIKRINKIRRRLVKDSNTKKAGKTGPMKTLLVRVMTPDLRERLENLRKKPENIPQPISNTSRANLNKLLTDYTEMKKAILHVYWEEFQKDPVGLMSRVAQPASKKIDQNKLKPEMDEKGNLTTAGFACSQCGQPLFVYKLEQVSEKGKAYTNYFGRCNVAEHEKLILLAQLKPEKDSDEAVTYSLGKFGQRALDFYSIHVTKESTHPVKPLAQIAGNRYASGPVGKALSDACMGTIASFLSKYQDIIIEHQKVVKGNQKRLESLRELAGKENLEYPSVTLPPQPHTKEGVDAYNEVIARVRMWVNLNLWQKLKLSRDDAKPLLRLKGFPSFPLVERQANEVDWWDMVCNVKKLINEKKEDGKVFWQNLAGYKRQEALRPYLSSEEDRKKGKKFARYQLGDLLLHLEKKHGEDWGKVYDEAWERIDKKVEGLSKHIKLEEERRSEDAQSKAALTDWLRAKASFVIEGLKEADKDEFCRCELKLQKWYGDLRGKPFAIEAENSILDISGFSKQYNCAFIWQKDGVKKLNLYLIINYFKGGKLRFKKIKPEAFEANRFYTVINKKSGEIVPMEVNFNFDDPNLIILPLAFGKRQGREFIWNDLLSLETGSLKLANGRVIEKTLYNRRTRQDEPALFVALTFERREVLDSSNIKPMNLIGVDRGENIPAVIALTDPEGCPLSRFKDSLGNPTHILRIGESYKEKQRTIQAKKEVEQRRAGGYSRKYASKAKNLADDMVRNTARDLLYYAVTQDAMLIFENLSRGFGRQGKRTFMAERQYTRMEDWLTAKLAYEGLPSKTYLSKTLAQYYSKTCSNCGFTITSADYDRVLEKLKKTATGWMTTINGKELKVEGQITYYNRYKRQNVVKDLSVELDRLSEESVNNDISSWTKGRSGEALSLLKKRFSHRPVQEKFVCLNCGFETHADEQAALNIARSWLFLRSQEYKKYQTNKTTGNTDKRAFVETWQSFYRKKLKEVWKPAV

SEQ ID NO: 243 - protein, 978 aa, synthetic construct
QEIKRINKIRRRLVKDSNTKKAGKTGPMKTLLVRVMTPDLRERLENLRKKPENIPQPISNTSRANLNKLLTDYTEMKKAILHVYWEEFQKDPVGLMSRVAQPASKKIDQNKLKPEMDEKGNLTTAGFACSQCGQPLFVYKLEQVSEKGKAYTNYFGRCNVAEHEKLILLAQLKPEKDSDEAVTYSLGKFGQRALDFYSIHVTKESTHPVKPLAQIAGNRYASGPVGKALSDACMGTIASFLSKYQDIIIEHQKVVKGNQKRLESLRELAGKENLEYPSVTLPPQPHTKEGVDAYNEVIARVRMWVNLNLWQKLKLSRDDAKPLLRLKGFPSFPLVERQANEVDWWDMVCNVKKLINEKKEDGKVFWQNLAGYKRQEALRPYLSSEEDRKKGKKFARYQLGDLLLHLEKKHGEDWGKVYDEAWERIDKKVEGLSKHIKLEEERRSEDAQSKAALTDWLRAKASFVIEGLKEADKDEFCRCELKLQKWYGDLRGKPFAIEAENSILDISGFSKQYNCAFIWQKDGVKKLNLYLIINYFKGGKLRFKKIKPEAFEANRFYTVINKKSGEIVPMEVNFNFDDPNLIILPLAFGKRQGREFIWNDLLSLETGSLKLANGRVIEKTLYNRRTRQDEPALFVALTFERREVLDSSNIKPMNLIGVDRGENIPAVIALTDPEGCPLSRFKDSLGNPTHILRIGESYKEKQRTIQAKKEVEQRRAGGYSRKYASKAKNLADDMVRNTARDLLYYAVTQDAMLIFENLSRGFGRQGKRTFMAERQYTRMEDWLTAKLAYEGLPSKTYLSKTLAKYTSKTCSNCGFTITSADYDRVLEKLKKTATGWMTTINGKELKVEGQITYYNRYKRQNVVKDLSVELDRLSEESVNNDISSWTKGRSGEALSLLKKRFSHRPVQEKFVCLNCGFETHADEQAALNIARSWLFLRSQEYKKYQTNKTTGNTDKRAFVETWQSFYRKKLKEVWKPAV

SEQ ID NO: 244 - protein, 978 aa, synthetic construct
QEIKRINKIRRRLVKDSNTKKAGKTGPMKTLLVRVMTPDLRERLENLRKKPENIPQPISNTSRANLNKLLTDYTEMKKAILHVYWEEFQKDPVGLMSRVAQPASKKIDQNKLKPEMDEKGNLTTAGFACSQCGQPLFVYKLEQVSEKGKAYTNYFGRCNVAEHEKLILLAQLKPEKDSDEAVTYSLGKFGQRALDFYSIHVTKESTHPVKPLAQIAGNRYASGPVGKALSDACMGTIASFLSKYQDIIIEHQKVVKGNQKRLESLRELAGKENLEYPSVTLPPQPHTKEGVDAYNEVIARVRMWVNLNLWQKLKLSRDDAKPLLRLKGFPSFPLVERQANEVDWWDMVCNVKKLINEKKEDGKVFWQNLAGYKRQEALRPYLSSEEDRKKGKKFARYQLGDLLLHLEKKHGEDWGKVYDEAWERIDKKVEGLSKHIKLEEERRSEDAQSKAALTDWLRAKASFVIEGLKEADKDEFCRCELKLQKWYGDLRGKPFAIEAENSILDISGFSKQYNCAFIWQKDGVKKLNLYLIINYFKGGKLRFKKIKPEAFEANRFYTVINKKSGEIVPMEVNFNFDDPNLIILPLAFGKRQGREFIWNDLLSLETGSLKLANGRVIEKTLYNRRTRQDEPALFVALTFERREVLDSSNIKPMNLIGVDRGENIPAVIALTDPEGCPLSRFKDSLGNPTHILRIGESYKEKQRTIQAKKEVEQRRAGGYSRKYASKAKNLADDMVRNTARDLLYYAVTQDAMLIFENLSRGFGRQGKRTFMAERQYTRMEDWLTAKLAYEGLASKTYLSKTLAQYTSKTCSNCGFTITSADYDRVLEKLKKTATGWMTTINGKELKVEGQITYYNRYKRQNVVKDLSVELDRLSEESVNNDISSWTKGRSGEALSLLKKRFSHRPVQEKFVCLNCGFETHADEQAALNIARSWLFLRSQEYKKYQTNKTTGNTDKRAFVETWQSFYRKKLKEVWKPAV

SEQ ID NO: 245 - protein, 979 aa, synthetic construct
QEIKRINKIRRRLVKDSNTKKAGKTGPMKTLLVRVMTPDLRERLENLRKKPENIPQPISNTSRANLNKLLTDYTEMKKAILHVYWEEFQKDPVGLMSRVAQPASKKIDQNKLKPEMDEKGNLTTAGFACSQCGQPLFVYKLEQVSEKGKAYTNYFGRCNVAEHEKLILLAQLKPEKDSDEAVTYSLGKFGQRALDFYSIHVTKESTHPVKPLAQIAGNRYASGPVGKALSDACMGTIASFLSKYQDIIIEHQKVVKGNQKRLESLRELAGKENLEYPSVTLPPQPHTKEGVDAYNEVIARVRMWVNLNLWQKLKLSRDDAKPLLRLKGFPSFPLVERQANEVDWWDMVCNVKKLINEKKEDGKVFWQNLAGYKRQEALRPYLSSEEDRKKGKKFARYQLGDLLLHLEKKHGEDWGKVYDEAWERIDKKVEGLSKHIKLEEERRSEDAQSKAALTDWLRAKASFVIEGLKEADKDEFCRCELKLQKWYGDLRGKPFAIEAENSILDISGFSKQYNCAFIWQKDGVKKLNLYLIINYFKGGKLRFKKIKPEAFEANRFYTVINKKSGEIVPMEVNFNFDDPNLIILPLAFGKRQGREFIWNDLLSLETGSLKLANGRVIEKTLYNRRTRQDEPALFVALTFERREVLDSSNIKPMNLIGVDRGENIPAVIALTDPEGCPLSRFKDSLGNPTHILRIGESYKEKQRTIQAKKEVEQRRAGGYSRKYASKAKNLADDMVRNTARDLLYYAVTQDAMLIFENLSRGFGRQGKRTFMAERQYTRMEDWLTAKLAYEGLPSKTYLSKTLLAQYTSKTCSNCGFTITSADYDRVLEKLKKTATGWMTTINGKELKVEGQITYYNRYKRQNVVKDLSVELDRLSEESVNNDISSWTKGRSGEALSLLKKRFSHRPVQEKFVCLNCGFETHADEQAALNIARSWLFLRSQEYKKYQTNKTTGNTDKRAFVETWQSFYRKKLKEVWKPAV

SEQ ID NO: 246 - protein, 977 aa, synthetic construct
QEIKRINKIRRRLVKDSNTKKAGKTGPMKTLLVRVMTPDLRERLENLRKKPENIPQPISNTSRANLNKLLTDYTEMKKAILHVYWEEFQKDPVGLMSRVAQPASKKIDQNKLKPEMDEKGNLTTAGFACSQCGQPLFVYKLEQVSEKGKAYTNYFGRCNVAEHEKLILLAQLKPEKDSDEAVTYSLGKFGQRALDFYSIHVTKESTHPVKPLAQIAGNRYASGPVGKALSDACMGTIASFLSKYQDIIIEHQKVVKGNQKRLESLRELAGKENLEYPSVTLPPQPHTKEGVDAYNEVIARVRMWVNLNLWQKLKLSRDDAKPLLRLKGFPSFPLVERQANEVDWWDMVCNVKKLINEKKEDGKVFWQNLAGYKRQEALRPYLSSEEDRKKGKKFARYQLGDLLLHLEKKHGEDWGKVYDEAWERIDKKVEGLSKHIKLEEERRSEDAQSKAALTDWLRAKASFVIEGLKEADKDEFCRCELKLQKWYGDLRGKPFAIEAENSILDISGFSKQYNCAFIWQKDGVKKLNLYLIINYFKGGKLRFKKIKPEAFEANRFYTVINKKSGEIVPMEVNFNFDDPNLIILPLAFGKRQGREFIWNDLLSLETGSLKLANGRVIEKTLYNRRTRQDEPALFVALTFERREVLDSSNIKPMNLIGVDRGENIPAVIALTDPEGCPLSRFKDSLGNPTHILRIGESYKEKQRTIQAKKEVEQRRAGGYSRKYASKAKNLADDMVRNTARDLLYYAVTQDAMLIFENLSRGFGRQGKRTFMAERQYTRMEDWLTAKLAYEGLPSKTYLSKTAQYTSKTCSNCGFTITSADYDRVLEKLKKTATGWMTTINGKELKVEGQITYYNRYKRQNVVKDLSVELDRLSEESVNNDISSWTKGRSGEALSLLKKRFSHRPVQEKFVCLNCGFETHADEQAALNIARSWLFLRSQEYKKYQTNKTTGNTDKRAFVETWQSFYRKKLKEVWKPAV

SEQ ID NO: 247 - protein, 979 aa, synthetic construct
QEIKRINKIRRRLVKDSNTKKAGKTGPMKTLLVRVMTPDLRERLENLRKKPENIPQPISNTSRANLNKLLTDYTEMKKAILHVYWEEFQKDPVGLMSRVAQPASKKIDQNKLKPEMDEKGNLTTAGFACSQCGQPLFVYKLEQVSEKGKAYTNYFGRCNVAEHEKLILLAQLKPEKDSDEAVTYSLGKFGQRALDFYSIHVTKESTHPVKPLAQIAGNRYASGPVGKALSDACMGTIASFLSKYQDIIIEHQKVVKGNQKRLESLRELAGKENLEYPSVTLPPQPHTKEGVDAYNEVIARVRMWVNLNLWQKLKLSRDDAKPLLRLKGFPSFPLVERQANEVDWWDMVCNVKKLINEKKEDGKVFWQNLAGYKRQEALRPYLSSEEDRKKGKKFARYQLGDLLLHLEKKHGEDWGKVYDEAWERIDKKVEGLSKHIKLEEERRSEDAQSKAALTDWLRAKASFVIEGLKEADKDEFCRCELKLQKWYGDLRGKPFAIEAENSILDISGFSKQYNCAFIWQKDGVKKLNLYLIINYFKGGKLRFKKIKPEAFEANRFYTVINKKSGEIVPMEVNFNFDDPNLIILPLAFGKRQGREFIWNDLLSLETGSLKLANGRVIEKTLYNRRTRQDEPALFVALTFERREVLDSSNIKPMNLIGVDRGENIPAVIALTDPEGCPLSRFKDSLGNPTHILRIGESYKEKQRTIQAKKEVEQRRAGGYSRKYASKAKNLADDMVRNTARDLLYYAVTQDAMLIFENLSRGFGRQGKRTFMAERQYTRMEDWLTAKLAYEGLPSKTYLSKTLAQYTSKTCSNCGFTWITSADYDRVLEKLKKTATGWMTTINGKELKVEGQITYYNRYKRQNVVKDLSVELDRLSEESVNNDISSWTKGRSGEALSLLKKRFSHRPVQEKFVCLNCGFETHADEQAALNIARSWLFLRSQEYKKYQTNKTTGNTDKRAFVETWQSFYRKKLKEVWKPAV

SEQ ID NO: 248 - protein, 979 aa, synthetic construct
QEIKRINKIRRRLVKDSNTKKAGKTGPMKTLLVRVMTPDLRERLENLRKKPENIPQPISNTSRANLNKLLTDYTEMKKAILHVYWEEFQKDPVGLMSRVAQPASKKIDQNKLKPEMDEKGNLTTAGFACSQCGQPLFVYKLEQVSEKGKAYTNYFGRCNVAEHEKLILLAQLKPEKDSDEAVTYSLGKFGQRALDFYSIHVTKESTHPVKPLAQIAGNRYASGPVGKALSDACMGTIASFLSKYQDIIIEHQKVVKGNQKRLESLRELAGKENLEYPSVTLPPQPHTKEGVDAYNEVIARVRMWVNLNLWQKLKLSRDDAKPLLRLKGFPSFPLVERQANEVDWWDMVCNVKKLINEKKEDGKVFWQNLAGYKRQEALRPYLSSEEDRKKGKKFARYQLGDLLLHLEKKHGEDWGKVYDEAWERIDKKVEGLSKHIKLEEERRSEDAQSKAALTDWLRAKASFVIEGLKEADKDEFCRCELKLQKWYGDLRGKPFAIEAENSILDISGFSKQYNCAFIWQKDGVKKLNLYLIINYFKGGKLRFKKIKPEAFEANRFYTVINKKSGEIVPMEVNFNFDDPNLIILPLAFGKRQGREFIWNDLLSLETGSLKLANGRVIEKTLYNRRTRQDEPALFVALTFERREVLDSSNIKPMNLIGVDRGENIPAVIALTDPEGCPLSRFKDSLGNPTHILRIGESYKEKQRTIQAKKEVEQRRAGGYSRKYASKAKNLADDMVRNTARDLLYYAVTQDAMLIFENLSRGFGRQGKRTFMAERQYTRMEDWLTAKLAYEGLPSKTYLSKHTLAQYTSKTCSNCGFTITSADYDRVLEKLKKTATGWMTTINGKELKVEGQITYYNRYKRQNVVKDLSVELDRLSEESVNNDISSWTKGRSGEALSLLKKRFSHRPVQEKFVCLNCGFETHADEQAALNIARSWLFLRSQEYKKYQTNKTTGNTDKRAFVETWQSFYRKKLKEVWKPAV

SEQ ID NO: 249 - protein, 978 aa, synthetic construct
QEIKRINKIRRRLVKDSNTKKAGKTGPMKTLLVRVMTPDLRERLENLRKKPENIPQPISNTSRANLNKLLTDYTEMKKAILHVYWEEFQKDPVGLMSRVAQPASKKIDQNKLKPEMDEKGNLTTAGFACSQCGQPLFVYKLEQVSEKGKAYTNYFGRCNVAEHEKLILLAQLKPEKDSDEAVTYSLGKFGQRALDFYSIHVTKESTHPVKPLAQIAGNRYASGPVGKALSDACMGTIASFLSKYQDIIIEHQKVVKGNQKRLESLRELAGKENLEYPSVTLPPQPHTKEGVDAYNEVIARVRMWVNLNLWQKLKLSRDDAKPLLRLKGFPSFPLVERQANEVDWWDMVCNVKKLINEKKEDGKVFWQNLAGYKRQEALRPYLSSEEDRKKGKKFARYQLGDLLLHLEKKHGEDWGKVYDEAWERIDKKVEGLSKHIKLEEERRSEDAQSKAALTDWLRAKASFVIEGLKEADKDEFCRCELKLQKWYGDLRGKPFAIEAENSILDISGFSKQYNCAFIWQKDGVKKLNLYLIINYFKGGKLRFKKIKPEAFEANRFYTVINKKSGEIVPMEVNFNFDDPNLIILPLAFGKRQGREFIWNDLLSLETGSLKLANGRVIEKTLYNRRTRQDEPALFVALTFERREVLDSSNIKPMNLIGVDRGENIPAVIALTDPEGCPLSRFKDSLGNPTHILRIGESYKEKQRTIQAKKEVEQRRAGGYSRKYASKAKNLADDMVRNTARDLLYYAVTQDAMLIFENLSRGFGRQGKRTFMAERQYTRMEDWLTAKLAYEGLPSKTYLSKTLAQYTSKPCSNCGFTITSADYDRVLEKLKKTATGWMTTINGKELKVEGQITYYNRYKRQNVVKDLSVELDRLSEESVNNDISSWTKGRSGEALSLLKKRFSHRPVQEKFVCLNCGFETHADEQAALNIARSWLFLRSQEYKKYQTNKTTGNTDKRAFVETWQSFYRKKLKEVWKPAV

SEQ ID NO: 250 - protein, 979 aa, synthetic construct
QEIKRINKIRRRLVKDSNTKKAGKTGPMKTLLVRVMTPDLRERLENLRKKPENIPQPISNTSRANLNKLLTDYTEMKKAILHVYWEEFQKDPVGLMSRVAQPASKKIDQNKLKPEMDEKGNLTTAGFACSQCGQPLFVYKLEQVSEKGKAYTNYFGRCNVAEHEKLILLAQLKPEKDSDEAVTYSLGKFGQRALDFYSIHVTKESTHPVKPLAQIAGNRYASGPVGKALSDACMGTIASFLSKYQDIIIEHQKVVKGNQKRLESLRELAGKENLEYPSVTLPPQPHTKEGVDAYNEVIARVRMWVNLNLWQKLKLSRDDAKPLLRLKGFPSFPLVERQANEVDWWDMVCNVKKLINEKKEDGKVFWQNLAGYKRQEALRPYLSSEEDRKKGKKFARYQLGDLLLHLEKKHGEDWGKVYDEAWERIDKKVEGLSKHIKLEEERRSEDAQSKAALTDWLRAKASFVIEGLKEADKDEFCRCELKLQKWYGDLRGKPFAIEAENSILDISGFSKQYNCAFIWQKDGVKKLNLYLIINYFKGGKLRFKKIKPEAFEANRFYTVINKKSGEIVPMEVNFNFDDPNLIILPLAFGKRQGREFIWNDLLSLETGSLKLANGRVIEKTLYNRRTRQDEPALFVALTFERREVLDSSNIKPMNLIGVDRGENIPAVIALTDPEGCPLSRFKDSLGNPTHILRIGESYKEKQRTIQAKKEVEQRRAGGYSRKYASKAKNLADDMVRNTARDLLYYAVTQDAMLIFENLSRGFGRQGKRTFMAERQYTRMEDWLTAKLAYEGLPSKTYLSKTLAAQYTSKTCSNCGFTITSADYDRVLEKLKKTATGWMTTINGKELKVEGQITYYNRYKRQNVVKDLSVELDRLSEESVNNDISSWTKGRSGEALSLLKKRFSHRPVQEKFVCLNCGFETHADEQAALNIARSWLFLRSQEYKKYQTNKTTGNTDKRAFVETWQSFYRKKLKEVWKPAV

SEQ ID NO: 251 - protein, 979 aa, synthetic construct
QEIKRINKIRRRLVKDSNTKKAGKTGPMKTLLVRVMTPDLRERLENLRKKPENIPQPISNTSRANLNKLLTDYTEMKKAILHVYWEEFQKDPVGLMSRVAQPASKKIDQNKLKPEMDEKGNLTTAGFACSQCGQPLFVYKLEQVSEKGKAYTNYFGRCNVAEHEKLILLAQLKPEKDSDEAVTYSLGKFGQRALDFYSIHVTKESTHPVKPLAQIAGNRYASGPVGKALSDACMGTIASFLSKYQDIIIEHQKVVKGNQKRLESLRELAGKENLEYPSVTLPPQPHTKEGVDAYNEVIARVRMWVNLNLWQKLKLSRDDAKPLLRLKGFPSFPLVERQANEVDWWDMVCNVKKLINEKKEDGKVFWQNLAGYKRQEALRPYLSSEEDRKKGKKFARYQLGDLLLHLEKKHGEDWGKVYDEAWERIDKKVEGLSKHIKLEEERRSEDAQSKAALTDWLRAKASFVIEGLKEADKDEFCRCELKLQKWYGDLRGKPFAIEAENSILDISGFSKQYNCAFIWQKDGVKKLNLYLIINYFKGGKLRFKKIKPEAFEANRFYTVINKKSGEIVPMEVNFNFDDPNLIILPLAFGKRQGREFIWNDLLSLETGSLKLANGRVIEKTLYNRRTRQDEPALFVALTFERREVLDSSNIKPMNLIGVDRGENIPAVIALTDPEGCPLSRFKDSLGNPTHILRIGESYKEKQRTIQAKKEVEQRRAGGYSRKYASKAKNLADDMVRNTARDLLYYAVTQDAMLIFENLSRGFGRQGKRTFMAERQYTRMEDWLTAKLAYEGLPSKTYLSKTLAQYTSKTCSNCGGFTITSADYDRVLEKLKKTATGWMTTINGKELKVEGQITYYNRYKRQNVVKDLSVELDRLSEESVNNDISSWTKGRSGEALSLLKKRFSHRPVQEKFVCLNCGFETHADEQAALNIARSWLFLRSQEYKKYQTNKTTGNTDKRAFVETWQSFYRKKLKEVWKPAV

SEQ ID NO: 252 - protein, 979 aa, synthetic construct
QEIKRINKIRRRLVKDSNTKKAGKTGPMKTLLVRVMTPDLRERLENLRKKPENIPQPISNTSRANLNKLLTDYTEMKKAILHVYWEEFQKDPVGLMSRVAQPASKKIDQNKLKPEMDEKGNLTTAGFACSQCGQPLFVYKLEQVSEKGKAYTNYFGRCNVAEHEKLILLAQLKPEKDSDEAVTYSLGKFGQRALDFYSIHVTKESTHPVKPLAQIAGNRYASGPVGKALSDACMGTIASFLSKYQDIIIEHQKVVKGNQKRLESLRELAGKENLEYPSVTLPPQPHTKEGVDAYNEVIARVRMWVNLNLWQKLKLSRDDAKPLLRLKGFPSFPLVERQANEVDWWDMVCNVKKLINEKKEDGKVFWQNLAGYKRQEALRPYLSSEEDRKKGKKFARYQLGDLLLHLEKKHGEDWGKVYDEAWERIDKKVEGLSKHIKLEEERRSEDAQSKAALTDWLRAKASFVIEGLKEADKDEFCRCELKLQKWYGDLRGKPFAIEAENSILDISGFSKQYNCAFIWQKDGVKKLNLYLIINYFKGGKLRFKKIKPEAFEANRFYTVINKKSGEIVPMEVNFNFDDPNLIILPLAFGKRQGREFIWNDLLSLETGSLKLANGRVIEKTLYNRRTRQDEPALFVALTFERREVLDSSNIKPMNLIGVDRGENIPAVIALTDPEGCPLSRFKDSLGNPTHILRIGESYKEKQRTIQAKKEVEQRRAGGYSRKYASKAKNLADDMVRNTARDLLYYAVTQDAMLIFENLSRGFGRQGKRTFMAERQYTRMEDWLTAKLAYEGLPSKTYLSKTLFAQYTSKTCSNCGFTITSADYDRVLEKLKKTATGWMTTINGKELKVEGQITYYNRYKRQNVVKDLSVELDRLSEESVNNDISSWTKGRSGEALSLLKKRFSHRPVQEKFVCLNCGFETHADEQAALNIARSWLFLRSQEYKKYQTNKTTGNTDKRAFVETWQSFYRKKLKEVWKPAV

SEQ ID NO: 253 - protein, 979 aa, synthetic construct
QEIKRINKIRRRLVKDSNTKKAGKTGPMKTLLVRVMTPDLRERLENLRKKPENIPQPISNTSRANLNKLLTDYTEMKKAILHVYWEEFQKDPVGLMSRVAQPASKKIDQNKLKPEMDEKGNLTTAGFACSQCGQPLFVYKLEQVSEKGKAYTNYFGRCNVAEHEKLILLAQLKPEKDSDEAVTYSLGKFGQRALDFYSIHVTKESTHPVKPLAQIAGNRYASGPVGKALSDACMGTIASFLSKYQDIIIEHQKVVKGNQKRLESLRELAGKENLEYPSVTLPPQPHTKEGVDAYNEVIARVRMWVNLNLWQKLKLSRDDAKPLLRLKGFPSFPLVERQANEVDWWDMVCNVKKLINEKKEDGKVFWQNLAGYKRQEALRPYLSSEEDRKKGKKFARYQLGDLLLHLEKKHGEDWGKVYDEAWERIDKKVEGLSKHIKLEEERRSEDAQSKAALTDWLRAKASFVIEGLKEADKDEFCRCELKLQKWYGDLRGKPFAIEAENSILDISGFSKQYNCAFIWQKDGVKKLNLYLIINYFKGGKLRFKKIKPEAFEANRFYTVINKKSGEIVPMEVNFNFDDPNLIILPLAFGKRQGREFIWNDLLSLETGSLKLANGRVIEKTLYNRRTRQDEPALFVALTFERREVLDSSNIKPMNLIGVDRGENIPAVIALTDPEGCPLSRFKDSLGNPTHILRIGESYKEKQRTIQAKKEVEQRRAGGYSRKYASKAKNLADDMVRNTARDLLYYAVTQDAMLIFENLSRGFGRQGKRTFMAERQYTRMEDWLTAKLAYEGLPSKTYLSKTLAQYTSKNTCSNCGFTITSADYDRVLEKLKKTATGWMTTINGKELKVEGQITYYNRYKRQNVVKDLSVELDRLSEESVNNDISSWTKGRSGEALSLLKKRFSHRPVQEKFVCLNCGFETHADEQAALNIARSWLFLRSQEYKKYQTNKTTGNTDKRAFVETWQSFYRKKLKEVWKPAV

SEQ ID NO: 254 - protein, 978 aa, synthetic construct
QEIKRINKIRRRLVKDSNTKKAGKTGPMKTLLVRVMTPDLRERLENLRKKPENIPQPISNTSRANLNKLLTDYTEMKKAILHVYWEEFQKDPVGLMSRVAQPASKKIDQNKLKPEMDEKGNLTTAGFACSQCGQPLFVYKLEQVSEKGKAYTNYFGRCNVAEHEKLILLAQLKPEKDSDEAVTYSLGKFGQRALDFYSIHVTKESTHPVKPLAQIAGNRYASGPVGKALSDACMGTIASFLSKYQDIIIEHQKVVKGNQKRLESLRELAGKENLEYPSVTLPPQPHTKEGVDAYNEVIARVRMWVNLNLWQKLKLSRDDAKPLLRLKGFPSFPLVERQANEVDWWDMVCNVKKLINEKKEDGKVFWQNLAGYKRQEALRPYLSSEEDRKKGKKFARYQLGDLLLHLEKKHGEDWGKVYDEAWERIDKKVEGLSKHIKLEEERRSEDAQSKAALTDWLRAKASFVIEGLKEADKDEFCRCELKLQKWYGDLRGKPFAIEAENSILDISGFSKQYNCAFIWQKDGVKKLNLYLIINYFKGGKLRFKKIKPEAFEANRFYTVINKKSGEIVPMEVNFNFDDPNLIILPLAFGKRQGREFIWNDLLSLETGSLKLANGRVIEKTLYNRRTRQDEPALFVALTFERREVLDSSNIKPMNLIGVDRGENIPAVIALTDPEGCPLSRFKDSLGNPTHILRIGESYKEKQRTIQAKKEVEQRRAGGYSRKYASKAKNLADDMVRNTARDLLYYAVTQDAMLIFENLSRGFGRQGKRTFMAERQYTRMEDWLTAKLAYEGLPSKTYLSKTLAQYTSKTCSNCGPTITSADYDRVLEKLKKTATGWMTTINGKELKVEGQITYYNRYKRQNVVKDLSVELDRLSEESVNNDISSWTKGRSGEALSLLKKRFSHRPVQEKFVCLNCGFETHADEQAALNIARSWLFLRSQEYKKYQTNKTTGNTDKRAFVETWQSFYRKKLKEVWKPAV

SEQ ID NO: 255 - protein, 979 aa, synthetic construct
QEIKRINKIRRRLVKDSNTKKAGKTGPMKTLLVRVMTPDLRERLENLRKKPENIPQPISNTSRANLNKLLTDYTEMKKAILHVYWEEFQKDPVGLMSRVAQPASKKIDQNKLKPEMDEKGNLTTAGFACSQCGQPLFVYKLEQVSEKGKAYTNYFGRCNVAEHEKLILLAQLKPEKDSDEAVTYSLGKFGQRALDFYSIHVTKESTHPVKPLAQIAGNRYASGPVGKALSDACMGTIASFLSKYQDIIIEHQKVVKGNQKRLESLRELAGKENLEYPSVTLPPQPHTKEGVDAYNEVIARVRMWVNLNLWQKLKLSRDDAKPLLRLKGFPSFPLVERQANEVDWWDMVCNVKKLINEKKEDGKVFWQNLAGYKRQEALRPYLSSEEDRKKGKKFARYQLGDLLLHLEKKHGEDWGKVYDEAWERIDKKVEGLSKHIKLEEERRSEDAQSKAALTDWLRAKASFVIEGLKEADKDEFCRCELKLQKWYGDLRGKPFAIEAENSILDISGFSKQYNCAFIWQKDGVKKLNLYLIINYFKGGKLRFKKIKPEAFEANRFYTVINKKSGEIVPMEVNFNFDDPNLIILPLAFGKRQGREFIWNDLLSLETGSLKLANGRVIEKTLYNRRTRQDEPALFVALTFERREVLDSSNIKPMNLIGVDRGENIPAVIALTDPEGCPLSRFKDSLGNPTHILRIGESYKEKQRTIQAKKEVEQRRAGGYSRKYASKAKNLADDMVRNTARDLLYYAVTQDAMLIFENLSRGFGRQGKRTFMAERQYTRMEDWLTAKLAYEGLPSKTYLSKTWLAQYTSKTCSNCGFTITSADYDRVLEKLKKTATGWMTTINGKELKVEGQITYYNRYKRQNVVKDLSVELDRLSEESVNNDISSWTKGRSGEALSLLKKRFSHRPVQEKFVCLNCGFETHADEQAALNIARSWLFLRSQEYKKYQTNKTTGNTDKRAFVETWQSFYRKKLKEVWKPAV

SEQ ID NO: 256 - protein, 978 aa, synthetic construct
QEIKRINKIRRRLVKDSNTKKAGKTGPMKTLLVRVMTPDLRERLENLRKKPENIPQPISNTSRANLNKLLTDYTEMKKAILHVYWEEFQKDPVGLMSRVAQPASKKIDQNKLKPEMDEKGNLTTAGFACSQCGQPLFVYKLEQVSEKGKAYTNYFGRCNVAEHEKLILLAQLKPEKDSDEAVTYSLGKFGQRALDFYSIHVTKESTHPVKPLAQIAGNRYASGPVGKALSDACMGTIASFLSKYQDIIIEHQKVVKGNQKRLESLRELAGKENLEYPSVTLPPQPHTKEGVDAYNEVIARVRMWVNLNLWQKLKLSRDDAKPLLRLKGFPSFPLVERQANEVDWWDMVCNVKKLINEKKEDGKVFWQNLAGYKRQEALRPYLSSEEDRKKGKKFARYQLGDLLLHLEKKHGEDWGKVYDEAWERIDKKVEGLSKHIKLEEERRSEDAQSKAALTDWLRAKASFVIEGLKEADKDEFCRCELKLQKWYGDLRGKPFAIEAENSILDISGFSKQYNCAFIWQKDGVKKLNLYLIINYFKGGKLRFKKIKPEAFEANRFYTVINKKSGEIVPMEVNFNFDDPNLIILPLAFGKRQGREFIWNDLLSLETGSLKLANGRVIEKTLYNRRTRQDEPALFVALTFERREVLDSSNIKPMNLIGVDRGENIPAVIALTDPEGCPLSRFKDSLGNPTHILRIGESYKEKQRTIQAKKEVEQRRAGGYSRKYASKAKNLADDMVRNTARDLLYYAVTQDAMLIFENLSRGFGRQGKRTFMAERQYTRMEDWLTAKLAYEGLPSKTYLSKTLAQYTSKTMSNCGFTITSADYDRVLEKLKKTATGWMTTINGKELKVEGQITYYNRYKRQNVVKDLSVELDRLSEESVNNDISSWTKGRSGEALSLLKKRFSHRPVQEKFVCLNCGFETHADEQAALNIARSWLFLRSQEYKKYQTNKTTGNTDKRAFVETWQSFYRKKLKEVWKPAV

SEQ ID NO: 257 - protein, 977 aa, synthetic construct
QEIKRINKIRRRLVKDSNTKKAGKTGPMKTLLVRVMTPDLRERLENLRKKPENIPQPISNTSRANLNKLLTDYTEMKKAILHVYWEEFQKDPVGLMSRVAQPASKKIDQNKLKPEMDEKGNLTTAGFACSQCGQPLFVYKLEQVSEKGKAYTNYFGRCNVAEHEKLILLAQLKPEKDSDEAVTYSLGKFGQRALDFYSIHVTKESTHPVKPLAQIAGNRYASGPVGKALSDACMGTIASFLSKYQDIIIEHQKVVKGNQKRLESLRELAGKENLEYPSVTLPPQPHTKEGVDAYNEVIARVRMWVNLNLWQKLKLSRDDAKPLLRLKGFPSFPLVERQANEVDWWDMVCNVKKLINEKKEDGKVFWQNLAGYKRQEALRPYLSSEEDRKKGKKFARYQLGDLLLHLEKKHGEDWGKVYDEAWERIDKKVEGLSKHIKLEEERRSEDAQSKAALTDWLRAKASFVIEGLKEADKDEFCRCELKLQKWYGDLRGKPFAIEAENSILDISGFSKQYNCAFIWQKDGVKKLNLYLIINYFKGGKLRFKKIKPEAFEANRFYTVINKKSGEIVPMEVNFNFDDPNLIILPLAFGKRQGREFIWNDLLSLETGSLKLANGRVIEKTLYNRRTRQDEPALFVALTFERREVLDSSNIKPMNLIGVDRGENIPAVIALTDPEGCPLSRFKDSLGNPTHILRIGESYKEKQRTIQAKKEVEQRRAGGYSRKYASKAKNLADDMVRNTARDLLYYAVTQDAMLIFENLSRGFGRQGKRTFMAERQYTRMEDWLTAKLAYEGLPSKTYLSKTLAQYTSKTCSCGFTITSADYDRVLEKLKKTATGWMTTINGKELKVEGQITYYNRYKRQNVVKDLSVELDRLSEESVNNDISSWTKGRSGEALSLLKKRFSHRPVQEKFVCLNCGFETHADEQAALNIARSWLFLRSQEYKKYQTNKTTGNTDKRAFVETWQSFYRKKLKEVWKPAV

SEQ ID NO: 258 - protein, 979 aa, synthetic construct
QEIKRINKIRRRLVKDSNTKKAGKTGPMKTLLVRVMTPDLRERLENLRKKPENIPQPISNTSRANLNKLLTDYTEMKKAILHVYWEEFQKDPVGLMSRVAQPASKKIDQNKLKPEMDEKGNLTTAGFACSQCGQPLFVYKLEQVSEKGKAYTNYFGRCNVAEHEKLILLAQLKPEKDSDEAVTYSLGKFGQRALDFYSIHVTKESTHPVKPLAQIAGNRYASGPVGKALSDACMGTIASFLSKYQDIIIEHQKVVKGNQKRLESLRELAGKENLEYPSVTLPPQPHTKEGVDAYNEVIARVRMWVNLNLWQKLKLSRDDAKPLLRLKGFPSFPLVERQANEVDWWDMVCNVKKLINEKKEDGKVFWQNLAGYKRQEALRPYLSSEEDRKKGKKFARYQLGDLLLHLEKKHGEDWGKVYDEAWERIDKKVEGLSKHIKLEEERRSEDAQSKAALTDWLRAKASFVIEGLKEADKDEFCRCELKLQKWYGDLRGKPFAIEAENSILDISGFSKQYNCAFIWQKDGVKKLNLYLIINYFKGGKLRFKKIKPEAFEANRFYTVINKKSGEIVPMEVNFNFDDPNLIILPLAFGKRQGREFIWNDLLSLETGSLKLANGRVIEKTLYNRRTRQDEPALFVALTFERREVLDSSNIKPMNLIGVDRGENIPAVIALTDPEGCPLSRFKDSLGNPTHILRIGESYKEKQRTIQAKKEVEQRRAGGYSRKYASKAKNLADDMVRNTARDLLYYAVTQDAMLIFENLSRGFGRQGKRTFMAERQYTRMEDWLTAKLAYEGLPSKTYLSKTLAQYTSKTCSVNCGFTITSADYDRVLEKLKKTATGWMTTINGKELKVEGQITYYNRYKRQNVVKDLSVELDRLSEESVNNDISSWTKGRSGEALSLLKKRFSHRPVQEKFVCLNCGFETHADEQAALNIARSWLFLRSQEYKKYQTNKTTGNTDKRAFVETWQSFYRKKLKEVWKPAV

SEQ ID NO: 259 - protein, 978 aa, synthetic construct
QEIKRINKIRRRLVKDSNTKKAGKTGPMKTLLVRVMTPDLRERLENLRKKPENIPQPISNTSRANLNKLLTDYTEMKKAILHVYWEEFQKDPVGLMSRVAQPASKKIDQNKLKPEMDEKGNLTTAGFACSQCGQPLFVYKLEQVSEKGKAYTNYFGRCNVAEHEKLILLAQLKPEKDSDEAVTYSLGKFGQRALDFYSIHVTKESTHPVKPLAQIAGNRYASGPVGKALSDACMGTIASFLSKYQDIIIEHQKVVKGNQKRLESLRELAGKENLEYPSVTLPPQPHTKEGVDAYNEVIARVRMWVNLNLWQKLKLSRDDAKPLLRLKGFPSFPLVERQANEVDWWDMVCNVKKLINEKKEDGKVFWQNLAGYKRQEALRPYLSSEEDRKKGKKFARYQLGDLLLHLEKKHGEDWGKVYDEAWERIDKKVEGLSKHIKLEEERRSEDAQSKAALTDWLRAKASFVIEGLKEADKDEFCRCELKLQKWYGDLRGKPFAIEAENSILDISGFSKQYNCAFIWQKDGVKKLNLYLIINYFKGGKLRFKKIKPEAFEANRFYTVINKKSGEIVPMEVNFNFDDPNLIILPLAFGKRQGREFIWNDLLSLETGSLKLANGRVIEKTLYNRRTRQDEPALFVALTFERREVLDSSNIKPMNLIGVDRGENIPAVIALTDPEGCPLSRFKDSLGNPTHILRIGESYKEKQRTIQAKKEVEQRRAGGYSRKYASKAKNLADDMVRNTARDLLYYAVTQDAMLIFENLSRGFGRQGKRTFMAERQYTRMEDWLTAKLAYEGLPSKTYLSKTLAQYTPKTCSNCGFTITSADYDRVLEKLKKTATGWMTTINGKELKVEGQITYYNRYKRQNVVKDLSVELDRLSEESVNNDISSWTKGRSGEALSLLKKRFSHRPVQEKFVCLNCGFETHADEQAALNIARSWLFLRSQEYKKYQTNKTTGNTDKRAFVETWQSFYRKKLKEVWKPAV

SEQ ID NO: 260 - protein, 979 aa, synthetic construct
QEIKRINKIRRRLVKDSNTKKAGKTGPMKTLLVRVMTPDLRERLENLRKKPENIPQPISNTSRANLNKLLTDYTEMKKAILHVYWEEFQKDPVGLMSRVAQPASKKIDQNKLKPEMDEKGNLTTAGFACSQCGQPLFVYKLEQVSEKGKAYTNYFGRCNVAEHEKLILLAQLKPEKDSDEAVTYSLGKFGQRALDFYSIHVTKESTHPVKPLAQIAGNRYASGPVGKALSDACMGTIASFLSKYQDIIIEHQKVVKGNQKRLESLRELAGKENLEYPSVTLPPQPHTKEGVDAYNEVIARVRMWVNLNLWQKLKLSRDDAKPLLRLKGFPSFPLVERQANEVDWWDMVCNVKKLINEKKEDGKVFWQNLAGYKRQEALRPYLSSEEDRKKGKKFARYQLGDLLLHLEKKHGEDWGKVYDEAWERIDKKVEGLSKHIKLEEERRSEDAQSKAALTDWLRAKASFVIEGLKEADKDEFCRCELKLQKWYGDLRGKPFAIEAENSILDISGFSKQYNCAFIWQKDGVKKLNLYLIINYFKGGKLRFKKIKPEAFEANRFYTVINKKSGEIVPMEVNFNFDDPNLIILPLAFGKRQGREFIWNDLLSLETGSLKLANGRVIEKTLYNRRTRQDEPALFVALTFERREVLDSSNIKPMNLIGVDRGENIPAVIALTDPEGCPLSRFKDSLGNPTHILRIGESYKEKQRTIQAKKEVEQRRAGGYSRKYASKAKNLADDMVRNTARDLLYYAVTQDAMLIFENLSRGFGRQGKRTFMAERQYTRMEDWPLTAKLAYEGLPSKTYLSKTLAQYTSKTCSNCGFTITSADYDRVLEKLKKTATGWMTTINGKELKVEGQITYYNRYKRQNVVKDLSVELDRLSEESVNNDISSWTKGRSGEALSLLKKRFSHRPVQEKFVCLNCGFETHADEQAALNIARSWLFLRSQEYKKYQTNKTTGNTDKRAFVETWQSFYRKKLKEVWKPAV

SEQ ID NO: 261 - protein, 979 aa, synthetic construct
QEIKRINKIRRRLVKDSNTKKAGKTGPMKTLLVRVMTPDLRERLENLRKKPENIPQPISNTSRANLNKLLTDYTEMKKAILHVYWEEFQKDPVGLMSRVAQPASKKIDQNKLKPEMDEKGNLTTAGFACSQCGQPLFVYKLEQVSEKGKAYTNYFGRCNVAEHEKLILLAQLKPEKDSDEAVTYSLGKFGQRALDFYSIHVTKESTHPVKPLAQIAGNRYASGPVGKALSDACMGTIASFLSKYQDIIIEHQKVVKGNQKRLESLRELAGKENLEYPSVTLPPQPHTKEGVDAYNEVIARVRMWVNLNLWQKLKLSRDDAKPLLRLKGFPSFPLVERQANEVDWWDMVCNVKKLINEKKEDGKVFWQNLAGYKRQEALRPYLSSEEDRKKGKKFARYQLGDLLLHLEKKHGEDWGKVYDEAWERIDKKVEGLSKHIKLEEERRSEDAQSKAALTDWLRAKASFVIEGLKEADKDEFCRCELKLQKWYGDLRGKPFAIEAENSILDISGFSKQYNCAFIWQKDGVKKLNLYLIINYFKGGKLRFKKIKPEAFEANRFYTVINKKSGEIVPMEVNFNFDDPNLIILPLAFGKRQGREFIWNDLLSLETGSLKLANGRVIEKTLYNRRTRQDEPALFVALTFERREVLDSSNIKPMNLIGVDRGENIPAVIALTDPEGCPLSRFKDSLGNPTHILRIGESYKEKQRTIQAKKEVEQRRAGGYSRKYASKAKNLADDMVRNTARDLLYYAVTQDAMLIFENLSRGFGRQGKRTFMAERQYTRMEDWLTAKLAYEGLPSKTYLSKTLAQYTSKTCMSNCGFTITSADYDRVLEKLKKTATGWMTTINGKELKVEGQITYYNRYKRQNVVKDLSVELDRLSEESVNNDISSWTKGRSGEALSLLKKRFSHRPVQEKFVCLNCGFETHADEQAALNIARSWLFLRSQEYKKYQTNKTTGNTDKRAFVETWQSFYRKKLKEVWKPAV

SEQ ID NO: 262 - protein, 979 aa, synthetic construct
QEIKRINKIRRRLVKDSNTKKAGKTGPMKTLLVRVMTPDLRERLENLRKKPENIPQPISNTSRANLNKLLTDYTEMKKAILHVYWEEFQKDPVGLMSRVAQPASKKIDQNKLKPEMDEKGNLTTAGFACSQCGQPLFVYKLEQVSEKGKAYTNYFGRCNVAEHEKLILLAQLKPEKDSDEAVTYSLGKFGQRALDFYSIHVTKESTHPVKPLAQIAGNRYASGPVGKALSDACMGTIASFLSKYQDIIIEHQKVVKGNQKRLESLRELAGKENLEYPSVTLPPQPHTKEGVDAYNEVIARVRMWVNLNLWQKLKLSRDDAKPLLRLKGFPSFPLVERQANEVDWWDMVCNVKKLINEKKEDGKVFWQNLAGYKRQEALRPYLSSEEDRKKGKKFARYQLGDLLLHLEKKHGEDWGKVYDEAWERIDKKVEGLSKHIKLEEERRSEDAQSKAALTDWLRAKASFVIEGLKEADKDEFCRCELKLQKWYGDLRGKPFAIEAENSILDISGFSKQYNCAFIWQKDGVKKLNLYLIINYFKGGKLRFKKIKPEAFEANRFYTVINKKSGEIVPMEVNFNFDDPNLIILPLAFGKRQGREFIWNDLLSLETGSLKLANGRVIEKTLYNRRTRQDEPALFVALTFERREVLDSSNIKPMNLIGVDRGENIPAVIALTDPEGCPLSRFKDSLGNPTHILRIGESYKEKQRTIQAKKEVEQRRAGGYSRKYASKAKNLADDMVRNTARDLLYYAVTQDAMLIFENLSRGFGRQGKRTFMAERQYTRMEDWLTAKLARYEGLPSKTYLSKTLAQYTSKTCSNCGFTITSADYDRVLEKLKKTATGWMTTINGKELKVEGQITYYNRYKRQNVVKDLSVELDRLSEESVNNDISSWTKGRSGEALSLLKKRFSHRPVQEKFVCLNCGFETHADEQAALNIARSWLFLRSQEYKKYQTNKTTGNTDKRAFVETWQSFYRKKLKEVWKPAV

SEQ ID NO: 263 - protein, 978 aa, synthetic construct
QEIKRINKIRRRLVKDSNTKKAGKTGPMKTLLVRVMTPDLRERLENLRKKPENIPQPISNTSRANLNKLLTDYTEMKKAILHVYWEEFQKDPVGLMSRVAQPASKKIDQNKLKPEMDEKGNLTTAGFACSQCGQPLFVYKLEQVSEKGKAYTNYFGRCNVAEHEKLILLAQLKPEKDSDEAVTYSLGKFGQRALDFYSIHVTKESTHPVKPLAQIAGNRYASGPVGKALSDACMGTIASFLSKYQDIIIEHQKVVKGNQKRLESLRELAGKENLEYPSVTLPPQPHTKEGVDAYNEVIARVRMWVNLNLWQKLKLSRDDAKPLLRLKGFPSFPLVERQANEVDWWDMVCNVKKLINEKKEDGKVFWQNLAGYKRQEALRPYLSSEEDRKKGKKFARYQLGDLLLHLEKKHGEDWGKVYDEAWERIDKKVEGLSKHIKLEEERRSEDAQSKAALTDWLRAKASFVIEGLKEADKDEFCRCELKLQKWYGDLRGKPFAIEAENSILDISGFSKQYNCAFIWQKDGVKKLNLYLIINYFKGGKLRFKKIKPEAFEANRFYTVINKKSGEIVPMEVNFNFDDPNLIILPLAFGKRQGREFIWNDLLSLETGSLKLANGRVIEKTLYNRRTRQDEPALFVALTFERREVLDSSNIKPMNLIGVDRGENIPAVIALTDPEGCPLSRFKDSLGNPTHILRIGESYKEKQRTIQAKKEVEQRRAGGYSRKYASKAKNLADDMVRNTARDLLYYAVTQDAMLIFENLSRGFGRQGKRTFMAERQYTRMEDWLTAKLAYEGLPSKTYLSKTLAQYFSKTCSNCGFTITSADYDRVLEKLKKTATGWMTTINGKELKVEGQITYYNRYKRQNVVKDLSVELDRLSEESVNNDISSWTKGRSGEALSLLKKRFSHRPVQEKFVCLNCGFETHADEQAALNIARSWLFLRSQEYKKYQTNKTTGNTDKRAFVETWQSFYRKKLKEVWKPAV

SEQ ID NO: 264 - protein, 977 aa, synthetic construct
QEIKRINKIRRRLVKDSNTKKAGKTGPMKTLLVRVMTPDLRERLENLRKKPENIPQPISNTSRANLNKLLTDYTEMKKAILHVYWEEFQKDPVGLMSRVAQPASKKIDQNKLKPEMDEKGNLTTAGFACSQCGQPLFVYKLEQVSEKGKAYTNYFGRCNVAEHEKLILLAQLKPEKDSDEAVTYSLGKFGQRALDFYSIHVTKESTHPVKPLAQIAGNRYASGPVGKALSDACMGTIASFLSKYQDIIIEHQKVVKGNQKRLESLRELAGKENLEYPSVTLPPQPHTKEGVDAYNEVIARVRMWVNLNLWQKLKLSRDDAKPLLRLKGFPSFPLVERQANEVDWWDMVCNVKKLINEKKEDGKVFWQNLAGYKRQEALRPYLSSEEDRKKGKKFARYQLGDLLLHLEKKHGEDWGKVYDEAWERIDKKVEGLSKHIKLEEERRSEDAQSKAALTDWLRAKASFVIEGLKEADKDEFCRCELKLQKWYGDLRGKPFAIEAENSILDISGFSKQYNCAFIWQKDGVKKLNLYLIINYFKGGKLRFKKIKPEAFEANRFYTVINKKSGEIVPMEVNFNFDDPNLIILPLAFGKRQGREFIWNDLLSLETGSLKLANGRVIEKTLYNRRTRQDEPALFVALTFERREVLDSSNIKPMNLIGVDRGENIPAVIALTDPEGCPLSRFKDSLGNPTHILRIGESYKEKQRTIQAKKEVEQRRAGGYSRKYASKAKNLADDMVRNTARDLLYYAVTQDAMLIFENLSRGFGRQGKRTFMAERQYTRMEDWLTAKAYEGLPSKTYLSKTLAQYTSKTCSNCGFTITSADYDRVLEKLKKTATGWMTTINGKELKVEGQITYYNRYKRQNVVKDLSVELDRLSEESVNNDISSWTKGRSGEALSLLKKRFSHRPVQEKFVCLNCGFETHADEQAALNIARSWLFLRSQEYKKYQTNKTTGNTDKRAFVETWQSFYRKKLKEVWKPAV

SEQ ID NO: 265 - protein, 978 aa, synthetic construct
QEIKRINKIRRRLVKDSNTKKAGKTGPMKTLLVRVMTPDLRERLENLRKKPENIPQPISNTSRANLNKLLTDYTEMKKAILHVYWEEFQKDPVGLMSRVAQPASKKIDQNKLKPEMDEKGNLTTAGFACSQCGQPLFVYKLEQVSEKGKAYTNYFGRCNVAEHEKLILLAQLKPEKDSDEAVTYSLGKFGQRALDFYSIHVTKESTHPVKPLAQIAGNRYASGPVGKALSDACMGTIASFLSKYQDIIIEHQKVVKGNQKRLESLRELAGKENLEYPSVTLPPQPHTKEGVDAYNEVIARVRMWVNLNLWQKLKLSRDDAKPLLRLKGFPSFPLVERQANEVDWWDMVCNVKKLINEKKEDGKVFWQNLAGYKRQEALRPYLSSEEDRKKGKKFARYQLGDLLLHLEKKHGEDWGKVYDEAWERIDKKVEGLSKHIKLEEERRSEDAQSKAALTDWLRAKASFVIEGLKEADKDEFCRCELKLQKWYGDLRGKPFAIEAENSILDISGFSKQYNCAFIWQKDGVKKLNLYLIINYFKGGKLRFKKIKPEAFEANRFYTVINKKSGEIVPMEVNFNFDDPNLIILPLAFGKRQGREFIWNDLLSLETGSLKLANGRVIEKTLYNRRTRQDEPALFVALTFERREVLDSSNIKPMNLIGVDRGENIPAVIALTDPEGCPLSRFKDSLGNPTHILRIGESYKEKQRTIQAKKEVEQRRAGGYSRKYASKAKNLADDMVRNTARDLLYYAVTQDAMLIFENLSRGFGRQGKRTFMAERQYTRMEDWLTAKLAYEGLPSQTYLSKTLAQYTSKTCSNCGFTITSADYDRVLEKLKKTATGWMTTINGKELKVEGQITYYNRYKRQNVVKDLSVELDRLSEESVNNDISSWTKGRSGEALSLLKKRFSHRPVQEKFVCLNCGFETHADEQAALNIARSWLFLRSQEYKKYQTNKTTGNTDKRAFVETWQSFYRKKLKEVWKPAV

SEQ ID NO: 266 - protein, 978 aa, synthetic construct
QEIKRINKIRRRLVKDSNTKKAGKTGPMKTLLVRVMTPDLRERLENLRKKPENIPQPISNTSRANLNKLLTDYTEMKKAILHVYWEEFQKDPVGLMSRVAQPASKKIDQNKLKPEMDEKGNLTTAGFACSQCGQPLFVYKLEQVSEKGKAYTNYFGRCNVAEHEKLILLAQLKPEKDSDEAVTYSLGKFGQRALDFYSIHVTKESTHPVKPLAQIAGNRYASGPVGKALSDACMGTIASFLSKYQDIIIEHQKVVKGNQKRLESLRELAGKENLEYPSVTLPPQPHTKEGVDAYNEVIARVRMWVNLNLWQKLKLSRDDAKPLLRLKGFPSFPLVERQANEVDWWDMVCNVKKLINEKKEDGKVFWQNLAGYKRQEALRPYLSSEEDRKKGKKFARYQLGDLLLHLEKKHGEDWGKVYDEAWERIDKKVEGLSKHIKLEEERRSEDAQSKAALTDWLRAKASFVIEGLKEADKDEFCRCELKLQKWYGDLRGKPFAIEAENSILDISGFSKQYNCAFIWQKDGVKKLNLYLIINYFKGGKLRFKKIKPEAFEANRFYTVINKKSGEIVPMEVNFNFDDPNLIILPLAFGKRQGREFIWNDLLSLETGSLKLANGRVIEKTLYNRRTRQDEPALFVALTFERREVLDSSNIKPMNLIGVDRGENIPAVIALTDPEGCPLSRFKDSLGNPTHILRIGESYKEKQRTIQAKKEVEQRRAGGYSRKYASKAKNLADDMVRNTARDLLYYAVTQDAMLIFENLSRGFGRQGKRTFMAERQYTRMEDWLTAKLAYNGLPSKTYLSKTLAQYTSKTCSNCGFTITSADYDRVLEKLKKTATGWMTTINGKELKVEGQITYYNRYKRQNVVKDLSVELDRLSEESVNNDISSWTKGRSGEALSLLKKRFSHRPVQEKFVCLNCGFETHADEQAALNIARSWLFLRSQEYKKYQTNKTTGNTDKRAFVETWQSFYRKKLKEVWKPAV

SEQ ID NO: 267 - protein, 979 aa, synthetic construct
QEIKRINKIRRRLVKDSNTKKAGKTGPMKTLLVRVMTPDLRERLENLRKKPENIPQPISNTSRANLNKLLTDYTEMKKAILHVYWEEFQKDPVGLMSRVAQPASKKIDQNKLKPEMDEKGNLTTAGFACSQCGQPLFVYKLEQVSEKGKAYTNYFGRCNVAEHEKLILLAQLKPEKDSDEAVTYSLGKFGQRALDFYSIHVTKESTHPVKPLAQIAGNRYASGPVGKALSDACMGTIASFLSKYQDIIIEHQKVVKGNQKRLESLRELAGKENLEYPSVTLPPQPHTKEGVDAYNEVIARVRMWVNLNLWQKLKLSRDDAKPLLRLKGFPSFPLVERQANEVDWWDMVCNVKKLINEKKEDGKVFWQNLAGYKRQEALRPYLSSEEDRKKGKKFARYQLGDLLLHLEKKHGEDWGKVYDEAWERIDKKVEGLSKHIKLEEERRSEDAQSKAALTDWLRAKASFVIEGLKEADKDEFCRCELKLQKWYGDLRGKPFAIEAENSILDISGFSKQYNCAFIWQKDGVKKLNLYLIINYFKGGKLRFKKIKPEAFEANRFYTVINKKSGEIVPMEVNFNFDDPNLIILPLAFGKRQGREFIWNDLLSLETGSLKLANGRVIEKTLYNRRTRQDEPALFVALTFERREVLDSSNIKPMNLIGVDRGENIPAVIALTDPEGCPLSRFKDSLGNPTHILRIGESYKEKQRTIQAKKEVEQRRAGGYSRKYASKAKNLADDMVRNTARDLLYYAVTQDAMLIFENLSRGFGRQGKRTFMAERQYTRMEDWLTAKLAYEGLPSKTYLHSKTLAQYTSKTCSNCGFTITSADYDRVLEKLKKTATGWMTTINGKELKVEGQITYYNRYKRQNVVKDLSVELDRLSEESVNNDISSWTKGRSGEALSLLKKRFSHRPVQEKFVCLNCGFETHADEQAALNIARSWLFLRSQEYKKYQTNKTTGNTDKRAFVETWQSFYRKKLKEVWKPAV

SEQ ID NO: 268 - protein, 978 aa, synthetic construct
QEIKRINKIRRRLVKDSNTKKAGKTGPMKTLLVRVMTPDLRERLENLRKKPENIPQPISNTSRANLNKLLTDYTEMKKAILHVYWEEFQKDPVGLMSRVAQPASKKIDQNKLKPEMDEKGNLTTAGFACSQCGQPLFVYKLEQVSEKGKAYTNYFGRCNVAEHEKLILLAQLKPEKDSDEAVTYSLGKFGQRALDFYSIHVTKESTHPVKPLAQIAGNRYASGPVGKALSDACMGTIASFLSKYQDIIIEHQKVVKGNQKRLESLRELAGKENLEYPSVTLPPQPHTKEGVDAYNEVIARVRMWVNLNLWQKLKLSRDDAKPLLRLKGFPSFPLVERQANEVDWWDMVCNVKKLINEKKEDGKVFWQNLAGYKRQEALRPYLSSEEDRKKGKKFARYQLGDLLLHLEKKHGEDWGKVYDEAWERIDKKVEGLSKHIKLEEERRSEDAQSKAALTDWLRAKASFVIEGLKEADKDEFCRCELKLQKWYGDLRGKPFAIEAENSILDISGFSKQYNCAFIWQKDGVKKLNLYLIINYFKGGKLRFKKIKPEAFEANRFYTVINKKSGEIVPMEVNFNFDDPNLIILPLAFGKRQGREFIWNDLLSLETGSLKLANGRVIEKTLYNRRTRQDEPALFVALTFERREVLDSSNIKPMNLIGVDRGENIPAVIALTDPEGCPLSRFKDSLGNPTHILRIGESYKEKQRTIQAKKEVEQRRAGGYSRKYASKAKNLADDMVRNTARDLLYYAVTQDAMLIFENLSRGFGRQGKRTFMAERQYTRMEDWLTAKLAYEGLPSKVYLSKTLAQYTSKTCSNCGFTITSADYDRVLEKLKKTATGWMTTINGKELKVEGQITYYNRYKRQNVVKDLSVELDRLSEESVNNDISSWTKGRSGEALSLLKKRFSHRPVQEKFVCLNCGFETHADEQAALNIARSWLFLRSQEYKKYQTNKTTGNTDKRAFVETWQSFYRKKLKEVWKPAV

SEQ ID NO: 269 - protein, 979 aa, synthetic construct
QEIKRINKIRRRLVKDSNTKKAGKTGPMKTLLVRVMTPDLRERLENLRKKPENIPQPISNTSRANLNKLLTDYTEMKKAILHVYWEEFQKDPVGLMSRVAQPASKKIDQNKLKPEMDEKGNLTTAGFACSQCGQPLFVYKLEQVSEKGKAYTNYFGRCNVAEHEKLILLAQLKPEKDSDEAVTYSLGKFGQRALDFYSIHVTKESTHPVKPLAQIAGNRYASGPVGKALSDACMGTIASFLSKYQDIIIEHQKVVKGNQKRLESLRELAGKENLEYPSVTLPPQPHTKEGVDAYNEVIARVRMWVNLNLWQKLKLSRDDAKPLLRLKGFPSFPLVERQANEVDWWDMVCNVKKLINEKKEDGKVFWQNLAGYKRQEALRPYLSSEEDRKKGKKFARYQLGDLLLHLEKKHGEDWGKVYDEAWERIDKKVEGLSKHIKLEEERRSEDAQSKAALTDWLRAKASFVIEGLKEADKDEFCRCELKLQKWYGDLRGKPFAIEAENSILDISGFSKQYNCAFIWQKDGVKKLNLYLIINYFKGGKLRFKKIKPEAFEANRFYTVINKKSGEIVPMEVNFNFDDPNLIILPLAFGKRQGREFIWNDLLSLETGSLKLANGRVIEKTLYNRRTRQDEPALFVALTFERREVLDSSNIKPMNLIGVDRGENIPAVIALTDPEGCPLSRFKDSLGNPTHILRIGESYKEKQRTIQAKKEVEQRRAGGYSRKYASKAKNLADDMVRNTARDLLYYAVTQDAMLIFENLSRGFGRQGKRTFMAERQYTRMEDWLTAKLQAYEGLPSKTYLSKTLAQYTSKTCSNCGFTITSADYDRVLEKLKKTATGWMTTINGKELKVEGQITYYNRYKRQNVVKDLSVELDRLSEESVNNDISSWTKGRSGEALSLLKKRFSHRPVQEKFVCLNCGFETHADEQAALNIARSWLFLRSQEYKKYQTNKTTGNTDKRAFVETWQSFYRKKLKEVWKPAV

SEQ ID NO: 270 - protein, 979 aa, synthetic construct
QEIKRINKIRRRLVKDSNTKKAGKTGPMKTLLVRVMTPDLRERLENLRKKPENIPQPISNTSRANLNKLLTDYTEMKKAILHVYWEEFQKDPVGLMSRVAQPASKKIDQNKLKPEMDEKGNLTTAGFACSQCGQPLFVYKLEQVSEKGKAYTNYFGRCNVAEHEKLILLAQLKPEKDSDEAVTYSLGKFGQRALDFYSIHVTKESTHPVKPLAQIAGNRYASGPVGKALSDACMGTIASFLSKYQDIIIEHQKVVKGNQKRLESLRELAGKENLEYPSVTLPPQPHTKEGVDAYNEVIARVRMWVNLNLWQKLKLSRDDAKPLLRLKGFPSFPLVERQANEVDWWDMVCNVKKLINEKKEDGKVFWQNLAGYKRQEALRPYLSSEEDRKKGKKFARYQLGDLLLHLEKKHGEDWGKVYDEAWERIDKKVEGLSKHIKLEEERRSEDAQSKAALTDWLRAKASFVIEGLKEADKDEFCRCELKLQKWYGDLRGKPFAIEAENSILDISGFSKQYNCAFIWQKDGVKKLNLYLIINYFKGGKLRFKKIKPEAFEANRFYTVINKKSGEIVPMEVNFNFDDPNLIILPLAFGKRQGREFIWNDLLSLETGSLKLANGRVIEKTLYNRRTRQDEPALFVALTFERREVLDSSNIKPMNLIGVDRGENIPAVIALTDPEGCPLSRFKDSLGNPTHILRIGESYKEKQRTIQAKKEVEQRRAGGYSRKYASKAKNLADDMVRNTARDLLYYAVTQDAMLIFENLSRGFGRQGKRTFMAERQYTRMEDWLTAKLAYEGPLPSKTYLSKTLAQYTSKTCSNCGFTITSADYDRVLEKLKKTATGWMTTINGKELKVEGQITYYNRYKRQNVVKDLSVELDRLSEESVNNDISSWTKGRSGEALSLLKKRFSHRPVQEKFVCLNCGFETHADEQAALNIARSWLFLRSQEYKKYQTNKTTGNTDKRAFVETWQSFYRKKLKEVWKPAV

SEQ ID NO: 271 - protein, 979 aa, synthetic construct
QEIKRINKIRRRLVKDSNTKKAGKTGPMKTLLVRVMTPDLRERLENLRKKPENIPQPISNTSRANLNKLLTDYTEMKKAILHVYWEEFQKDPVGLMSRVAQPASKKIDQNKLKPEMDEKGNLTTAGFACSQCGQPLFVYKLEQVSEKGKAYTNYFGRCNVAEHEKLILLAQLKPEKDSDEAVTYSLGKFGQRALDFYSIHVTKESTHPVKPLAQIAGNRYASGPVGKALSDACMGTIASFLSKYQDIIIEHQKVVKGNQKRLESLRELAGKENLEYPSVTLPPQPHTKEGVDAYNEVIARVRMWVNLNLWQKLKLSRDDAKPLLRLKGFPSFPLVERQANEVDWWDMVCNVKKLINEKKEDGKVFWQNLAGYKRQEALRPYLSSEEDRKKGKKFARYQLGDLLLHLEKKHGEDWGKVYDEAWERIDKKVEGLSKHIKLEEERRSEDAQSKAALTDWLRAKASFVIEGLKEADKDEFCRCELKLQKWYGDLRGKPFAIEAENSILDISGFSKQYNCAFIWQKDGVKKLNLYLIINYFKGGKLRFKKIKPEAFEANRFYTVINKKSGEIVPMEVNFNFDDPNLIILPLAFGKRQGREFIWNDLLSLETGSLKLANGRVIEKTLYNRRTRQDEPALFVALTFERREVLDSSNIKPMNLIGVDRGENIPAVIALTDPEGCPLSRFKDSLGNPTHILRIGESYKEKQRTIQAKKEVEQRRAGGYSRKYASKAKNLADDMVRNTARDLLYYAVTQDAMLIFENLSRGFGRQGKRTFMAERQYTRMEDWLTAKLAYEGLPSKTYLSKRTLAQYTSKTCSNCGFTITSADYDRVLEKLKKTATGWMTTINGKELKVEGQITYYNRYKRQNVVKDLSVELDRLSEESVNNDISSWTKGRSGEALSLLKKRFSHRPVQEKFVCLNCGFETHADEQAALNIARSWLFLRSQEYKKYQTNKTTGNTDKRAFVETWQSFYRKKLKEVWKPAV

SEQ ID NO: 272 - protein, 979 aa, synthetic construct
QEIKRINKIRRRLVKDSNTKKAGKTGPMKTLLVRVMTPDLRERLENLRKKPENIPQPISNTSRANLNKLLTDYTEMKKAILHVYWEEFQKDPVGLMSRVAQPASKKIDQNKLKPEMDEKGNLTTAGFACSQCGQPLFVYKLEQVSEKGKAYTNYFGRCNVAEHEKLILLAQLKPEKDSDEAVTYSLGKFGQRALDFYSIHVTKESTHPVKPLAQIAGNRYASGPVGKALSDACMGTIASFLSKYQDIIIEHQKVVKGNQKRLESLRELAGKENLEYPSVTLPPQPHTKEGVDAYNEVIARVRMWVNLNLWQKLKLSRDDAKPLLRLKGFPSFPLVERQANEVDWWDMVCNVKKLINEKKEDGKVFWQNLAGYKRQEALRPYLSSEEDRKKGKKFARYQLGDLLLHLEKKHGEDWGKVYDEAWERIDKKVEGLSKHIKLEEERRSEDAQSKAALTDWLRAKASFVIEGLKEADKDEFCRCELKLQKWYGDLRGKPFAIEAENSILDISGFSKQYNCAFIWQKDGVKKLNLYLIINYFKGGKLRFKKIKPEAFEANRFYTVINKKSGEIVPMEVNFNFDDPNLIILPLAFGKRQGREFIWNDLLSLETGSLKLANGRVIEKTLYNRRTRQDEPALFVALTFERREVLDSSNIKPMNLIGVDRGENIPAVIALTDPEGCPLSRFKDSLGNPTHILRIGESYKEKQRTIQAKKEVEQRRAGGYSRKYASKAKNLADDMVRNTARDLLYYAVTQDAMLIFENLSRGFGRQGKRTFMAERQYTRMEDWLTAKLAYEGLPSKTYLSKTLAQYTSKTCSNCWGFTITSADYDRVLEKLKKTATGWMTTINGKELKVEGQITYYNRYKRQNVVKDLSVELDRLSEESVNNDISSWTKGRSGEALSLLKKRFSHRPVQEKFVCLNCGFETHADEQAALNIARSWLFLRSQEYKKYQTNKTTGNTDKRAFVETWQSFYRKKLKEVWKPAV

SEQ ID NO: 273 - protein, 979 aa, synthetic construct
QEIKRINKIRRRLVKDSNTKKAGKTGPMKTLLVRVMTPDLRERLENLRKKPENIPQPISNTSRANLNKLLTDYTEMKKAILHVYWEEFQKDPVGLMSRVAQPASKKIDQNKLKPEMDEKGNLTTAGFACSQCGQPLFVYKLEQVSEKGKAYTNYFGRCNVAEHEKLILLAQLKPEKDSDEAVTYSLGKFGQRALDFYSIHVTKESTHPVKPLAQIAGNRYASGPVGKALSDACMGTIASFLSKYQDIIIEHQKVVKGNQKRLESLRELAGKENLEYPSVTLPPQPHTKEGVDAYNEVIARVRMWVNLNLWQKLKLSRDDAKPLLRLKGFPSFPLVERQANEVDWWDMVCNVKKLINEKKEDGKVFWQNLAGYKRQEALRPYLSSEEDRKKGKKFARYQLGDLLLHLEKKHGEDWGKVYDEAWERIDKKVEGLSKHIKLEEERRSEDAQSKAALTDWLRAKASFVIEGLKEADKDEFCRCELKLQKWYGDLRGKPFAIEAENSILDISGFSKQYNCAFIWQKDGVKKLNLYLIINYFKGGKLRFKKIKPEAFEANRFYTVINKKSGEIVPMEVNFNFDDPNLIILPLAFGKRQGREFIWNDLLSLETGSLKLANGRVIEKTLYNRRTRQDEPALFVALTFERREVLDSSNIKPMNLIGVDRGENIPAVIALTDPEGCPLSRFKDSLGNPTHILRIGESYKEKQRTIQAKKEVEQRRAGGYSRKYASKAKNLADDMVRNTARDLLYYAVTQDAMLIFENLSRGFGRQGKRTFMAERQYTRMEDWLTAKLANYEGLPSKTYLSKTLAQYTSKTCSNCGFTITSADYDRVLEKLKKTATGWMTTINGKELKVEGQITYYNRYKRQNVVKDLSVELDRLSEESVNNDISSWTKGRSGEALSLLKKRFSHRPVQEKFVCLNCGFETHADEQAALNIARSWLFLRSQEYKKYQTNKTTGNTDKRAFVETWQSFYRKKLKEVWKPAV

SEQ ID NO: 274 - protein, 978 aa, synthetic construct
QEIKRINKIRRRLVKDSNTKKAGKTGPMKTLLVRVMTPDLRERLENLRKKPENIPQPISNTSRANLNKLLTDYTEMKKAILHVYWEEFQKDPVGLMSRVAQPASKKIDQNKLKPEMDEKGNLTTAGFACSQCGQPLFVYKLEQVSEKGKAYTNYFGRCNVAEHEKLILLAQLKPEKDSDEAVTYSLGKFGQRALDFYSIHVTKESTHPVKPLAQIAGNRYASGPVGKALSDACMGTIASFLSKYQDIIIEHQKVVKGNQKRLESLRELAGKENLEYPSVTLPPQPHTKEGVDAYNEVIARVRMWVNLNLWQKLKLSRDDAKPLLRLKGFPSFPLVERQANEVDWWDMVCNVKKLINEKKEDGKVFWQNLAGYKRQEALRPYLSSEEDRKKGKKFARYQLGDLLLHLEKKHGEDWGKVYDEAWERIDKKVEGLSKHIKLEEERRSEDAQSKAALTDWLRAKASFVIEGLKEADKDEFCRCELKLQKWYGDLRGKPFAIEAENSILDISGFSKQYNCAFIWQKDGVKKLNLYLIINYFKGGKLRFKKIKPEAFEANRFYTVINKKSGEIVPMEVNFNFDDPNLIILPLAFGKRQGREFIWNDLLSLETGSLKLANGRVIEKTLYNRRTRQDEPALFVALTFERREVLDSSNIKPMNLIGVDRGENIPAVIALTDPEGCPLSRFKDSLGNPTHILRIGESYKEKQRTIQAKKEVEQRRAGGYSRKYASKAKNLADDMVRNTARDLLYYAVTQDAMLIFENLSRGFGRQGKRTFMAERQYTRMEDWLTAKLAYEGLPSKTYLSKTLAQYTSKTCSNSGFTITSADYDRVLEKLKKTATGWMTTINGKELKVEGQITYYNRYKRQNVVKDLSVELDRLSEESVNNDISSWTKGRSGEALSLLKKRFSHRPVQEKFVCLNCGFETHADEQAALNIARSWLFLRSQEYKKYQTNKTTGNTDKRAFVETWQSFYRKKLKEVWKPAV

SEQ ID NO: 275 - protein, 978 aa, synthetic construct
QEIKRINKIRRRLVKDSNTKKAGKTGPMKTLLVRVMTPDLRERLENLRKKPENIPQPISNTSRANLNKLLTDYTEMKKAILHVYWEEFQKDPVGLMSRVAQPASKKIDQNKLKPEMDEKGNLTTAGFACSQCGQPLFVYKLEQVSEKGKAYTNYFGRCNVAEHEKLILLAQLKPEKDSDEAVTYSLGKFGQRALDFYSIHVTKESTHPVKPLAQIAGNRYASGPVGKALSDACMGTIASFLSKYQDIIIEHQKVVKGNQKRLESLRELAGKENLEYPSVTLPPQPHTKEGVDAYNEVIARVRMWVNLNLWQKLKLSRDDAKPLLRLKGFPSFPLVERQANEVDWWDMVCNVKKLINEKKEDGKVFWQNLAGYKRQEALRPYLSSEEDRKKGKKFARYQLGDLLLHLEKKHGEDWGKVYDEAWERIDKKVEGLSKHIKLEEERRSEDAQSKAALTDWLRAKASFVIEGLKEADKDEFCRCELKLQKWYGDLRGKPFAIEAENSILDISGFSKQYNCAFIWQKDGVKKLNLYLIINYFKGGKLRFKKIKPEAFEANRFYTVINKKSGEIVPMEVNFNFDDPNLIILPLAFGKRQGREFIWNDLLSLETGSLKLANGRVIEKTLYNRRTRQDEPALFVALTFERREVLDSSNIKPMNLIGVDRGENIPAVIALTDPEGCPLSRFKDSLGNPTHILRIGESYKEKQRTIQAKKEVEQRRAGGYSRKYASKAKNLADDMVRNTARDLLYYAVTQDAMLIFENLSRGFGRQGKRTFMAERQYTRMEDWLTAKLAYEGLPSKTYLSKTLSQYTSKTCSNCGFTITSADYDRVLEKLKKTATGWMTTINGKELKVEGQITYYNRYKRQNVVKDLSVELDRLSEESVNNDISSWTKGRSGEALSLLKKRFSHRPVQEKFVCLNCGFETHADEQAALNIARSWLFLRSQEYKKYQTNKTTGNTDKRAFVETWQSFYRKKLKEVWKPAV

SEQ ID NO: 276 - protein, 979 aa, synthetic construct
QEIKRINKIRRRLVKDSNTKKAGKTGPMKTLLVRVMTPDLRERLENLRKKPENIPQPISNTSRANLNKLLTDYTEMKKAILHVYWEEFQKDPVGLMSRVAQPASKKIDQNKLKPEMDEKGNLTTAGFACSQCGQPLFVYKLEQVSEKGKAYTNYFGRCNVAEHEKLILLAQLKPEKDSDEAVTYSLGKFGQRALDFYSIHVTKESTHPVKPLAQIAGNRYASGPVGKALSDACMGTIASFLSKYQDIIIEHQKVVKGNQKRLESLRELAGKENLEYPSVTLPPQPHTKEGVDAYNEVIARVRMWVNLNLWQKLKLSRDDAKPLLRLKGFPSFPLVERQANEVDWWDMVCNVKKLINEKKEDGKVFWQNLAGYKRQEALRPYLSSEEDRKKGKKFARYQLGDLLLHLEKKHGEDWGKVYDEAWERIDKKVEGLSKHIKLEEERRSEDAQSKAALTDWLRAKASFVIEGLKEADKDEFCRCELKLQKWYGDLRGKPFAIEAENSILDISGFSKQYNCAFIWQKDGVKKLNLYLIINYFKGGKLRFKKIKPEAFEANRFYTVINKKSGEIVPMEVNFNFDDPNLIILPLAFGKRQGREFIWNDLLSLETGSLKLANGRVIEKTLYNRRTRQDEPALFVALTFERREVLDSSNIKPMNLIGVDRGENIPAVIALTDPEGCPLSRFKDSLGNPTHILRIGESYKEKQRTIQAKKEVEQRRAGGYSRKYASKAKNLADDMVRNTARDLLYYAVTQDAMLIFENLSRGFGRQGKRTFMAERQYTRMEDWLTAKLAYEGLPSKTYRLSKTLAQYTSKTCSNCGFTITSADYDRVLEKLKKTATGWMTTINGKELKVEGQITYYNRYKRQNVVKDLSVELDRLSEESVNNDISSWTKGRSGEALSLLKKRFSHRPVQEKFVCLNCGFETHADEQAALNIARSWLFLRSQEYKKYQTNKTTGNTDKRAFVETWQSFYRKKLKEVWKPAV

SEQ ID NO: 277 - protein, 978 aa, synthetic construct
QEIKRINKIRRRLVKDSNTKKAGKTGPMKTLLVRVMTPDLRERLENLRKKPENIPQPISNTSRANLNKLLTDYTEMKKAILHVYWEEFQKDPVGLMSRVAQPASKKIDQNKLKPEMDEKGNLTTAGFACSQCGQPLFVYKLEQVSEKGKAYTNYFGRCNVAEHEKLILLAQLKPEKDSDEAVTYSLGKFGQRALDFYSIHVTKESTHPVKPLAQIAGNRYASGPVGKALSDACMGTIASFLSKYQDIIIEHQKVVKGNQKRLESLRELAGKENLEYPSVTLPPQPHTKEGVDAYNEVIARVRMWVNLNLWQKLKLSRDDAKPLLRLKGFPSFPLVERQANEVDWWDMVCNVKKLINEKKEDGKVFWQNLAGYKRQEALRPYLSSEEDRKKGKKFARYQLGDLLLHLEKKHGEDWGKVYDEAWERIDKKVEGLSKHIKLEEERRSEDAQSKAALTDWLRAKASFVIEGLKEADKDEFCRCELKLQKWYGDLRGKPFAIEAENSILDISGFSKQYNCAFIWQKDGVKKLNLYLIINYFKGGKLRFKKIKPEAFEANRFYTVINKKSGEIVPMEVNFNFDDPNLIILPLAFGKRQGREFIWNDLLSLETGSLKLANGRVIEKTLYNRRTRQDEPALFVALTFERREVLDSSNIKPMNLIGVDRGENIPAVIALTDPEGCPLSRFKDSLGNPTHILRIGESYKEKQRTIQAKKEVEQRRAGGYSRKYASKAKNLADDMVRNTARDLLYYAVTQDAMLIFENLSRGFGRQGKRTFMAERQYTRMEDWLTAKRAYEGLPSKTYLSKTLAQYTSKTCSNCGFTITSADYDRVLEKLKKTATGWMTTINGKELKVEGQITYYNRYKRQNVVKDLSVELDRLSEESVNNDISSWTKGRSGEALSLLKKRFSHRPVQEKFVCLNCGFETHADEQAALNIARSWLFLRSQEYKKYQTNKTTGNTDKRAFVETWQSFYRKKLKEVWKPAV

SEQ ID NO: 278 - protein, 978 aa, synthetic construct
QEIKRINKIRRRLVKDSNTKKAGKTGPMKTLLVRVMTPDLRERLENLRKKPENIPQPISNTSRANLNKLLTDYTEMKKAILHVYWEEFQKDPVGLMSRVAQPASKKIDQNKLKPEMDEKGNLTTAGFACSQCGQPLFVYKLEQVSEKGKAYTNYFGRCNVAEHEKLILLAQLKPEKDSDEAVTYSLGKFGQRALDFYSIHVTKESTHPVKPLAQIAGNRYASGPVGKALSDACMGTIASFLSKYQDIIIEHQKVVKGNQKRLESLRELAGKENLEYPSVTLPPQPHTKEGVDAYNEVIARVRMWVNLNLWQKLKLSRDDAKPLLRLKGFPSFPLVERQANEVDWWDMVCNVKKLINEKKEDGKVFWQNLAGYKRQEALRPYLSSEEDRKKGKKFARYQLGDLLLHLEKKHGEDWGKVYDEAWERIDKKVEGLSKHIKLEEERRSEDAQSKAALTDWLRAKASFVIEGLKEADKDEFCRCELKLQKWYGDLRGKPFAIEAENSILDISGFSKQYNCAFIWQKDGVKKLNLYLIINYFKGGKLRFKKIKPEAFEANRFYTVINKKSGEIVPMEVNFNFDDPNLIILPLAFGKRQGREFIWNDLLSLETGSLKLANGRVIEKTLYNRRTRQDEPALFVALTFERREVLDSSNIKPMNLIGVDRGENIPAVIALTDPEGCPLSRFKDSLGNPTHILRIGESYKEKQRTIQAKKEVEQRRAGGYSRKYASKAKNLADDMVRNTARDLLYYAVTQDAMLIFENLSRGFGRQGKRTFMAERQYTRMEDWLTAKDAYEGLPSKTYLSKTLAQYTSKTCSNCGFTITSADYDRVLEKLKKTATGWMTTINGKELKVEGQITYYNRYKRQNVVKDLSVELDRLSEESVNNDISSWTKGRSGEALSLLKKRFSHRPVQEKFVCLNCGFETHADEQAALNIARSWLFLRSQEYKKYQTNKTTGNTDKRAFVETWQSFYRKKLKEVWKPAV

SEQ ID NO: 279 - protein, 979 aa, synthetic construct
QEIKRINKIRRRLVKDSNTKKAGKTRGPMKTLLVRVMTPDLRERLENLRKKPENIPQPISNTSRANLNKLLTDYTEMKKAILHVYWEEFQKDPVGLMSRVAQPASKKIDQNKLKPEMDEKGNLTTAGFACSQCGQPLFVYKLEQVSEKGKAYTNYFGRCNVAEHEKLIKLAQLKPEKDSDEAVTYSLGKFGQRALDFYSIHVTKESTHPVKPLAQIAGNRYASNPVGKALSDACMGTIASFLSKYQDIIIEHQKVVKGNQKRLESLRELAGKENLEYPSVTLPPQPHTKEGVDAYNEVIARVRMWVNLNLWQKLKLSRDDAKPLLRLKGFPSFPLVERQANEVDWWDMVCNVKKLINEKKEDGKVFWQNLAGYKRQEALRPYLSSEEDRKKGKKFARYQLGDLLLHLEKKHGEDWGKVYDEAWERIDKKVEGLSKHIKLEEERRSEDAQSKAALTDWLRAKASFVIEGLKEADKDEFCRCELKLQKWYGDLRGKPFAIEAENSILDISGFSKQYNCAFIWQKDGVKKLNLYLIINYFKGGKLRFKKIKPEAFEANRFYTVINKKSGEIVPMEVNFNFDDPNLIILPLAFGKRQGREFIWNDLLSLETGSLKLANGRVIEKTLYNRRTRQDEPALFVALTFERREVLDSSNIKPMNLIGVDRGENIPAVIALTDPEGCPLSRFKDSLGNPTHILRIGESYKEKQRTIQAKKEVEQRRAGGYSRKYASKAKNLADDMVRNTARDLLYYAVTQDAMLIFENLSRGFGRQGKRTFMAERQYTRMEDWLTAKLAYEGLPSKTYLSKTLAQYTSKTCSNCGFTITSADYDRVLEKLKKTATGWMTTINGKELKVEGQITYYNRYKRQNVVKDLSVELDRLSEESVNNDISSWTKGRSGEALSLLKKRFSHRPVQEKFVCLNCGFETHADEQAALNIARSWLFLRSQEYKKYQTNKTTGNTDKRAFVETWQSFYRKKLKEVWKPAV

SEQ ID NO: 280 - protein, 979 aa, synthetic construct
QEIKRINKIRRRLVKDSNTKKAGKTRGPMKTLLVRVMTPDLRERLENLRKKPENIPQPISNTSRANLNKLLTDYTEMKKAILHVYWEEFQKDPVGLMSRVAQPASKKIDQNKLKPEMDEKGNLTTAGFACSQCGQPLFVYKLEQVSEKGKAYTNYFGRCNVAEHEKLIKLAQLKPEKDSDEAVTYSLGKFGQRALDFYSIHVTKESTHPVKPLAQIAGNRYASTPVGKALSDACMGTIASFLSKYQDIIIEHQKVVKGNQKRLESLRELAGKENLEYPSVTLPPQPHTKEGVDAYNEVIARVRMWVNLNLWQKLKLSRDDAKPLLRLKGFPSFPLVERQANEVDWWDMVCNVKKLINEKKEDGKVFWQNLAGYKRQEALRPYLSSEEDRKKGKKFARYQLGDLLLHLEKKHGEDWGKVYDEAWERIDKKVEGLSKHIKLEEERRSEDAQSKAALTDWLRAKASFVIEGLKEADKDEFCRCELKLQKWYGDLRGKPFAIEAENSILDISGFSKQYNCAFIWQKDGVKKLNLYLIINYFKGGKLRFKKIKPEAFEANRFYTVINKKSGEIVPMEVNFNFDDPNLIILPLAFGKRQGREFIWNDLLSLETGSLKLANGRVIEKTLYNRRTRQDEPALFVALTFERREVLDSSNIKPMNLIGVDRGENIPAVIALTDPEGCPLSRFKDSLGNPTHILRIGESYKEKQRTIQAKKEVEQRRAGGYSRKYASKAKNLADDMVRNTARDLLYYAVTQDAMLIFENLSRGFGRQGKRTFMAERQYTRMEDWLTAKLAYEGLPSKTYLSKTLAQYTSKTCSNCGFTITSADYDRVLEKLKKTATGWMTTINGKELKVEGQITYYNRYKRQNVVKDLSVELDRLSEESVNNDISSWTKGRSGEALSLLKKRFSHRPVQEKFVCLNCGFETHADEQAALNIARSWLFLRSQEYKKYQTNKTTGNTDKRAFVETWQSFYRKKLKEVWKPAV

SEQ ID NO: 281 - protein, 979 aa, synthetic construct
QEIKRINKIRRRLVKDSNTKKAGKTRGPMKTLLVRVMTPDLRERLENLRKKPENIPQPISNTSRANLNKLLTDYTEMKKAILHVYWEEFQKDPVGLMSRVAQPASKKIDQNKLKPEMDEKGNLTTAGFACSQCGQPLFVYKLEQVSEKGKAYTNYFGRCNVAEHEKLIKLAQLKPEKDSDEAVTYSLGKFGQRALDFYSIHVTKESTHPVKPLAQIAGNRYASAPVGKALSDACMGTIASFLSKYQDIIIEHQKVVKGNQKRLESLRELAGKENLEYPSVTLPPQPHTKEGVDAYNEVIARVRMWVNLNLWQKLKLSRDDAKPLLRLKGFPSFPLVERQANEVDWWDMVCNVKKLINEKKEDGKVFWQNLAGYKRQEALRPYLSSEEDRKKGKKFARYQLGDLLLHLEKKHGEDWGKVYDEAWERIDKKVEGLSKHIKLEEERRSEDAQSKAALTDWLRAKASFVIEGLKEADKDEFCRCELKLQKWYGDLRGKPFAIEAENSILDISGFSKQYNCAFIWQKDGVKKLNLYLIINYFKGGKLRFKKIKPEAFEANRFYTVINKKSGEIVPMEVNFNFDDPNLIILPLAFGKRQGREFIWNDLLSLETGSLKLANGRVIEKTLYNRRTRQDEPALFVALTFERREVLDSSNIKPMNLIGVDRGENIPAVIALTDPEGCPLSRFKDSLGNPTHILRIGESYKEKQRTIQAKKEVEQRRAGGYSRKYASKAKNLADDMVRNTARDLLYYAVTQDAMLIFENLSRGFGRQGKRTFMAERQYTRMEDWLTAKLAYEGLPSKTYLSKTLAQYTSKTCSNCGFTITSADYDRVLEKLKKTATGWMTTINGKELKVEGQITYYNRYKRQNVVKDLSVELDRLSEESVNNDISSWTKGRSGEALSLLKKRFSHRPVQEKFVCLNCGFETHADEQAALNIARSWLFLRSQEYKKYQTNKTTGNTDKRAFVETWQSFYRKKLKEVWKPAV

SEQ ID NO: 282 - protein, 979 aa, synthetic construct
QEIKRINKIRRRLVKDSNTKKAGKTRGPMKTLLVRVMTPDLRERLENLRKKPENIPQPISNTSRANLNKLLTDYTEMKKAILHVYWEEFQKDPVGLMSRVAQPASKKIDQNKLKPEMDEKGNLTTAGFACSQCGQPLFVYKLEQVSEKGKAYTNYFGRCNVAEHEKLIKLAQLKPEKDSDEAVTYSLGKFGQRALDFYSIHVTKESTHPVKPLAQIAGNRYASVPVGKALSDACMGTIASFLSKYQDIIIEHQKVVKGNQKRLESLRELAGKENLEYPSVTLPPQPHTKEGVDAYNEVIARVRMWVNLNLWQKLKLSRDDAKPLLRLKGFPSFPLVERQANEVDWWDMVCNVKKLINEKKEDGKVFWQNLAGYKRQEALRPYLSSEEDRKKGKKFARYQLGDLLLHLEKKHGEDWGKVYDEAWERIDKKVEGLSKHIKLEEERRSEDAQSKAALTDWLRAKASFVIEGLKEADKDEFCRCELKLQKWYGDLRGKPFAIEAENSILDISGFSKQYNCAFIWQKDGVKKLNLYLIINYFKGGKLRFKKIKPEAFEANRFYTVINKKSGEIVPMEVNFNFDDPNLIILPLAFGKRQGREFIWNDLLSLETGSLKLANGRVIEKTLYNRRTRQDEPALFVALTFERREVLDSSNIKPMNLIGVDRGENIPAVIALTDPEGCPLSRFKDSLGNPTHILRIGESYKEKQRTIQAKKEVEQRRAGGYSRKYASKAKNLADDMVRNTARDLLYYAVTQDAMLIFENLSRGFGRQGKRTFMAERQYTRMEDWLTAKLAYEGLPSKTYLSKTLAQYTSKTCSNCGFTITSADYDRVLEKLKKTATGWMTTINGKELKVEGQITYYNRYKRQNVVKDLSVELDRLSEESVNNDISSWTKGRSGEALSLLKKRFSHRPVQEKFVCLNCGFETHADEQAALNIARSWLFLRSQEYKKYQTNKTTGNTDKRAFVETWQSFYRKKLKEVWKPAV

SEQ ID NO: 283 - protein, 978 aa, synthetic construct
QEIKRINKIRRRLVKDSNTKKAGKTGPMKTLLVRVMTPDLRERLENLRKKPENIPQPISNTSRANLNKLLTDYTEMKKAILHVYWEEFQKDPVGLMSRVAQPASKKIDQNKLKPEMDEKGNLTTAGFACSQCGQPLFVYKLEQVSEKGKAYTNYFGRCNVAEHEKLIQLAQLKPEKDSDEAVTYSLGKFGQRALDFYSIHVTKESTHPVKPLAQIAGNRYASGPVGKALSDACMGTIASFLSKYQDIIIEHQKVVKGNQKRLESLRELAGKENLEYPSVTLPPQPHTKEGVDAYNEVIARVRMWVNLNLWQKLKLSRDDAKPLLRLKGFPSFPLVERQANEVDWWDMVCNVKKLINEKKEDGKVFWQNLAGYKRQEALRPYLSSEEDRKKGKKFARYQLGDLLLHLEKKHGEDWGKVYDEAWERIDKKVEGLSKHIKLEEERRSEDAQSKAALTDWLRAKASFVIEGLKEADKDEFCRCELKLQKWYGDLRGKPFAIEAENSILDISGFSKQYNCAFIWQKDGVKKLNLYLIINYFKGGKLRFKKIKPEAFEANRFYTVINKKSGEIVPMEVNFNFDDPNLIILPLAFGKRQGREFIWNDLLSLETGSLKLANGRVIEKTLYNRRTRQDEPALFVALTFERREVLDSSNIKPMNLIGVDRGENIPAVIALTDPEGCPLSRFKDSLGNPTHILRIGESYKEKQRTIQAKKEVEQRRAGGYSRKYASKAKNLADDMVRNTARDLLYYAVTQDAMLIFENLSRGFGRQGKRTFMAERQYTRMEDWLTAKLAYEGLPSKTYLSKTLAQYTSKTCSNCGFTITSADYDRVLEKLKKTATGWMTTINGKELKVEGQITYYNRYKRQNVVKDLSVELDRLSEESVNNDISSWTKGRSGEALSLLKKRFSHRPVQEKFVCLNCGFETHADEQAALNIARSWLFLRSQEYKKYQTNKTTGNTDKRAFVETWQSFYRKKLKEVWKPAV

SEQ ID NO: 284 - protein, 978 aa, synthetic construct
QEIKRINKIRRRLVKDSNTKKAGKTGPMKTLLVRVMTPDLRERLENLRKKPENIPQPISNTSRANLNKLLTDYTEMKKAILHVYWEEFQKDPVGLMSRVAQPASKKIDQNKLKPEMDEKGNLTTAGFACSQCGQPLFVYKLEQVSEKGKAYTNYFGRCNVAEHEKLILLAQLKPEKDSDEAVTYSLGKFGQRALDFYSIHVTKESTHPVKPLAQIAGNRYMSGPVGKALSDACMGTIASFLSKYQDIIIEHQKVVKGNQKRLESLRELAGKENLEYPSVTLPPQPHTKEGVDAYNEVIARVRMWVNLNLWQKLKLSRDDAKPLLRLKGFPSFPLVERQANEVDWWDMVCNVKKLINEKKEDGKVFWQNLAGYKRQEALRPYLSSEEDRKKGKKFARYQLGDLLLHLEKKHGEDWGKVYDEAWERIDKKVEGLSKHIKLEEERRSEDAQSKAALTDWLRAKASFVIEGLKEADKDEFCRCELKLQKWYGDLRGKPFAIEAENSILDISGFSKQYNCAFIWQKDGVKKLNLYLIINYFKGGKLRFKKIKPEAFEANRFYTVINKKSGEIVPMEVNFNFDDPNLIILPLAFGKRQGREFIWNDLLSLETGSLKLANGRVIEKTLYNRRTRQDEPALFVALTFERREVLDSSNIKPMNLIGVDRGENIPAVIALTDPEGCPLSRFKDSLGNPTHILRIGESYKEKQRTIQAKKEVEQRRAGGYSRKYASKAKNLADDMVRNTARDLLYYAVTQDAMLIFENLSRGFGRQGKRTFMAERQYTRMEDWLTAKLAYEGLPSKTYLSKTLAQYTSKTCSNCGFTITSADYDRVLEKLKKTATGWMTTINGKELKVEGQITYYNRYKRQNVVKDLSVELDRLSEESVNNDISSWTKGRSGEALSLLKKRFSHRPVQEKFVCLNCGFETHADEQAALNIARSWLFLRSQEYKKYQTNKTTGNTDKRAFVETWQSFYRKKLKEVWKPAV

SEQ ID NO: 285 - protein, 978 aa, synthetic construct
QEIKRINKIRRRLVKDSNTKKAGKTGPMKTLLVRVMTPDLRERLENLRKKPENIPQPISNTSRANLNKLLTDYTEMKKAILHVYWEEFQKDPVGLMSRVAQPASKKIDQNKLKPEMDEKGNLTTAGFACSQCGQPLFVYKLEQVSEKGKAYTNYFGRCNVAEHEKLILLAQLKPEKDSDEAVTYSLGKFGQRALDFYSIHVTKESTHPVKPLAQIAGNRYASGPVGKALSDACMGTIASFLSKYQDIIIEHQKVVKGNQKRLESLRELAGKENLEYPSVTLPPQPHTKEGVDAYNEVIARVRMWVNLNLWQKLKLSRDDAKPLLRLKGFPSFPLVERQANEVDWWDMVCNVKKLINEKKEDGKVFWQNLAIYKRQEALRPYLSSEEDRKKGKKFARYQLGDLLLHLEKKHGEDWGKVYDEAWERIDKKVEGLSKHIKLEEERRSEDAQSKAALTDWLRAKASFVIEGLKEADKDEFCRCELKLQKWYGDLRGKPFAIEAENSILDISGFSKQYNCAFIWQKDGVKKLNLYLIINYFKGGKLRFKKIKPEAFEANRFYTVINKKSGEIVPMEVNFNFDDPNLIILPLAFGKRQGREFIWNDLLSLETGSLKLANGRVIEKTLYNRRTRQDEPALFVALTFERREVLDSSNIKPMNLIGVDRGENIPAVIALTDPEGCPLSRFKDSLGNPTHILRIGESYKEKQRTIQAKKEVEQRRAGGYSRKYASKAKNLADDMVRNTARDLLYYAVTQDAMLIFENLSRGFGRQGKRTFMAERQYTRMEDWLTAKLAYEGLPSKTYLSKTLAQYTSKTCSNCGFTITSADYDRVLEKLKKTATGWMTTINGKELKVEGQITYYNRYKRQNVVKDLSVELDRLSEESVNNDISSWTKGRSGEALSLLKKRFSHRPVQEKFVCLNCGFETHADEQAALNIARSWLFLRSQEYKKYQTNKTTGNTDKRAFVETWQSFYRKKLKEVWKPAV

SEQ ID NO: 286 - protein, 979 aa, synthetic construct
QEIKRINKIRRRLVKDSNTKKAGKTGPMKTLLVRVMTPDLRERLENLRKKPENIPQPISNTSRANLNKLLTDYTEMKKAILHVYWEEFQKDPVGLMSRVAQPASKKIDQNKLKPEMDEKGNLTTAGFACSQCGQPLFVYKLEQVSEKGKAYTNYFGRCNVAEHEKLILLAQLKPEKDSDEAVTYSLGKFGQRALDFYSIHVTKESTHPVKPLAQIAGNRYASGPVGKALSDACMGTIASFLSKYQDIIIEHQKVVKGNQKRLESLRELAGKENLEYPSVTLPPQPHTKEGVDAYNEVIARVRMWVNLNLWQKLKLSRDDAKPLLRLKGFPSFPLVERQANEVDWWDMVCNVKKLINEKKEDGKVFWQNLAGYKRQEALRPYLSSEEDVRKKGKKFARYQLGDLLLHLEKKHGEDWGKVYDEAWERIDKKVEGLSKHIKLEEERRSEDAQSKAALTDWLRAKASFVIEGLKEADKDEFCRCELKLQKWYGDLRGKPFAIEAENSILDISGFSKQYNCAFIWQKDGVKKLNLYLIINYFKGGKLRFKKIKPEAFEANRFYTVINKKSGEIVPMEVNFNFDDPNLIILPLAFGKRQGREFIWNDLLSLETGSLKLANGRVIEKTLYNRRTRQDEPALFVALTFERREVLDSSNIKPMNLIGVDRGENIPAVIALTDPEGCPLSRFKDSLGNPTHILRIGESYKEKQRTIQAKKEVEQRRAGGYSRKYASKAKNLADDMVRNTARDLLYYAVTQDAMLIFENLSRGFGRQGKRTFMAERQYTRMEDWLTAKLAYEGLPSKTYLSKTLAQYTSKTCSNCGFTITSADYDRVLEKLKKTATGWMTTINGKELKVEGQITYYNRYKRQNVVKDLSVELDRLSEESVNNDISSWTKGRSGEALSLLKKRFSHRPVQEKFVCLNCGFETHADEQAALNIARSWLFLRSQEYKKYQTNKTTGNTDKRAFVETWQSFYRKKLKEVWKPAV

SEQ ID NO: 287 - protein, 978 aa, synthetic construct
QEIKRINKIRRRLVKDSNTKKAGKTGPMKTLLVRVMTPDLRERLENLRKKPENIPQPISNTSRANLNKLLTDYTEMKKAILHVYWEEFQKDPVGLMSRVAQPASKKIDQNKLKPEMDEKGNLTTAGFACSQCGQPLFVYKLEQVSEKGKAYTNYFGRCNVAEHEKLILLAQLKPEKDSDEAVTYSLGKFGQRALDFYSIHVTKESTHPVKPLAQIAGNRYASGPVGKALSDACMGTIASFLSKYQDIIIEHQKVVKGNQKRLESLRELAGKENLEYPSVTLPPQPHTKEGVDAYNEVIARVRMWVNLNLWQKLKLSRDDAKPLLRLKGFPSFPLVERQANEVDWWDMVCNVKKLINEKKEDGKVFWQNLAGYKRQEALRPYLSSEEDREKGKKFARYQLGDLLLHLEKKHGEDWGKVYDEAWERIDKKVEGLSKHIKLEEERRSEDAQSKAALTDWLRAKASFVIEGLKEADKDEFCRCELKLQKWYGDLRGKPFAIEAENSILDISGFSKQYNCAFIWQKDGVKKLNLYLIINYFKGGKLRFKKIKPEAFEANRFYTVINKKSGEIVPMEVNFNFDDPNLIILPLAFGKRQGREFIWNDLLSLETGSLKLANGRVIEKTLYNRRTRQDEPALFVALTFERREVLDSSNIKPMNLIGVDRGENIPAVIALTDPEGCPLSRFKDSLGNPTHILRIGESYKEKQRTIQAKKEVEQRRAGGYSRKYASKAKNLADDMVRNTARDLLYYAVTQDAMLIFENLSRGFGRQGKRTFMAERQYTRMEDWLTAKLAYEGLPSKTYLSKTLAQYTSKTCSNCGFTITSADYDRVLEKLKKTATGWMTTINGKELKVEGQITYYNRYKRQNVVKDLSVELDRLSEESVNNDISSWTKGRSGEALSLLKKRFSHRPVQEKFVCLNCGFETHADEQAALNIARSWLFLRSQEYKKYQTNKTTGNTDKRAFVETWQSFYRKKLKEVWKPAV

SEQ ID NO: 288 - protein, 979 aa, synthetic construct
QEIKRINKIRRRLVKDSNTKKAGKTGPMKTLLVRVMTPDLRERLENLRKKPENIPQPISNTSRANLNKLLTDYTEMKKAILHVYWEEFQKDPVGLMSRVAQPASKKIDQNKLKPEMDEKGNLTTAGFACSQCGQPLFVYKLEQVSEKGKAYTNYFGRCNVAEHEKLILLAQLKPEKDSDEAVTYSLGKFGQRALDFYSIHVTKESTHPVKPLAQIAGNRYASGPVGKALSDACMGTIASFLSKYQDIIIEHQKVVKGNQKRLESLRELAGKENLEYPSVTLPPQPHTKEGVDAYNEVIARVRMWVNLNLWQKLKLSRDDAKPLLRLKGFPSFPLVERQANEVDWWDMVCNVKKLINEKKEDGKVFWQNLAGYKRQEALRPYLSSEEDRKKGKKFARYQLGDLLLHLEKKHGEDWGKVYDEAWERIDKKVEGLSKHIKLEEERRSEDAQSKAALTDWLRAKASFVIEGLKEADKDEMFCRCELKLQKWYGDLRGKPFAIEAENSILDISGFSKQYNCAFIWQKDGVKKLNLYLIINYFKGGKLRFKKIKPEAFEANRFYTVINKKSGEIVPMEVNFNFDDPNLIILPLAFGKRQGREFIWNDLLSLETGSLKLANGRVIEKTLYNRRTRQDEPALFVALTFERREVLDSSNIKPMNLIGVDRGENIPAVIALTDPEGCPLSRFKDSLGNPTHILRIGESYKEKQRTIQAKKEVEQRRAGGYSRKYASKAKNLADDMVRNTARDLLYYAVTQDAMLIFENLSRGFGRQGKRTFMAERQYTRMEDWLTAKLAYEGLPSKTYLSKTLAQYTSKTCSNCGFTITSADYDRVLEKLKKTATGWMTTINGKELKVEGQITYYNRYKRQNVVKDLSVELDRLSEESVNNDISSWTKGRSGEALSLLKKRFSHRPVQEKFVCLNCGFETHADEQAALNIARSWLFLRSQEYKKYQTNKTTGNTDKRAFVETWQSFYRKKLKEVWKPAV

SEQ ID NO: 289 - protein, 978 aa, synthetic construct
QEIKRINKIRRRLVKDSNTKKAGKTGPMKTLLVRVMTPDLRERLENLRKKPENIPQPISNTSRANLNKLLTDYTEMKKAILHVYWEEFQKDPVGLMSRVAQPASKKIDQNKLKPEMDEKGNLTTAGFACSQCGQPLFVYKLEQVSEKGKAYTNYFGRCNVAEHEKLILLAQLKPEKDSDEAVTYSLGKFGQRALDFYSIHVTKESTHPVKPLAQIAGNRYASGPVGKALSDACMGTIASFLSKYQDIIIEHQKVVKGNQKRLESLRELAGKENLEYPSVTLPPQPHTKEGVDAYNEVIARVRMWVNLNLWQKLKLSRDDAKPLLRLKGFPSFPLVERQANEVDWWDMVCNVKKLINEKKEDGKVFWQNLAGYKRQEALRPYLSSEEDRKKGKKFARYQLGDLLLHLEKKHGEDWGKVYDEAWERIDKKVEGLSKHIKLEEERRSEDAQSKAALTDWLRAKASFVIEGLKEADKDEFCRCELKLQKWYGDLRGKPFAIEAENSILDISGFSKQYNCAFIWQKDGVKKQNLYLIINYFKGGKLRFKKIKPEAFEANRFYTVINKKSGEIVPMEVNFNFDDPNLIILPLAFGKRQGREFIWNDLLSLETGSLKLANGRVIEKTLYNRRTRQDEPALFVALTFERREVLDSSNIKPMNLIGVDRGENIPAVIALTDPEGCPLSRFKDSLGNPTHILRIGESYKEKQRTIQAKKEVEQRRAGGYSRKYASKAKNLADDMVRNTARDLLYYAVTQDAMLIFENLSRGFGRQGKRTFMAERQYTRMEDWLTAKLAYEGLPSKTYLSKTLAQYTSKTCSNCGFTITSADYDRVLEKLKKTATGWMTTINGKELKVEGQITYYNRYKRQNVVKDLSVELDRLSEESVNNDISSWTKGRSGEALSLLKKRFSHRPVQEKFVCLNCGFETHADEQAALNIARSWLFLRSQEYKKYQTNKTTGNTDKRAFVETWQSFYRKKLKEVWKPAV

SEQ ID NO: 290 - protein, 978 aa, synthetic construct
QEIKRINKIRRRLVKDSNTKKAGKTGPMKTLLVRVMTPDLRERLENLRKKPENIPQPISNTSRANLNKLLTDYTEMKKAILHVYWEEFQKDPVGLMSRVAQPASKKIDQNKLKPEMDEKGNLTTAGFACSQCGQPLFVYKLEQVSEKGKAYTNYFGRCNVAEHEKLILLAQLKPEKDSDEAVTYSLGKFGQRALDFYSIHVTKESTHPVKPLAQIAGNRYASGPVGKALSDACMGTIASFLSKYQDIIIEHQKVVKGNQKRLESLRELAGKENLEYPSVTLPPQPHTKEGVDAYNEVIARVRMWVNLNLWQKLKLSRDDAKPLLRLKGFPSFPLVERQANEVDWWDMVCNVKKLINEKKEDGKVFWQNLAGYKRQEALRPYLSSEEDRKKGKKFARYQLGDLLLHLEKKHGEDWGKVYDEAWERIDKKVEGLSKHIKLEEERRSEDAQSKAALTDWLRAKASFVIEGLKEADKDEFCRCELKLQKWYGDLRGKPFAIEAENSILDISGFSKQYNCAFIWQKDGVKKLNLYLIINYFKGGKLRFKKIKPEAFEANRFYTVINKKSGEIVIMEVNFNFDDPNLIILPLAFGKRQGREFIWNDLLSLETGSLKLANGRVIEKTLYNRRTRQDEPALFVALTFERREVLDSSNIKPMNLIGVDRGENIPAVIALTDPEGCPLSRFKDSLGNPTHILRIGESYKEKQRTIQAKKEVEQRRAGGYSRKYASKAKNLADDMVRNTARDLLYYAVTQDAMLIFENLSRGFGRQGKRTFMAERQYTRMEDWLTAKLAYEGLPSKTYLSKTLAQYTSKTCSNCGFTITSADYDRVLEKLKKTATGWMTTINGKELKVEGQITYYNRYKRQNVVKDLSVELDRLSEESVNNDISSWTKGRSGEALSLLKKRFSHRPVQEKFVCLNCGFETHADEQAALNIARSWLFLRSQEYKKYQTNKTTGNTDKRAFVETWQSFYRKKLKEVWKPAV

SEQ ID NO: 291 - protein, 978 aa, synthetic construct
QEIKRINKIRRRLVKDSNTKKAGKTGPMKTLLVRVMTPDLRERLENLRKKPENIPQPISNTSRANLNKLLTDYTEMKKAILHVYWEEFQKDPVGLMSRVAQPASKKIDQNKLKPEMDEKGNLTTAGFACSQCGQPLFVYKLEQVSEKGKAYTNYFGRCNVAEHEKLILLAQLKPEKDSDEAVTYSLGKFGQRALDFYSIHVTKESTHPVKPLAQIAGNRYASGPVGKALSDACMGTIASFLSKYQDIIIEHQKVVKGNQKRLESLRELAGKENLEYPSVTLPPQPHTKEGVDAYNEVIARVRMWVNLNLWQKLKLSRDDAKPLLRLKGFPSFPLVERQANEVDWWDMVCNVKKLINEKKEDGKVFWQNLAGYKRQEALRPYLSSEEDRKKGKKFARYQLGDLLLHLEKKHGEDWGKVYDEAWERIDKKVEGLSKHIKLEEERRSEDAQSKAALTDWLRAKASFVIEGLKEADKDEFCRCELKLQKWYGDLRGKPFAIEAENSILDISGFSKQYNCAFIWQKDGVKKLNLYLIINYFKGGKLRFKKIKPEAFEANRFYTVINKKSGEIVPMEVNFNFDDPNLIILPLAFGKRQGREFIWNDLLSLETGSLKLANGRVIEKTLYNRRTRQDEPALFVALTFERREVNDSSNIKPMNLIGVDRGENIPAVIALTDPEGCPLSRFKDSLGNPTHILRIGESYKEKQRTIQAKKEVEQRRAGGYSRKYASKAKNLADDMVRNTARDLLYYAVTQDAMLIFENLSRGFGRQGKRTFMAERQYTRMEDWLTAKLAYEGLPSKTYLSKTLAQYTSKTCSNCGFTITSADYDRVLEKLKKTATGWMTTINGKELKVEGQITYYNRYKRQNVVKDLSVELDRLSEESVNNDISSWTKGRSGEALSLLKKRFSHRPVQEKFVCLNCGFETHADEQAALNIARSWLFLRSQEYKKYQTNKTTGNTDKRAFVETWQSFYRKKLKEVWKPAV

SEQ ID NO: 292 - protein, 979 aa, synthetic construct
QEIKRINKIRRRLVKDSNTKKAGKTGPMKTLLVRVMTPDLRERLENLRKKPENIPQPISNTSRANLNKLLTDYTEMKKAILHVYWEEFQKDPVGLMSRVAQPASKKIDQNKLKPEMDEKGNLTTAGFACSQCGQPLFVYKLEQVSEKGKAYTNYFGRCNVAEHEKLILLAQLKPEKDSDEAVTYSLGKFGQRALDFYSIHVTKESTHPVKPLAQIAGNRYASGPVGKALSDACMGTIASFLSKYQDIIIEHQKVVKGNQKRLESLRELAGKENLEYPSVTLPPQPHTKEGVDAYNEVIARVRMWVNLNLWQKLKLSRDDAKPLLRLKGFPSFPLVERQANEVDWWDMVCNVKKLINEKKEDGKVFWQNLAGYKRQEALRPYLSSEEDRKKGKKFARYQLGDLLLHLEKKHGEDWGKVYDEAWERIDKKVEGLSKHIKLEEERRSEDAQSKAALTDWLRAKASFVIEGLKEADKDEFCRCELKLQKWYGDLRGKPFAIEAENSILDISGFSKQYNCAFIWQKDGVKKLNLYLIINYFKGGKLRFKKIKPEAFEANRFYTVINKKSGEIVPMEVNFNFDDPNLIILPLAFGKRQGREFIWNDLLSLETGSLKLANGRVIEKTLYNRRTRQDEPALFVALTFERREVLDSSNIKPMNLIGVDRGENIPAVIALTDPEGCPLSRFKDSLGNPTHILRIGESYKEKQRTIQAKKEVEQRRAGGYSRKYASKAKNLADDMVRNTARDLLYYAVTQDAMLIFENLSRGFGRQGKRTFMAERQYTRMEDWLTAKLAYEGLPSGKTYLSKTLAQYTSKTCSNCGFTITSADYDRVLEKLKKTATGWMTTINGKELKVEGQITYYNRYKRQNVVKDLSVELDRLSEESVNNDISSWTKGRSGEALSLLKKRFSHRPVQEKFVCLNCGFETHADEQAALNIARSWLFLRSQEYKKYQTNKTTGNTDKRAFVETWQSFYRKKLKEVWKPAV

SEQ ID NO: 293 - protein, 978 aa, synthetic construct
QEIKRINKIRRRLVKDSNTKKAGKTGPMKTLLVRVMTPDLRERLENLRKKPENIPQPISNTSRANLNKLLTDYTEMKKAILHVYWEEFQKDPVGLMSRVAQPASKKIDQNKLKPEMDEKGNLTTAGFACSQCGQPLFVYKLEQVSEKGKAYTNYFGRCNVAEHEKLILLAQLKPEKDSDEAVTYSLGKFGQRALDFYSIHVTKESTHPVKPLAQIAGNRYASGPVGKALSDACMGTIASFLSKYQDIIIEHQKVVKGNQKRLESLRELAGKENLEYPSVTLPPQPHTKEGVDAYNEVIARVRMWVNLNLWQKLKLSRDDAKPLLRLKGFPSFPLVERQANEVDWWDMVCNVKKLINEKKEDGKVFWQNLAGYKRQEALRPYLSSEEDRKKGKKFARYQLGDLLLHLEKKHGEDWGKVYDEAWERIDKKVEGLSKHIKLEEERRSEDAQSKAALTDWLRAKASFVIEGLKEADKDEFCRCELKLQKWYGDLRGKPFAIEAENSILDISGFSKQYNCAFIWQKDGVKKLNLYLIINYFKGGKLRFKKIKPEAFEANRFYTVINKKSGEIVPMEVNFNFDDPNLIILPLAFGKRQGREFIWNDLLSLETGSLKLANGRVIEKTLYNRRTRQDEPALFVALTFERREVLDSSNIKPMNLIGVDRGENIPAVIALTDPEGCPLSRFKDSLGNPTHILRIGESYKEKQRTIQAKKEVEQRRAGGYSRKYASKAKNLADDMVRNTARDLLYYAVTQDAMLIFENLSRGFGRQGKRTFMAERQYTRMEDWLTAKLAYEGLPSKTYLSKTLAQYTSKTCSNCGFTITSADYDRMLEKLKKTATGWMTTINGKELKVEGQITYYNRYKRQNVVKDLSVELDRLSEESVNNDISSWTKGRSGEALSLLKKRFSHRPVQEKFVCLNCGFETHADEQAALNIARSWLFLRSQEYKKYQTNKTTGNTDKRAFVETWQSFYRKKLKEVWKPAV

SEQ ID NO: 294 - protein, 978 aa, synthetic construct
QEIKRINKIRRRLVKDSNTKKAGKTGPMKTLLVRVMTPDLRERLENLRKKPENIPQPISNTSRANLNKLLTDYTEMKKAILHVYWEEFQKDPVGLMSRVAQPASKKIDQNKLKPEMDEKGNLTTAGFACSQCGQPLFVYKLEQVSEKGKAYTNYFGRCNVAEHEKLILLAQLKPEKDSDEAVTYSLGKFGQRALDFYSIHVTKESTHPVKPLAQIAGNRYASGPVGKALSDACMGTIASFLSKYQDIIIEHQKVVKGNQKRLESLRELAGKENLEYPSVTLPPQPHTKEGVDAYNEVIARVRMWVNLNLWQKLKLSRDDAKPLLRLKGFPSFPLVERQANEVDWWDMVCNVKKLINEKKEDGKVFWQNLAGYKRQEALRPYLSSEEDRKKGKKFARYQLGDLLLHLEKKHGEDWGKVYDEAWERIDKKVEGLSKHIKLEEERRSEDAQSKAALTDWLRAKASFVIEGLKEADKDEFCRCELKLQKWYGDLRGKPFAIEAENSILDISGFSKQYNCAFIWQKDGVKKLNLYLIINYFKGGKLRFKKIKPEAFEANRFYTVINKKSGEIVPMEVNFNFDDPNLIILPLAFGKRQGREFIWNDLLSLETGSLKLANGRVIEKTLYNRRTRQDEPALFVALTFERREVLDSSNIKPMNLIGVDRGENIPAVIALTDPEGCPLSRFKDSLGNPTHILRIGESYKEKQRTIQAKKEVEQRRAGGYSRKYASKAKNLADDMVRNTARDLLYYAVTQDAMLIFENLSRGFGRQGKRTFMAERQYTRMEDWLTAKLAYEGLPSKTYLSKTLAQYTSKTCSNCGFTITSADYDRVLEKLKKTATGWMTTINGKELKVEGQITYYNRYKRQNVVKDLSVELDRLSEESVNNDISSWTKGRQGEALSLLKKRFSHRPVQEKFVCLNCGFETHADEQAALNIARSWLFLRSQEYKKYQTNKTTGNTDKRAFVETWQSFYRKKLKEVWKPAV

SEQ ID NO: 295 - protein, 978 aa, synthetic construct
QEIKRINKIRRRLVKDSNTKKAGKTGPMKTLLVRVMTPDLRERLENLRKKPENIPQPISNTSRANLNKLLTDYTEMKKAILHVYWEEFQKDPVGLMSRVAQPASKKIDQNKLKPEMDEKGNLTTAGFACSQCGQPLFVYKLEQVSEKGKAYTNYFGRCNVAEHEKLILLAQLKPEKDSDEAVTYSLGKFGQRALDFYSIHVTKESTHPVKPLAQIAGNRYASGPVGKALSDACMGTIASFLSKYQDIIIEHQKVVKGNQKRLESLRELAGKENLEYPSVTLPPQPHTKEGVDAYNEVIARVRMWVNLNLWQKLKLSRDDAKPLLRLKGFPSFPLVERQANEVDWWDMVCNVKKLINEKKEDGKVFWQNLAGYKRQEALRPYLSSEEDRKKGKKFARYQLGDLLLHLEKKHGEDWGKVYDEAWERIDKKVEGLSKHIKLEEERRSEDAQSKAALTDWLRAKASFVIEGLKEADKDEFCRCELKLQKWYGDLRGKPFAIEAENSILDISGFSKQYNCAFIWQKDGVKKLNLYLIINYFKGGKLRFKKIKPEAFEANRFYTVINKKSGEIVPMEVNFNFDDPNLIILPLAFGKRQGREFIWNDLLSLETGSLKLANGRVIEKTLYNRRTRQDEPALFVALTFERREVLDSSNIKPMNLIGVDRGENIPAVIALTDPEGCPLSRFKDSLGNPTHILRIGESYKEKQRTIQAKKEVEQRRAGGYSRKYASKAKNLADDMVRNTARDLLYYAVTQDAMLIFENLSRGFGRQGKRTFMAERQYTRMEDWLTAKLAYEGLPSKTYLSKTLAQYTSKTCSNCGFTITSADYDRVLEKLKKTATGWMTTINGKELKVEGQITYYNRYKRQNVVKDLSVELDRLSEESVNNDISSWTKGRSGEALSLLKKRFSHRPVQEKFVCLNCEFETHADEQAALNIARSWLFLRSQEYKKYQTNKTTGNTDKRAFVETWQSFYRKKLKEVWKPAV

SEQ ID NO: 296 - protein, 979 aa, synthetic construct
QEIKRINKIRRRLVKDSNTKKAGKTGPMKTLLVRVMTPDLRERLENLRKKPENIPQPISNTSRANLNKLLTDYTEMKKAILHVYWEEFQKDPVGLMSRVAQPASKKIDQNKLKPEMDEKGNLTTAGFACSQCGQPLFVYKLEQVSEKGKAYTNYFGRCNVAEHEKLILLAQLKPEKDSDEAVTYSLGKFGQRALDFYSIHVTKESTHPVKPLAQIAGNRYASGPVGKALSDACMGTIASFLSKYQDIIIEHQKVVKGNQKRLESLRELAGKENLEYPSVTLPPQPHTKEGVDAYNEVIARVRMWVNLNLWQKLKLSRDDAKPLLRLKGFPSFPLVERQANEVDWWDMVCNVKKLINEKKEDGKVFWQNLAGYKRQEALRPYLSSEEDRKKGKKFARYQLGDLLLHLEKKHGEDWGKVYDEAWERIDKKVEGLSKHIKLEEERRSEDAQSKAALTDWLRAKASFVIEGLKEADKDEFCRCELKLQKWYGDLRGKPFAIEAENSILDISGFSKQYNCAFIWQKDGVKKLNLYLIINYFKGGKLRFKKIKPEAFEANRFYTVINKKSGEIVPMEVNFNFDDPNLIILPLAFGKRQGREFIWNDLLSLETGSLKLANGRVIEKTLYNRRTRQDEPALFVALTFERREVLDSSNIKPMNLIGVDRGENIPAVIALTDPEGCPLSRFKDSLGNPTHILRIGESYKEKQRTIQAKKEVEQRRAGGYSRKYASKAKNLADDMVRNTARDLLYYAVTQDAMLIFENLSRGFGRQGKRTFMAERQYTRMEDWLTAKLAYEGLPSKTYLSKTLAQYTSKTCSNCGFTITSADYDRVLEKLKKTATGWMTTINGKELKVEGQITYYNRYKRQNVVKDLSVELDRLSEESVNNDISSWTKGRSGEALSLLKKRFSHRPVQEKFVCLNCGFETHADEQAALNIARSWLFLRSQEYKKYQTNKTSTGNTDKRAFVETWQSFYRKKLKEVWKPAV

SEQ ID NO: 297 - protein, 979 aa, synthetic construct
QEIKRINKIRRRLVKDSNTKKAGKTGPMKTLLVRVMTPDLRERLENLRKKPENIPQPISNTSRANLNKLLTDYTEMKKAILHVYWEEFQKDPVGLMSRVAQPASKKIDQNKLKPEMDEKGNLTTAGFACSQCGQPLFVYKLEQVSEKGKAYTNYFGRCNVAEHEKLILLAQLKPEKDSDEAVTYSLGKFGQRALDFYSIHVTKESTHPVKPLAQIAGNRYASGPVGKALSDACMGTIASFLSKYQDIIIEHQKVVKGNQKRLESLRELAGKENLEYPSVTLPPQPHTKEGVDAYNEVIARVRMWVNLNLWQKLKLSRDDAKPLLRLKGFPSFPLVERQANEVDWWDMVCNVKKLINEKKEDGKVFWQNLAGYKRQEALRPYLSSEEDRKKGKKFARYQLGDLLLHLEKKHGEDWGKVYDEAWERIDKKVEGLSKHIKLEEERRSEDAQSKAALTDWLRAKASFVIEGLKEADKDEFCRCELKLQKWYGDLRGKPFAIEAENSILDISGFSKQYNCAFIWQKDGVKKLNLYLIINYFKGGKLRFKKIKPEAFEANRFYTVINKKSGEIVPMEVNFNFDDPNLIILPLAFGKRQGREFIWNDLLSLETGSLKLANGRVIEKTLYNRRTRQDEPALFVALTFERREVLDSSNIKPMNLIGVDRGENIPAVIALTDPEGCPLSRFKDSLGNPTHILRIGESYKEKQRTIQAKKEVEQRRAGGYSRKYASKAKNLADDMVRNTARDLLYYAVTQDAMLIFENLSRGFGRQGKRTFMAERQYTRMEDWLTAKLAYEGLPSKTYLSKTLAQYTSKTCSNCGFTITSADYDRVLEKLKKTATGWMTTINGKELKVEGQITYYNRYKRQNVVKDLSVELDRLSEESVNNDISSWTKGRSGEALSLLKKRFSHRPVQEKFVCLNCGFETHADEQAALNIARSWLFLRSQEYKKYQTNKTTGKNTDKRAFVETWQSFYRKKLKEVWKPAV

SEQ ID NO: 298 - protein, 979 aa, synthetic construct
QEIKRINKIRRRLVKDSNTKKAGKTRGPMKTLLVRVMTPDLRERLENLRKKPENIPQPISNTSRANLNKLLTDYTEMKKAILHVYWEEFQKDPVGLMSRVAQPASKKIDQNKLKPEMDEKGNLTTAGFACSQCGQPLFVYKLEQVSEKGKAYTNYFGRCNVAEHEKLIKLAQLKPEKDSDEAVTYSLGKFGQRALDFYSIHVTKESTHPVKPLAQIAGNRYASGPVGKALSDACMGTIASFLSKYQDIIIEHQKVVKGNQKRLESLRELAGKENLEYPSVTLPPQPHTKEGVDAYNEVIARVRMWVNLNLWQKLKLSRDDAKPLLRLKGFPSFPLVERQANEVDWWDMVCNVKKLINEKKEDGKVFWQNLAGYKRQEALRPYLSSEEDRKKGKKFARYQLGDLLLHLEKKHGEDWGKVYDEAWERIDKKVEGLSKHIKLEEERRSEDAQSKAALTDWLRAKASFVIEGLKEADKDEFCRCELKLQKWYGDLRGKPFAIEAENSILDISGFSKQYNCAFIWQKDGVKKLNLYLIINYFKGGKLRFKKIKPEAFEANRFYTVINKKSGEIVPMEVNFNFDDPNLIILPLAFGKRQGREFIWNDLLSLETGSLKLANGRVIEKTLYNRRTRQDEPALFVALTFERREVLDSSNIKPMNLIGVDRGENIPAVIALTDPEGCPLSRFKDSLGNPTHILRIGESYKEKQRTIQAKKEVEQRRAGGYSRKYASKAKNLADDMVRNTARDLLYYAVTQDAMLIFENLSRGFGRQGKRTFMAERQYTRMEDWLTAKLAYEGLPSKTYLSKTLAQYTSKTCSNCGFTITSADYDRVLEKLKKTATGWMTTINGKELKVEGQITYYNRYKRQNVVKDLSVELDRLSEESVNNDISSWTKGRSGEALSLLKKRFSHRPVQEKFVCLNCGFETHADEQAALNIARSWLFLRSQEYKKYQTNKTTGNTDKRAFVETWQSFYRKKLKEVWKPAV

SEQ ID NO: 299 - protein, 979 aa, synthetic construct
QEIKRINKIRRRLVKDSNTKKAGKTGPMKTLLVRVMTPDLRERLENLRKKPENIPQPISNTSRANLNKLLTDYTEMKKAILHVYWEEFQKDPVGLMSRVAGQPASKKIDQNKLKPEMDEKGNLTTAGFACSQCGQPLFVYKLEQVSEKGKAYTNYFGRCNVAEHEKLILLAQLKPEKDSDEAVTYSLGKFGQRALDFYSIHVTKESTHPVKPLAQIAGNRYASGPVGKALSDACMGTIASFLSKYQDIIIEHQKVVKGNQKRLESLRELAGKENLEYPSVTLPPQPHTKEGVDAYNEVIARVRMWVNLNLWQKLKLSRDDAKPLLRLKGFPSFPLVERQANEVDWWDMVCNVKKLINEKKEDGKVFWQNLAGYKRQEALRPYLSSEEDRKKGKKFARYQLGDLLLHLEKKHGEDWGKVYDEAWERIDKKVEGLSKHIKLEEERRSEDAQSKAALTDWLRAKASFVIEGLKEADKDEFCRCELKLQKWYGDLRGKPFAIEAENSILDISGFSKQYNCAFIWQKDGVKKLNLYLIINYFKGGKLRFKKIKPEAFEANRFYTVINKKSGEIVPMEVNFNFDDPNLIILPLAFGKRQGREFIWNDLLSLETGSLKLANGRVIEKTLYNRRTRQDEPALFVALTFERREVLDSSNIKPMNLIGVDRGENIPAVIALTDPEGCPLSRFKDSLGNPTHILRIGESYKEKQRTIQAKKEVEQRRAGGYSRKYASKAKNLADDMVRNTARDLLYYAVTQDAMLIFENLSRGFGRQGKRTFMAERQYTRMEDWLTAKLAYEGLPSKTYLSKTLAQYTSKTCSNCGFTITSADYDRVLEKLKKTATGWMTTINGKELKVEGQITYYNRYKRQNVVKDLSVELDRLSEESVNNDISSWTKGRSGEALSLLKKRFSHRPVQEKFVCLNCGFETHADEQAALNIARSWLFLRSQEYKKYQTNKTTGNTDKRAFVETWQSFYRKKLKEVWKPAV

SEQ ID NO: 300 - protein, 979 aa, synthetic construct
QEIKRINKIRRRLVKDSNTKKAGKTGPMKTLLVRVMTPDLRERLENLRKKPENIPQPISNTSRANLNKLLTDYTEMKKAILHVYWEEFQKDPVGLMSRVAQPIASKKIDQNKLKPEMDEKGNLTTAGFACSQCGQPLFVYKLEQVSEKGKAYTNYFGRCNVAEHEKLILLAQLKPEKDSDEAVTYSLGKFGQRALDFYSIHVTKESTHPVKPLAQIAGNRYASGPVGKALSDACMGTIASFLSKYQDIIIEHQKVVKGNQKRLESLRELAGKENLEYPSVTLPPQPHTKEGVDAYNEVIARVRMWVNLNLWQKLKLSRDDAKPLLRLKGFPSFPLVERQANEVDWWDMVCNVKKLINEKKEDGKVFWQNLAGYKRQEALRPYLSSEEDRKKGKKFARYQLGDLLLHLEKKHGEDWGKVYDEAWERIDKKVEGLSKHIKLEEERRSEDAQSKAALTDWLRAKASFVIEGLKEADKDEFCRCELKLQKWYGDLRGKPFAIEAENSILDISGFSKQYNCAFIWQKDGVKKLNLYLIINYFKGGKLRFKKIKPEAFEANRFYTVINKKSGEIVPMEVNFNFDDPNLIILPLAFGKRQGREFIWNDLLSLETGSLKLANGRVIEKTLYNRRTRQDEPALFVALTFERREVLDSSNIKPMNLIGVDRGENIPAVIALTDPEGCPLSRFKDSLGNPTHILRIGESYKEKQRTIQAKKEVEQRRAGGYSRKYASKAKNLADDMVRNTARDLLYYAVTQDAMLIFENLSRGFGRQGKRTFMAERQYTRMEDWLTAKLAYEGLPSKTYLSKTLAQYTSKTCSNCGFTITSADYDRVLEKLKKTATGWMTTINGKELKVEGQITYYNRYKRQNVVKDLSVELDRLSEESVNNDISSWTKGRSGEALSLLKKRFSHRPVQEKFVCLNCGFETHADEQAALNIARSWLFLRSQEYKKYQTNKTTGNTDKRAFVETWQSFYRKKLKEVWKPAV

SEQ ID NO: 301 - protein, 979 aa, synthetic construct
QEIKRINKIRRRLVKDSNTKKAGKTGPMKTLLVRVMTPDLRERLENLRKKPENIPQPISNTSRANLNKLLTDYTEMKKAILHVYWEEFQKDPVGLMSRVAQPALSKKIDQNKLKPEMDEKGNLTTAGFACSQCGQPLFVYKLEQVSEKGKAYTNYFGRCNVAEHEKLILLAQLKPEKDSDEAVTYSLGKFGQRALDFYSIHVTKESTHPVKPLAQIAGNRYASGPVGKALSDACMGTIASFLSKYQDIIIEHQKVVKGNQKRLESLRELAGKENLEYPSVTLPPQPHTKEGVDAYNEVIARVRMWVNLNLWQKLKLSRDDAKPLLRLKGFPSFPLVERQANEVDWWDMVCNVKKLINEKKEDGKVFWQNLAGYKRQEALRPYLSSEEDRKKGKKFARYQLGDLLLHLEKKHGEDWGKVYDEAWERIDKKVEGLSKHIKLEEERRSEDAQSKAALTDWLRAKASFVIEGLKEADKDEFCRCELKLQKWYGDLRGKPFAIEAENSILDISGFSKQYNCAFIWQKDGVKKLNLYLIINYFKGGKLRFKKIKPEAFEANRFYTVINKKSGEIVPMEVNFNFDDPNLIILPLAFGKRQGREFIWNDLLSLETGSLKLANGRVIEKTLYNRRTRQDEPALFVALTFERREVLDSSNIKPMNLIGVDRGENIPAVIALTDPEGCPLSRFKDSLGNPTHILRIGESYKEKQRTIQAKKEVEQRRAGGYSRKYASKAKNLADDMVRNTARDLLYYAVTQDAMLIFENLSRGFGRQGKRTFMAERQYTRMEDWLTAKLAYEGLPSKTYLSKTLAQYTSKTCSNCGFTITSADYDRVLEKLKKTATGWMTTINGKELKVEGQITYYNRYKRQNVVKDLSVELDRLSEESVNNDISSWTKGRSGEALSLLKKRFSHRPVQEKFVCLNCGFETHADEQAALNIARSWLFLRSQEYKKYQTNKTTGNTDKRAFVETWQSFYRKKLKEVWKPAV

SEQ ID NO: 302 - protein, 979 aa, synthetic construct
QEIKRINKIRRRLVKDSNTKKAGKTGPMKTLLVRVMTPDLRERLENLRKKPENIPQPISNTSRANLNKLLTDYTEMKKAILHVYWEEFQKDPVGLMSRVAQPASKKIDQNKLKPEMDEKGNLTTAGFACSQCGQPLFVYKLEQVSEKGKAYTNYFGRCNVAEHEKLILLAQLKPEKDSDEAVTYSLGKFGQRALDFYSIHVTKESTHPVKPLAQIAGNRYASGPVGKALSDACMGTIASFLSKYQDIIIEHQKVVKGNQKRLESLRELAGKENLEYPSVTLPPQPHTKEGVDAYNEVIARVRMWVNLNLWQKLKLSRDDAKPLLRLKGFPSFPDLVERQANEVDWWDMVCNVKKLINEKKEDGKVFWQNLAGYKRQEALRPYLSSEEDRKKGKKFARYQLGDLLLHLEKKHGEDWGKVYDEAWERIDKKVEGLSKHIKLEEERRSEDAQSKAALTDWLRAKASFVIEGLKEADKDEFCRCELKLQKWYGDLRGKPFAIEAENSILDISGFSKQYNCAFIWQKDGVKKLNLYLIINYFKGGKLRFKKIKPEAFEANRFYTVINKKSGEIVPMEVNFNFDDPNLIILPLAFGKRQGREFIWNDLLSLETGSLKLANGRVIEKTLYNRRTRQDEPALFVALTFERREVLDSSNIKPMNLIGVDRGENIPAVIALTDPEGCPLSRFKDSLGNPTHILRIGESYKEKQRTIQAKKEVEQRRAGGYSRKYASKAKNLADDMVRNTARDLLYYAVTQDAMLIFENLSRGFGRQGKRTFMAERQYTRMEDWLTAKLAYEGLPSKTYLSKTLAQYTSKTCSNCGFTITSADYDRVLEKLKKTATGWMTTINGKELKVEGQITYYNRYKRQNVVKDLSVELDRLSEESVNNDISSWTKGRSGEALSLLKKRFSHRPVQEKFVCLNCGFETHADEQAALNIARSWLFLRSQEYKKYQTNKTTGNTDKRAFVETWQSFYRKKLKEVWKPAV

SEQ ID NO: 303 - protein, 979 aa, synthetic construct
QEIKRINKIRRRLVKDSNTKKAGKTGPMKTLLVRVMTPDLRERLENLRKKPENIPQPISNTSRANLNKLLTDYTEMKKAILHVYWEEFQKDPVGLMSRVAQPASKKIDQNKLKPEMDEKGNLTTAGFACSQCGQPLFVYKLEQVSEKGKAYTNYFGRCNVAEHEKLILLAQLKPEKDSDEAVTYSLGKFGQRALDFYSIHVTKESTHPVKPLAQIAGNRYASGPVGKALSDACMGTIASFLSKYQDIIIEHQKVVKGNQKRLESLRELAGKENLEYPSVTLPPQPHTKEGVDAYNEVIARVRMWVNLNLWQKLKLSRDDAKPLLRLKGFPSFHPLVERQANEVDWWDMVCNVKKLINEKKEDGKVFWQNLAGYKRQEALRPYLSSEEDRKKGKKFARYQLGDLLLHLEKKHGEDWGKVYDEAWERIDKKVEGLSKHIKLEEERRSEDAQSKAALTDWLRAKASFVIEGLKEADKDEFCRCELKLQKWYGDLRGKPFAIEAENSILDISGFSKQYNCAFIWQKDGVKKLNLYLIINYFKGGKLRFKKIKPEAFEANRFYTVINKKSGEIVPMEVNFNFDDPNLIILPLAFGKRQGREFIWNDLLSLETGSLKLANGRVIEKTLYNRRTRQDEPALFVALTFERREVLDSSNIKPMNLIGVDRGENIPAVIALTDPEGCPLSRFKDSLGNPTHILRIGESYKEKQRTIQAKKEVEQRRAGGYSRKYASKAKNLADDMVRNTARDLLYYAVTQDAMLIFENLSRGFGRQGKRTFMAERQYTRMEDWLTAKLAYEGLPSKTYLSKTLAQYTSKTCSNCGFTITSADYDRVLEKLKKTATGWMTTINGKELKVEGQITYYNRYKRQNVVKDLSVELDRLSEESVNNDISSWTKGRSGEALSLLKKRFSHRPVQEKFVCLNCGFETHADEQAALNIARSWLFLRSQEYKKYQTNKTTGNTDKRAFVETWQSFYRKKLKEVWKPAV

SEQ ID NO: 304 - protein, 979 aa, synthetic construct
QEIKRINKIRRRLVKDSNTKKAGKTGPMKTLLVRVMTPDLRERLENLRKKPENIPQPISNTSRANLNKLLTDYTEMKKAILHVYWEEFQKDPVGLMSRVAQPASKKIDQNKLKPEMDEKGNLTTAGFACSQCGQPLFVYKLEQVSEKGKAYTNYFGRCNVAEHEKLILLAQLKPEKDSDEAVTYSLGKFGQRALDFYSIHVTKESTHPVKPLAQIAGNRYASGPVGKALSDACMGTIASFLSKYQDIIIEHQKVVKGNQKRLESLRELAGKENLEYPSVTLPPQPHTKEGVDAYNEVIARVRMWVNLNLWQKLKLSRDDAKPLLRLKGFPSFPLVERQANEVDQWWDMVCNVKKLINEKKEDGKVFWQNLAGYKRQEALRPYLSSEEDRKKGKKFARYQLGDLLLHLEKKHGEDWGKVYDEAWERIDKKVEGLSKHIKLEEERRSEDAQSKAALTDWLRAKASFVIEGLKEADKDEFCRCELKLQKWYGDLRGKPFAIEAENSILDISGFSKQYNCAFIWQKDGVKKLNLYLIINYFKGGKLRFKKIKPEAFEANRFYTVINKKSGEIVPMEVNFNFDDPNLIILPLAFGKRQGREFIWNDLLSLETGSLKLANGRVIEKTLYNRRTRQDEPALFVALTFERREVLDSSNIKPMNLIGVDRGENIPAVIALTDPEGCPLSRFKDSLGNPTHILRIGESYKEKQRTIQAKKEVEQRRAGGYSRKYASKAKNLADDMVRNTARDLLYYAVTQDAMLIFENLSRGFGRQGKRTFMAERQYTRMEDWLTAKLAYEGLPSKTYLSKTLAQYTSKTCSNCGFTITSADYDRVLEKLKKTATGWMTTINGKELKVEGQITYYNRYKRQNVVKDLSVELDRLSEESVNNDISSWTKGRSGEALSLLKKRFSHRPVQEKFVCLNCGFETHADEQAALNIARSWLFLRSQEYKKYQTNKTTGNTDKRAFVETWQSFYRKKLKEVWKPAV

SEQ ID NO: 305 - protein, 978 aa, synthetic construct
QEIKRINKIRRRLVKDSNTKKAGKTGPMKTLLVRVMTPDLRERLENLRKKPENIPQPISNTSRANLNKLLTDYTEMKKAILHVYWEEFQKDPVGLMSRVAQPASKKIDQNKLKPEMDEKGNLTTAGFACSQCGQPLFVYKLEQVSEKGKAYTNYFGRCNVAEHEKLILLAQLKPEKDSDEAVTYSLGKFGQRALDFYSIHVTKESTHPVKPLAQIAGNRYASGPVGKALSDACMGTIASFLSKYQDIIIEHQKVVKGNQKRLESLRELAGKENLEYPSVTLPPQPHTKEGVDAYNEVIARVRMWVNLNLWQKLKLSRDDAKPLLRLKGFPSFPLPERQANEVDWWDMVCNVKKLINEKKEDGKVFWQNLAGYKRQEALRPYLSSEEDRKKGKKFARYQLGDLLLHLEKKHGEDWGKVYDEAWERIDKKVEGLSKHIKLEEERRSEDAQSKAALTDWLRAKASFVIEGLKEADKDEFCRCELKLQKWYGDLRGKPFAIEAENSILDISGFSKQYNCAFIWQKDGVKKLNLYLIINYFKGGKLRFKKIKPEAFEANRFYTVINKKSGEIVPMEVNFNFDDPNLIILPLAFGKRQGREFIWNDLLSLETGSLKLANGRVIEKTLYNRRTRQDEPALFVALTFERREVLDSSNIKPMNLIGVDRGENIPAVIALTDPEGCPLSRFKDSLGNPTHILRIGESYKEKQRTIQAKKEVEQRRAGGYSRKYASKAKNLADDMVRNTARDLLYYAVTQDAMLIFENLSRGFGRQGKRTFMAERQYTRMEDWLTAKLAYEGLPSKTYLSKTLAQYTSKTCSNCGFTITSADYDRVLEKLKKTATGWMTTINGKELKVEGQITYYNRYKRQNVVKDLSVELDRLSEESVNNDISSWTKGRSGEALSLLKKRFSHRPVQEKFVCLNCGFETHADEQAALNIARSWLFLRSQEYKKYQTNKTTGNTDKRAFVETWQSFYRKKLKEVWKPAV

SEQ ID NO: 306 - protein, 978 aa, synthetic construct
QEIKRINKIRRRLVKDSNTKKAGKTGPMKTLLVRVMTPDLRERLENLRKKPENIPQPISNTSRANLNKLLTDYTEMKKAILHVYWEEFQKDPVGLMSRVAQPASKKIDQNKLKPEMDEKGNLTTAGFACSQCGQPLFVYKLEQVSEKGKAYTNYFGRCNVAEHEKLIDLAQLKPEKDSDEAVTYSLGKFGQRALDFYSIHVTKESTHPVKPLAQIAGNRYASGPVGKALSDACMGTIASFLSKYQDIIIEHQKVVKGNQKRLESLRELAGKENLEYPSVTLPPQPHTKEGVDAYNEVIARVRMWVNLNLWQKLKLSRDDAKPLLRLKGFPSFPLVERQANEVDWWDMVCNVKKLINEKKEDGKVFWQNLAGYKRQEALRPYLSSEEDRKKGKKFARYQLGDLLLHLEKKHGEDWGKVYDEAWERIDKKVEGLSKHIKLEEERRSEDAQSKAALTDWLRAKASFVIEGLKEADKDEFCRCELKLQKWYGDLRGKPFAIEAENSILDISGFSKQYNCAFIWQKDGVKKLNLYLIINYFKGGKLRFKKIKPEAFEANRFYTVINKKSGEIVPMEVNFNFDDPNLIILPLAFGKRQGREFIWNDLLSLETGSLKLANGRVIEKTLYNRRTRQDEPALFVALTFERREVLDSSNIKPMNLIGVDRGENIPAVIALTDPEGCPLSRFKDSLGNPTHILRIGESYKEKQRTIQAKKEVEQRRAGGYSRKYASKAKNLADDMVRNTARDLLYYAVTQDAMLIFENLSRGFGRQGKRTFMAERQYTRMEDWLTAKLAYEGLPSKTYLSKTLAQYTSKTCSNCGFTITSADYDRVLEKLKKTATGWMTTINGKELKVEGQITYYNRYKRQNVVKDLSVELDRLSEESVNNDISSWTKGRSGEALSLLKKRFSHRPVQEKFVCLNCGFETHADEQAALNIARSWLFLRSQEYKKYQTNKTTGNTDKRAFVETWQSFYRKKLKEVWKPAV

SEQ ID NO: 307 - protein, 978 aa, synthetic construct
QEIKRINKIRRRLVKDSNTKKAGKTGPMKTLLVRVMTPDLRERLENLRKKPENIPQPISNTSRANLNKLLTDYTEMKKAILHVYWEEFQKDPVGLMSRVAQPASKKIDQNKLKPEMDEKGNLTTAGFACSQCGQPLFVYKLEQVSEKGKAYTNYFGRCNVAEHEKLIELAQLKPEKDSDEAVTYSLGKFGQRALDFYSIHVTKESTHPVKPLAQIAGNRYASGPVGKALSDACMGTIASFLSKYQDIIIEHQKVVKGNQKRLESLRELAGKENLEYPSVTLPPQPHTKEGVDAYNEVIARVRMWVNLNLWQKLKLSRDDAKPLLRLKGFPSFPLVERQANEVDWWDMVCNVKKLINEKKEDGKVFWQNLAGYKRQEALRPYLSSEEDRKKGKKFARYQLGDLLLHLEKKHGEDWGKVYDEAWERIDKKVEGLSKHIKLEEERRSEDAQSKAALTDWLRAKASFVIEGLKEADKDEFCRCELKLQKWYGDLRGKPFAIEAENSILDISGFSKQYNCAFIWQKDGVKKLNLYLIINYFKGGKLRFKKIKPEAFEANRFYTVINKKSGEIVPMEVNFNFDDPNLIILPLAFGKRQGREFIWNDLLSLETGSLKLANGRVIEKTLYNRRTRQDEPALFVALTFERREVLDSSNIKPMNLIGVDRGENIPAVIALTDPEGCPLSRFKDSLGNPTHILRIGESYKEKQRTIQAKKEVEQRRAGGYSRKYASKAKNLADDMVRNTARDLLYYAVTQDAMLIFENLSRGFGRQGKRTFMAERQYTRMEDWLTAKLAYEGLPSKTYLSKTLAQYTSKTCSNCGFTITSADYDRVLEKLKKTATGWMTTINGKELKVEGQITYYNRYKRQNVVKDLSVELDRLSEESVNNDISSWTKGRSGEALSLLKKRFSHRPVQEKFVCLNCGFETHADEQAALNIARSWLFLRSQEYKKYQTNKTTGNTDKRAFVETWQSFYRKKLKEVWKPAV

SEQ ID NO: 308 - protein, 979 aa, synthetic construct
QEIKRINKIRRRLVKDSNTKKAGKTPGPMKTLLVRVMTPDLRERLENLRKKPENIPQPISNTSRANLNKLLTDYTEMKKAILHVYWEEFQKDPVGLMSRVAQPASKKIDQNKLKPEMDEKGNLTTAGFACSQCGQPLFVYKLEQVSEKGKAYTNYFGRCNVAEHEKLILLAQLKPEKDSDEAVTYSLGKFGQRALDFYSIHVTKESTHPVKPLAQIAGNRYASGPVGKALSDACMGTIASFLSKYQDIIIEHQKVVKGNQKRLESLRELAGKENLEYPSVTLPPQPHTKEGVDAYNEVIARVRMWVNLNLWQKLKLSRDDAKPLLRLKGFPSFPLVERQANEVDWWDMVCNVKKLINEKKEDGKVFWQNLAGYKRQEALRPYLSSEEDRKKGKKFARYQLGDLLLHLEKKHGEDWGKVYDEAWERIDKKVEGLSKHIKLEEERRSEDAQSKAALTDWLRAKASFVIEGLKEADKDEFCRCELKLQKWYGDLRGKPFAIEAENSILDISGFSKQYNCAFIWQKDGVKKLNLYLIINYFKGGKLRFKKIKPEAFEANRFYTVINKKSGEIVPMEVNFNFDDPNLIILPLAFGKRQGREFIWNDLLSLETGSLKLANGRVIEKTLYNRRTRQDEPALFVALTFERREVLDSSNIKPMNLIGVDRGENIPAVIALTDPEGCPLSRFKDSLGNPTHILRIGESYKEKQRTIQAKKEVEQRRAGGYSRKYASKAKNLADDMVRNTARDLLYYAVTQDAMLIFENLSRGFGRQGKRTFMAERQYTRMEDWLTAKLAYEGLPSKTYLSKTLAQYTSKTCSNCGFTITSADYDRVLEKLKKTATGWMTTINGKELKVEGQITYYNRYKRQNVVKDLSVELDRLSEESVNNDISSWTKGRSGEALSLLKKRFSHRPVQEKFVCLNCGFETHADEQAALNIARSWLFLRSQEYKKYQTNKTTGNTDKRAFVETWQSFYRKKLKEVWKPAV

SEQ ID NO: 309 - protein, 978 aa, synthetic construct
QEIKRINKIRRRLVKDSNTKKAGKTGPPKTLLVRVMTPDLRERLENLRKKPENIPQPISNTSRANLNKLLTDYTEMKKAILHVYWEEFQKDPVGLMSRVAQPASKKIDQNKLKPEMDEKGNLTTAGFACSQCGQPLFVYKLEQVSEKGKAYTNYFGRCNVAEHEKLILLAQLKPEKDSDEAVTYSLGKFGQRALDFYSIHVTKESTHPVKPLAQIAGNRYASGPVGKALSDACMGTIASFLSKYQDIIIEHQKVVKGNQKRLESLRELAGKENLEYPSVTLPPQPHTKEGVDAYNEVIARVRMWVNLNLWQKLKLSRDDAKPLLRLKGFPSFPLVERQANEVDWWDMVCNVKKLINEKKEDGKVFWQNLAGYKRQEALRPYLSSEEDRKKGKKFARYQLGDLLLHLEKKHGEDWGKVYDEAWERIDKKVEGLSKHIKLEEERRSEDAQSKAALTDWLRAKASFVIEGLKEADKDEFCRCELKLQKWYGDLRGKPFAIEAENSILDISGFSKQYNCAFIWQKDGVKKLNLYLIINYFKGGKLRFKKIKPEAFEANRFYTVINKKSGEIVPMEVNFNFDDPNLIILPLAFGKRQGREFIWNDLLSLETGSLKLANGRVIEKTLYNRRTRQDEPALFVALTFERREVLDSSNIKPMNLIGVDRGENIPAVIALTDPEGCPLSRFKDSLGNPTHILRIGESYKEKQRTIQAKKEVEQRRAGGYSRKYASKAKNLADDMVRNTARDLLYYAVTQDAMLIFENLSRGFGRQGKRTFMAERQYTRMEDWLTAKLAYEGLPSKTYLSKTLAQYTSKTCSNCGFTITSADYDRVLEKLKKTATGWMTTINGKELKVEGQITYYNRYKRQNVVKDLSVELDRLSEESVNNDISSWTKGRSGEALSLLKKRFSHRPVQEKFVCLNCGFETHADEQAALNIARSWLFLRSQEYKKYQTNKTTGNTDKRAFVETWQSFYRKKLKEVWKPAV

SEQ ID NO: 310 - protein, 977 aa, synthetic construct
QEIKRINKIRRRLVKDSNTKKAGKTGPMKTLLVRVMTPDLRERLENLRKKPENIPQPISNTSRANLNKLLTDYTEMKKAILHVYWEEFQKDPVGLMSRVAQPASKKIDQNKLKPEMDEKGNLTTAGFACQCGQPLFVYKLEQVSEKGKAYTNYFGRCNVAEHEKLILLAQLKPEKDSDEAVTYSLGKFGQRALDFYSIHVTKESTHPVKPLAQIAGNRYASGPVGKALSDACMGTIASFLSKYQDIIIEHQKVVKGNQKRLESLRELAGKENLEYPSVTLPPQPHTKEGVDAYNEVIARVRMWVNLNLWQKLKLSRDDAKPLLRLKGFPSFPLVERQANEVDWWDMVCNVKKLINEKKEDGKVFWQNLAGYKRQEALRPYLSSEEDRKKGKKFARYQLGDLLLHLEKKHGEDWGKVYDEAWERIDKKVEGLSKHIKLEEERRSEDAQSKAALTDWLRAKASFVIEGLKEADKDEFCRCELKLQKWYGDLRGKPFAIEAENSILDISGFSKQYNCAFIWQKDGVKKLNLYLIINYFKGGKLRFKKIKPEAFEANRFYTVINKKSGEIVPMEVNFNFDDPNLIILPLAFGKRQGREFIWNDLLSLETGSLKLANGRVIEKTLYNRRTRQDEPALFVALTFERREVLDSSNIKPMNLIGVDRGENIPAVIALTDPEGCPLSRFKDSLGNPTHILRIGESYKEKQRTIQAKKEVEQRRAGGYSRKYASKAKNLADDMVRNTARDLLYYAVTQDAMLIFENLSRGFGRQGKRTFMAERQYTRMEDWLTAKLAYEGLPSKTYLSKTLAQYTSKTCSNCGFTITSADYDRVLEKLKKTATGWMTTINGKELKVEGQITYYNRYKRQNVVKDLSVELDRLSEESVNNDISSWTKGRSGEALSLLKKRFSHRPVQEKFVCLNCGFETHADEQAALNIARSWLFLRSQEYKKYQTNKTTGNTDKRAFVETWQSFYRKKLKEVWKPAV

SEQ ID NO: 311 - protein, 978 aa, synthetic construct
QEIKRINKIRRRLVKDSNTKKAGKTGPMKTLLVRVMTPDLRERLENLRKKPENIPQPISNTSRANLNKLLTDYTEMKKAILHVYWEEFQKDPVGLMSRVAQPASKKIDQNKLKPEMDEKGNLTTAGFACSQCGQPLFVYKLEQVSEKGKAYTNYFGRCNVAEHEKLILLAQLKPEKDSDEAVTYSLGKFGQRALDFYSIHVTKESTHPVKPLAQIAGNRYASGPVGKALSDACMGTIASFLSKYHDIIIEHQKVVKGNQKRLESLRELAGKENLEYPSVTLPPQPHTKEGVDAYNEVIARVRMWVNLNLWQKLKLSRDDAKPLLRLKGFPSFPLVERQANEVDWWDMVCNVKKLINEKKEDGKVFWQNLAGYKRQEALRPYLSSEEDRKKGKKFARYQLGDLLLHLEKKHGEDWGKVYDEAWERIDKKVEGLSKHIKLEEERRSEDAQSKAALTDWLRAKASFVIEGLKEADKDEFCRCELKLQKWYGDLRGKPFAIEAENSILDISGFSKQYNCAFIWQKDGVKKLNLYLIINYFKGGKLRFKKIKPEAFEANRFYTVINKKSGEIVPMEVNFNFDDPNLIILPLAFGKRQGREFIWNDLLSLETGSLKLANGRVIEKTLYNRRTRQDEPALFVALTFERREVLDSSNIKPMNLIGVDRGENIPAVIALTDPEGCPLSRFKDSLGNPTHILRIGESYKEKQRTIQAKKEVEQRRAGGYSRKYASKAKNLADDMVRNTARDLLYYAVTQDAMLIFENLSRGFGRQGKRTFMAERQYTRMEDWLTAKLAYEGLPSKTYLSKTLAQYTSKTCSNCGFTITSADYDRVLEKLKKTATGWMTTINGKELKVEGQITYYNRYKRQNVVKDLSVELDRLSEESVNNDISSWTKGRSGEALSLLKKRFSHRPVQEKFVCLNCGFETHADEQAALNIARSWLFLRSQEYKKYQTNKTTGNTDKRAFVETWQSFYRKKLKEVWKPAV

SEQ ID NO: 312 - protein, 978 aa, synthetic construct
QEIKRINKIRRRLVKDSNTKKAGKTGPMKTLLVRVMTPDLRERLENLRKKPENIPQPISNTSRANLNKLLTDYTEMKKAILHVYWEEFQKDPVGLMSRVAQPASKKIDQNKLKPEMDEKGNLTTAGFACSQCGQPLFVYKLEQVSEKGKAYTNYFGRCNVAEHEKLILLAQLKPEKDSDEAVTYSLGKFGQRALDFYSIHVTKESTHPVKPLAQIAGNRYASGPVGKALSDACMGTIAHFLSKYQDIIIEHQKVVKGNQKRLESLRELAGKENLEYPSVTLPPQPHTKEGVDAYNEVIARVRMWVNLNLWQKLKLSRDDAKPLLRLKGFPSFPLVERQANEVDWWDMVCNVKKLINEKKEDGKVFWQNLAGYKRQEALRPYLSSEEDRKKGKKFARYQLGDLLLHLEKKHGEDWGKVYDEAWERIDKKVEGLSKHIKLEEERRSEDAQSKAALTDWLRAKASFVIEGLKEADKDEFCRCELKLQKWYGDLRGKPFAIEAENSILDISGFSKQYNCAFIWQKDGVKKLNLYLIINYFKGGKLRFKKIKPEAFEANRFYTVINKKSGEIVPMEVNFNFDDPNLIILPLAFGKRQGREFIWNDLLSLETGSLKLANGRVIEKTLYNRRTRQDEPALFVALTFERREVLDSSNIKPMNLIGVDRGENIPAVIALTDPEGCPLSRFKDSLGNPTHILRIGESYKEKQRTIQAKKEVEQRRAGGYSRKYASKAKNLADDMVRNTARDLLYYAVTQDAMLIFENLSRGFGRQGKRTFMAERQYTRMEDWLTAKLAYEGLPSKTYLSKTLAQYTSKTCSNCGFTITSADYDRVLEKLKKTATGWMTTINGKELKVEGQITYYNRYKRQNVVKDLSVELDRLSEESVNNDISSWTKGRSGEALSLLKKRFSHRPVQEKFVCLNCGFETHADEQAALNIARSWLFLRSQEYKKYQTNKTTGNTDKRAFVETWQSFYRKKLKEVWKPAV

SEQ ID NO: 313 - protein, 978 aa, synthetic construct
QEIKRINKIRRRLVKDSNTKKAGKTGPMKTLLVRVMTPDLRERLENLRKKPENIPQPISNTSRANLNKLLTDYTEMKKAILHVYWEEFQKDPVGLMSRVAQPASKKIDQNKLKPEMDEKGNLTTAGFACSQCGQPLFVYKLEQVSEKGKAYTNYFGRCNVAEHEKLILLAQLKPEKDSDEAVTYSLGKFGQRALDFYSIHVTKESTHPVKPLAQIAGNRYASGPVGKALSDACMGTIATFLSKYQDIIIEHQKVVKGNQKRLESLRELAGKENLEYPSVTLPPQPHTKEGVDAYNEVIARVRMWVNLNLWQKLKLSRDDAKPLLRLKGFPSFPLVERQANEVDWWDMVCNVKKLINEKKEDGKVFWQNLAGYKRQEALRPYLSSEEDRKKGKKFARYQLGDLLLHLEKKHGEDWGKVYDEAWERIDKKVEGLSKHIKLEEERRSEDAQSKAALTDWLRAKASFVIEGLKEADKDEFCRCELKLQKWYGDLRGKPFAIEAENSILDISGFSKQYNCAFIWQKDGVKKLNLYLIINYFKGGKLRFKKIKPEAFEANRFYTVINKKSGEIVPMEVNFNFDDPNLIILPLAFGKRQGREFIWNDLLSLETGSLKLANGRVIEKTLYNRRTRQDEPALFVALTFERREVLDSSNIKPMNLIGVDRGENIPAVIALTDPEGCPLSRFKDSLGNPTHILRIGESYKEKQRTIQAKKEVEQRRAGGYSRKYASKAKNLADDMVRNTARDLLYYAVTQDAMLIFENLSRGFGRQGKRTFMAERQYTRMEDWLTAKLAYEGLPSKTYLSKTLAQYTSKTCSNCGFTITSADYDRVLEKLKKTATGWMTTINGKELKVEGQITYYNRYKRQNVVKDLSVELDRLSEESVNNDISSWTKGRSGEALSLLKKRFSHRPVQEKFVCLNCGFETHADEQAALNIARSWLFLRSQEYKKYQTNKTTGNTDKRAFVETWQSFYRKKLKEVWKPAV

SEQ ID NO: 314 - protein, 978 aa, synthetic construct
QEIKRINKIRRRLVKDSNTKKAGKTGPMKTLLVRVMTPDLRERLENLRKKPENIPQPISNTSRANLNKLLTDYTEMKKAILHVYWEEFQKDPVGLMSRVAQPASKKIDQNKLKPEMDEKGNLTTAGFACSQCGQPLFVYKLEQVSEKGKAYTNYFGRCNVAEHEKLILLAQLKPEKDSDEAVTYSLGKFGQRALDFYSIHVTKESTHPVKPLAQIAGNRYASGPVGKALSDACMGTIASFLSKYQDIIIEHQKVVKGNQKRLESLRELAGKENLEYPSVTLPPQPHTDEGVDAYNEVIARVRMWVNLNLWQKLKLSRDDAKPLLRLKGFPSFPLVERQANEVDWWDMVCNVKKLINEKKEDGKVFWQNLAGYKRQEALRPYLSSEEDRKKGKKFARYQLGDLLLHLEKKHGEDWGKVYDEAWERIDKKVEGLSKHIKLEEERRSEDAQSKAALTDWLRAKASFVIEGLKEADKDEFCRCELKLQKWYGDLRGKPFAIEAENSILDISGFSKQYNCAFIWQKDGVKKLNLYLIINYFKGGKLRFKKIKPEAFEANRFYTVINKKSGEIVPMEVNFNFDDPNLIILPLAFGKRQGREFIWNDLLSLETGSLKLANGRVIEKTLYNRRTRQDEPALFVALTFERREVLDSSNIKPMNLIGVDRGENIPAVIALTDPEGCPLSRFKDSLGNPTHILRIGESYKEKQRTIQAKKEVEQRRAGGYSRKYASKAKNLADDMVRNTARDLLYYAVTQDAMLIFENLSRGFGRQGKRTFMAERQYTRMEDWLTAKLAYEGLPSKTYLSKTLAQYTSKTCSNCGFTITSADYDRVLEKLKKTATGWMTTINGKELKVEGQITYYNRYKRQNVVKDLSVELDRLSEESVNNDISSWTKGRSGEALSLLKKRFSHRPVQEKFVCLNCGFETHADEQAALNIARSWLFLRSQEYKKYQTNKTTGNTDKRAFVETWQSFYRKKLKEVWKPAV

SEQ ID NO: 315 - protein, 978 aa, synthetic construct
QEIKRINKIRRRLVKDSNTKKAGKTGPMKTLLVRVMTPDLRERLENLRKKPENIPQPISNTSRANLNKLLTDYTEMKKAILHVYWEEFQKDPVGLMSRVAQPASKKIDQNKLKPEMDEKGNLTTAGFACSQCGQPLFVYKLEQVSEKGKAYTNYFGRCNVAEHEKLILLAQLKPEKDSDEAVTYSLGKFGQRALDFYSIHVTKESTHPVKPLAQIAGNRYASGPVGKALSDACMGTIASFLSKYQDIIIEHQKVVKGNQKRLESLRELAGKENLEYPSVTLPPQPHTEEGVDAYNEVIARVRMWVNLNLWQKLKLSRDDAKPLLRLKGFPSFPLVERQANEVDWWDMVCNVKKLINEKKEDGKVFWQNLAGYKRQEALRPYLSSEEDRKKGKKFARYQLGDLLLHLEKKHGEDWGKVYDEAWERIDKKVEGLSKHIKLEEERRSEDAQSKAALTDWLRAKASFVIEGLKEADKDEFCRCELKLQKWYGDLRGKPFAIEAENSILDISGFSKQYNCAFIWQKDGVKKLNLYLIINYFKGGKLRFKKIKPEAFEANRFYTVINKKSGEIVPMEVNFNFDDPNLIILPLAFGKRQGREFIWNDLLSLETGSLKLANGRVIEKTLYNRRTRQDEPALFVALTFERREVLDSSNIKPMNLIGVDRGENIPAVIALTDPEGCPLSRFKDSLGNPTHILRIGESYKEKQRTIQAKKEVEQRRAGGYSRKYASKAKNLADDMVRNTARDLLYYAVTQDAMLIFENLSRGFGRQGKRTFMAERQYTRMEDWLTAKLAYEGLPSKTYLSKTLAQYTSKTCSNCGFTITSADYDRVLEKLKKTATGWMTTINGKELKVEGQITYYNRYKRQNVVKDLSVELDRLSEESVNNDISSWTKGRSGEALSLLKKRFSHRPVQEKFVCLNCGFETHADEQAALNIARSWLFLRSQEYKKYQTNKTTGNTDKRAFVETWQSFYRKKLKEVWKPAV

SEQ ID NO: 316 - protein, 978 aa, synthetic construct
QEIKRINKIRRRLVKDSNTKKAGKTGPMKTLLVRVMTPDLRERLENLRKKPENIPQPISNTSRANLNKLLTDYTEMKKAILHVYWEEFQKDPVGLMSRVAQPASKKIDQNKLKPEMDEKGNLTTAGFACSQCGQPLFVYKLEQVSEKGKAYTNYFGRCNVAEHEKLILLAQLKPEKDSDEAVTYSLGKFGQRALDFYSIHVTKESTHPVKPLAQIAGNRYASGPVGKALSDACMGTIASFLSKYQDIIIEHQKVVKGNQKRLESLRELAGKENLEYPSVTLPPQPHTKEGVDAYNEVIARVRMWVNLNLWQKLKLSRDDAKPLLRLKRFPSFPLVERQANEVDWWDMVCNVKKLINEKKEDGKVFWQNLAGYKRQEALRPYLSSEEDRKKGKKFARYQLGDLLLHLEKKHGEDWGKVYDEAWERIDKKVEGLSKHIKLEEERRSEDAQSKAALTDWLRAKASFVIEGLKEADKDEFCRCELKLQKWYGDLRGKPFAIEAENSILDISGFSKQYNCAFIWQKDGVKKLNLYLIINYFKGGKLRFKKIKPEAFEANRFYTVINKKSGEIVPMEVNFNFDDPNLIILPLAFGKRQGREFIWNDLLSLETGSLKLANGRVIEKTLYNRRTRQDEPALFVALTFERREVLDSSNIKPMNLIGVDRGENIPAVIALTDPEGCPLSRFKDSLGNPTHILRIGESYKEKQRTIQAKKEVEQRRAGGYSRKYASKAKNLADDMVRNTARDLLYYAVTQDAMLIFENLSRGFGRQGKRTFMAERQYTRMEDWLTAKLAYEGLPSKTYLSKTLAQYTSKTCSNCGFTITSADYDRVLEKLKKTATGWMTTINGKELKVEGQITYYNRYKRQNVVKDLSVELDRLSEESVNNDISSWTKGRSGEALSLLKKRFSHRPVQEKFVCLNCGFETHADEQAALNIARSWLFLRSQEYKKYQTNKTTGNTDKRAFVETWQSFYRKKLKEVWKPAV

SEQ ID NO: 317 - protein, 978 aa, synthetic construct
QEIKRINKIRRRLVKDSNTKKAGKTGPMKTLLVRVMTPDLRERLENLRKKPENIPQPISNTSRANLNKLLTDYTEMKKAILHVYWEEFQKDPVGLMSRVAQPASKKIDQNKLKPEMDEKGNLTTAGFACSQCGQPLFVYKLEQVSEKGKAYTNYFGRCNVAEHEKLILLAQLKPEKDSDEAVTYSLGKFGQRALDFYSIHVTKESTHPVKPLAQIAGNRYASGPVGKALSDACMGTIASFLSKYQDIIIEHQKVVKGNQKRLESLRELAGKENLEYPSVTLPPQPHTKEGVDAYNEVIARVRMWVNKNLWQKLKLSRDDAKPLLRLKGFPSFPLVERQANEVDWWDMVCNVKKLINEKKEDGKVFWQNLAGYKRQEALRPYLSSEEDRKKGKKFARYQLGDLLLHLEKKHGEDWGKVYDEAWERIDKKVEGLSKHIKLEEERRSEDAQSKAALTDWLRAKASFVIEGLKEADKDEFCRCELKLQKWYGDLRGKPFAIEAENSILDISGFSKQYNCAFIWQKDGVKKLNLYLIINYFKGGKLRFKKIKPEAFEANRFYTVINKKSGEIVPMEVNFNFDDPNLIILPLAFGKRQGREFIWNDLLSLETGSLKLANGRVIEKTLYNRRTRQDEPALFVALTFERREVLDSSNIKPMNLIGVDRGENIPAVIALTDPEGCPLSRFKDSLGNPTHILRIGESYKEKQRTIQAKKEVEQRRAGGYSRKYASKAKNLADDMVRNTARDLLYYAVTQDAMLIFENLSRGFGRQGKRTFMAERQYTRMEDWLTAKLAYEGLPSKTYLSKTLAQYTSKTCSNCGFTITSADYDRVLEKLKKTATGWMTTINGKELKVEGQITYYNRYKRQNVVKDLSVELDRLSEESVNNDISSWTKGRSGEALSLLKKRFSHRPVQEKFVCLNCGFETHADEQAALNIARSWLFLRSQEYKKYQTNKTTGNTDKRAFVETWQSFYRKKLKEVWKPAV

SEQ ID NO: 318 - protein, 978 aa, synthetic construct
QEIKRINKIRRRLVKDSNTKKAGKTGPMKTLLVRVMTPDLRERLENLRKKPENIPQPISNTSRANLNKLLTDYTEMKKAILHVYWEEFQKDPVGLMSRVAQPASKKIDQNKLKPEMDEKGNLTTAGFACSQCGQPLFVYKLEQVSEKGKAYTNYFGRCNVAEHEKLILLAQLKPEKDSDEAVTYSLGKFGQRALDFYSIHVTKESTHPVKPLAQIAGNRYASGPVGKALSDACMGTIASFLSKYQDIIIEHQKVVKGNQKRLESLRELAGKENLEYPSVTLPPQPHTKEGVDAYNEVIARVRRWVNLNLWQKLKLSRDDAKPLLRLKGFPSFPLVERQANEVDWWDMVCNVKKLINEKKEDGKVFWQNLAGYKRQEALRPYLSSEEDRKKGKKFARYQLGDLLLHLEKKHGEDWGKVYDEAWERIDKKVEGLSKHIKLEEERRSEDAQSKAALTDWLRAKASFVIEGLKEADKDEFCRCELKLQKWYGDLRGKPFAIEAENSILDISGFSKQYNCAFIWQKDGVKKLNLYLIINYFKGGKLRFKKIKPEAFEANRFYTVINKKSGEIVPMEVNFNFDDPNLIILPLAFGKRQGREFIWNDLLSLETGSLKLANGRVIEKTLYNRRTRQDEPALFVALTFERREVLDSSNIKPMNLIGVDRGENIPAVIALTDPEGCPLSRFKDSLGNPTHILRIGESYKEKQRTIQAKKEVEQRRAGGYSRKYASKAKNLADDMVRNTARDLLYYAVTQDAMLIFENLSRGFGRQGKRTFMAERQYTRMEDWLTAKLAYEGLPSKTYLSKTLAQYTSKTCSNCGFTITSADYDRVLEKLKKTATGWMTTINGKELKVEGQITYYNRYKRQNVVKDLSVELDRLSEESVNNDISSWTKGRSGEALSLLKKRFSHRPVQEKFVCLNCGFETHADEQAALNIARSWLFLRSQEYKKYQTNKTTGNTDKRAFVETWQSFYRKKLKEVWKPAV

SEQ ID NO: 319 - protein, 978 aa, synthetic construct
QEIKRINKIRRRLVKDSNTKKAGKTGPMKTLLVRVMTPDLRERLENLRKKPENIPQPISNTSRANLNKLLTDYTEMKKAILHVYWEEFQKDPVGLMSRVAQPASKKIDQNKLKPEMDEKGNLTTAGFACSQCGQPLFVYKLEQVSEKGKAYTNYFGRCNVAEHEKLILLAQLKPEKDSDEAVTYSLGKFGQRALDFYSIHVTKESTHPVKPLAQIAGNRYASGPVGKALSDACMGTIASFLSKYQDIIIEHQKVVKGNQKRLESLRELAGKENLEYPSVTLPPQPHTKEGVDAYNEVIARVRKWVNLNLWQKLKLSRDDAKPLLRLKGFPSFPLVERQANEVDWWDMVCNVKKLINEKKEDGKVFWQNLAGYKRQEALRPYLSSEEDRKKGKKFARYQLGDLLLHLEKKHGEDWGKVYDEAWERIDKKVEGLSKHIKLEEERRSEDAQSKAALTDWLRAKASFVIEGLKEADKDEFCRCELKLQKWYGDLRGKPFAIEAENSILDISGFSKQYNCAFIWQKDGVKKLNLYLIINYFKGGKLRFKKIKPEAFEANRFYTVINKKSGEIVPMEVNFNFDDPNLIILPLAFGKRQGREFIWNDLLSLETGSLKLANGRVIEKTLYNRRTRQDEPALFVALTFERREVLDSSNIKPMNLIGVDRGENIPAVIALTDPEGCPLSRFKDSLGNPTHILRIGESYKEKQRTIQAKKEVEQRRAGGYSRKYASKAKNLADDMVRNTARDLLYYAVTQDAMLIFENLSRGFGRQGKRTFMAERQYTRMEDWLTAKLAYEGLPSKTYLSKTLAQYTSKTCSNCGFTITSADYDRVLEKLKKTATGWMTTINGKELKVEGQITYYNRYKRQNVVKDLSVELDRLSEESVNNDISSWTKGRSGEALSLLKKRFSHRPVQEKFVCLNCGFETHADEQAALNIARSWLFLRSQEYKKYQTNKTTGNTDKRAFVETWQSFYRKKLKEVWKPAV

SEQ ID NO: 320 - protein, 978 aa, synthetic construct
QEIKRINKIRRRLVKDSNTKKAGKTGPMKTLLVRVMTPDLRERLENLRKKPENIPQPISNTSRANLNKLLTDYTEMKKAILHVYWEEFQKDPVGLMSRVAQPASKKIDQNKLKPEMDEKGNLTTAGFACSQCGQPLFVYKLEQVSEKGKAYTNYFGRCNVAEHEKLILLAQLKPEKDSDEAVTYSLGKFGQRALDFYSIHVTKESTHPVKPLAQIAGNRYASGPVGKALSDACMGTIASFLSKYQDIIIEHQKVVKGNQKRLESLRELAGKENLEYPSVTLPPQPHTKEGVDAYNEVIARVRMWVNLNLWQKLKLSRDDAKPLLRLKGFPSFPLVERQANEVDWWDMVCNVKKLINEKKEDGKVFWQNLAGYKRQEALRPYLSSEEDRKKGKKFARYQLGDLLLHLEKKHGEDWGKVYDEAWERIDKKVEGLSKHIKLEEERRSEDAQSKAALTDWLRAKASFVIEGLKEADKDEFRRCELKLQKWYGDLRGKPFAIEAENSILDISGFSKQYNCAFIWQKDGVKKLNLYLIINYFKGGKLRFKKIKPEAFEANRFYTVINKKSGEIVPMEVNFNFDDPNLIILPLAFGKRQGREFIWNDLLSLETGSLKLANGRVIEKTLYNRRTRQDEPALFVALTFERREVLDSSNIKPMNLIGVDRGENIPAVIALTDPEGCPLSRFKDSLGNPTHILRIGESYKEKQRTIQAKKEVEQRRAGGYSRKYASKAKNLADDMVRNTARDLLYYAVTQDAMLIFENLSRGFGRQGKRTFMAERQYTRMEDWLTAKLAYEGLPSKTYLSKTLAQYTSKTCSNCGFTITSADYDRVLEKLKKTATGWMTTINGKELKVEGQITYYNRYKRQNVVKDLSVELDRLSEESVNNDISSWTKGRSGEALSLLKKRFSHRPVQEKFVCLNCGFETHADEQAALNIARSWLFLRSQEYKKYQTNKTTGNTDKRAFVETWQSFYRKKLKEVWKPAV

SEQ ID NO: 321 - protein, 978 aa, synthetic construct
QEIKRINKIRRRLVKDSNTKKAGKTGPMKTLLVRVMTPDLRERLENLRKKPENIPQPISNTSRANLNKLLTDYTEMKKAILHVYWEEFQKDPVGLMSRVAQPASKKIDQNKLKPEMDEKGNLTTAGFACSQCGQPLFVYKLEQVSEKGKAYTNYFGRCNVAEHEKLILLAQLKPEKDSDEAVTYSLGKFGQRALDFYSIHVTKESTHPVKPLAQIAGNRYASGPVGKALSDACMGTIASFLSKYQDIIIEHQKVVKGNQKRLESLRELAGKENLEYPSVTLPPQPHTKEGVDAYNEVIARVRMWVNLNLWQKLKLSRDDAKPLLRLKGFPSFPLVERQANEVDWWDMVCNVKKLINEKKEDGKVFWQNLAGYKRQEALRPYLSSEEDRKKGKKFARYQLGDLLLHLEKKHGEDWGKVYDEAWERIDKKVEGLSKHIKLEEERRSEDAQSKAALTDWLRAKASFVIEGLKEADKDEFKRCELKLQKWYGDLRGKPFAIEAENSILDISGFSKQYNCAFIWQKDGVKKLNLYLIINYFKGGKLRFKKIKPEAFEANRFYTVINKKSGEIVPMEVNFNFDDPNLIILPLAFGKRQGREFIWNDLLSLETGSLKLANGRVIEKTLYNRRTRQDEPALFVALTFERREVLDSSNIKPMNLIGVDRGENIPAVIALTDPEGCPLSRFKDSLGNPTHILRIGESYKEKQRTIQAKKEVEQRRAGGYSRKYASKAKNLADDMVRNTARDLLYYAVTQDAMLIFENLSRGFGRQGKRTFMAERQYTRMEDWLTAKLAYEGLPSKTYLSKTLAQYTSKTCSNCGFTITSADYDRVLEKLKKTATGWMTTINGKELKVEGQITYYNRYKRQNVVKDLSVELDRLSEESVNNDISSWTKGRSGEALSLLKKRFSHRPVQEKFVCLNCGFETHADEQAALNIARSWLFLRSQEYKKYQTNKTTGNTDKRAFVETWQSFYRKKLKEVWKPAV

SEQ ID NO: 322 - protein, 978 aa, synthetic construct
QEIKRINKIRRRLVKDSNTKKAGKTGPMKTLLVRVMTPDLRERLENLRKKPENIPQPISNTSRANLNKLLTDYTEMKKAILHVYWEEFQKDPVGLMSRVAQPASKKIDQNKLKPEMDEKGNLTTAGFACSQCGQPLFVYKLEQVSEKGKAYTNYFGRCNVAEHEKLILLAQLKPEKDSDEAVTYSLGKFGQRALDFYSIHVTKESTHPVKPLAQIAGNRYASGPVGKALSDACMGTIASFLSKYQDIIIEHQKVVKGNQKRLESLRELAGKENLEYPSVTLPPQPHTKEGVDAYNEVIARVRMWVNLNLWQKLKLSRDDAKPLLRLKGFPSFPLVERQANEVDWWDMVCNVKKLINEKKEDGKVFWQNLAGYKRQEALRPYLSSEEDRKKGKKFARYQLGDLLLHLEKKHGEDWGKVYDEAWERIDKKVEGLSKHIKLEEERRSEDAQSKAALTDWLRAKASFVIEGLKEADKDEFCRCELKLQKWYGDLRGKPFAIEAENSILDISGFSKQYNCAFIWQKDGVKKLNLYLIINYFKGGKLRFKKIKPEAFEANRFYTVINKKSGEIVPMEVNFNFDDPNLIILPLAFGKRQGREFIWNDLLSLETGSLKLANGRVIEKTLYNRRTRQDEPALFVALTFERREVLDSSNIKPMNLIGVDRGENIPAVIALTDPEGCPLSRFKDSLGNPTHILRIGERYKEKQRTIQAKKEVEQRRAGGYSRKYASKAKNLADDMVRNTARDLLYYAVTQDAMLIFENLSRGFGRQGKRTFMAERQYTRMEDWLTAKLAYEGLPSKTYLSKTLAQYTSKTCSNCGFTITSADYDRVLEKLKKTATGWMTTINGKELKVEGQITYYNRYKRQNVVKDLSVELDRLSEESVNNDISSWTKGRSGEALSLLKKRFSHRPVQEKFVCLNCGFETHADEQAALNIARSWLFLRSQEYKKYQTNKTTGNTDKRAFVETWQSFYRKKLKEVWKPAV

SEQ ID NO: 323 - protein, 978 aa, synthetic construct
QEIKRINKIRRRLVKDSNTKKAGKTGPMKTLLVRVMTPDLRERLENLRKKPENIPQPISNTSRANLNKLLTDYTEMKKAILHVYWEEFQKDPVGLMSRVAQPASKKIDQNKLKPEMDEKGNLTTAGFACSQCGQPLFVYKLEQVSEKGKAYTNYFGRCNVAEHEKLILLAQLKPEKDSDEAVTYSLGKFGQRALDFYSIHVTKESTHPVKPLAQIAGNRYASGPVGKALSDACMGTIASFLSKYQDIIIEHQKVVKGNQKRLESLRELAGKENLEYPSVTLPPQPHTKEGVDAYNEVIARVRMWVNLNLWQKLKLSRDDAKPLLRLKGFPSFPLVERQANEVDWWDMVCNVKKLINEKKEDGKVFWQNLAGYKRQEALRPYLSSEEDRKKGKKFARYQLGDLLLHLEKKHGEDWGKVYDEAWERIDKKVEGLSKHIKLEEERRSEDAQSKAALTDWLRAKASFVIEGLKEADKDEFCRCELKLQKWYGDLRGKPFAIEAENSILDISGFSKQYNCAFIWQKDGVKKLNLYLIINYFKGGKLRFKKIKPEAFEANRFYTVINKKSGEIVPMEVNFNFDDPNLIILPLAFGKRQGREFIWNDLLSLETGSLKLANGRVIEKTLYNRRTRQDEPALFVALTFERREVLDSSNIKPMNLIGVDRGENIPAVIALTDPEGCPLSRFKDSLGNPTHILRIGEKYKEKQRTIQAKKEVEQRRAGGYSRKYASKAKNLADDMVRNTARDLLYYAVTQDAMLIFENLSRGFGRQGKRTFMAERQYTRMEDWLTAKLAYEGLPSKTYLSKTLAQYTSKTCSNCGFTITSADYDRVLEKLKKTATGWMTTINGKELKVEGQITYYNRYKRQNVVKDLSVELDRLSEESVNNDISSWTKGRSGEALSLLKKRFSHRPVQEKFVCLNCGFETHADEQAALNIARSWLFLRSQEYKKYQTNKTTGNTDKRAFVETWQSFYRKKLKEVWKPAV

SEQ ID NO: 324 - protein, 977 aa, synthetic construct
QEIKRINKIRRRLVKDSNTKKAGKTGPMKTLLVRVMTPDLRERLENLRKKPENIPQPISNTSRANLNKLLTDYTEMKKAILHVYWEEFQKDPVGLMSRVAQPASKKIDQNKLKPEMDEKGNLTTAGFACSQCGQPLFVYKLEQVSEKGKAYTNYFGRCNVAEHEKLILLAQLKPEKDSDEAVTYSLGKFGQRALDFYSIHVTKESTHPVKPLAQIAGNRYASGPVGKALSDACMGTIASFLSKYQDIIIEHQKVVKGNQKRLESLRELAGKENLEYPSVTLPPQPHTKEGVDAYNEVIARVRMWVNLNLWQKLKLSRDDAKPLLRLKGFPSFPLVERQANEVDWWDMVCNVKKLINEKKEDGKVFWQNLAGYKRQEALRPYLSSEEDRKKGKKFARYQLGDLLLHLEKKHGEDWGKVYDEAWERIDKKVEGLSKHIKLEEERRSEDAQSKAALTDWLRAKASFVIEGLKEADKDEFCRCELKLQKWYGDLRGKPFAIEAENILDISGFSKQYNCAFIWQKDGVKKLNLYLIINYFKGGKLRFKKIKPEAFEANRFYTVINKKSGEIVPMEVNFNFDDPNLIILPLAFGKRQGREFIWNDLLSLETGSLKLANGRVIEKTLYNRRTRQDEPALFVALTFERREVLDSSNIKPMNLIGVDRGENIPAVIALTDPEGCPLSRFKDSLGNPTHILRIGESYKEKQRTIQAKKEVEQRRAGGYSRKYASKAKNLADDMVRNTARDLLYYAVTQDAMLIFENLSRGFGRQGKRTFMAERQYTRMEDWLTAKLAYEGLPSKTYLSKTLAQYTSKTCSNCGFTITSADYDRVLEKLKKTATGWMTTINGKELKVEGQITYYNRYKRQNVVKDLSVELDRLSEESVNNDISSWTKGRSGEALSLLKKRFSHRPVQEKFVCLNCGFETHADEQAALNIARSWLFLRSQEYKKYQTNKTTGNTDKRAFVETWQSFYRKKLKEVWKPAV

SEQ ID NO: 325 - protein, 977 aa, synthetic construct
QEIKRINKIRRRLVKDSNTKKAGKTGPMKTLLVRVMTPDLRERLENLRKKPENIPQPISNTSRANLNKLLTDYTEMKKAILHVYWEEFQKDPVGLMSRVAQPASKKIDQNKLKPEMDEKGNLTTAGFACSQCGQPLFVYKLEQVSEKGKAYTNYFGRCNVAEHEKLILLAQLKPEKDSDEAVTYSLGKFGQRALDFYSIHVTKESTHPVKPLAQIAGNRYASGPVGKALSDACMGTIASFLSKYQDIIIEHQKVVKGNQKRLESLRELAGKENLEYPSVTLPPQPHTKEGVDAYNEVIARVRMWVNLNLWQKLKLSRDDAKPLLRLKGFPSFPLVERQANEVDWWDMVCNVKKLINEKKEDGKVFWQNLAGYKRQEALRPYLSSEEDRKKGKKFARYQLGDLLLHLEKKHGEDWGKVYDEAWERIDKKVEGLSKHIKLEEERRSEDAQSKAALTDWLRAKASFVIEGLKEADKDEFCRCELKLQKWYGDLRGKPFAIEAENSIDISGFSKQYNCAFIWQKDGVKKLNLYLIINYFKGGKLRFKKIKPEAFEANRFYTVINKKSGEIVPMEVNFNFDDPNLIILPLAFGKRQGREFIWNDLLSLETGSLKLANGRVIEKTLYNRRTRQDEPALFVALTFERREVLDSSNIKPMNLIGVDRGENIPAVIALTDPEGCPLSRFKDSLGNPTHILRIGESYKEKQRTIQAKKEVEQRRAGGYSRKYASKAKNLADDMVRNTARDLLYYAVTQDAMLIFENLSRGFGRQGKRTFMAERQYTRMEDWLTAKLAYEGLPSKTYLSKTLAQYTSKTCSNCGFTITSADYDRVLEKLKKTATGWMTTINGKELKVEGQITYYNRYKRQNVVKDLSVELDRLSEESVNNDISSWTKGRSGEALSLLKKRFSHRPVQEKFVCLNCGFETHADEQAALNIARSWLFLRSQEYKKYQTNKTTGNTDKRAFVETWQSFYRKKLKEVWKPAV

SEQ ID NO: 326 - protein, 978 aa, synthetic construct
QEIKRINKIRRRLVKDSNTKKAGKTGPMKTLLVRVMTPDLRERLENLRKKPENIPQPISNTSRANLNKLLTDYTEMKKAILHVYWEEFQKDPVGLMSRVAQPASKKIDQNKLKPEMDEKGNLTTAGFACSQCGQPLFVYKLEQVSEKGKAYTNYFGRCNVAEHEKLILLAQLKPEKDSDEAVTYSLGKFGQRALDFYSIHVTKESTHPVKPLAQIAGNRYASGPVGKALSDACMGTIASFLSKYQDIIIEHQKVVKGNQKRLESLRELAGKENLEYPSVTLPPQPHTKEGVDAYNEVIARVRMWVNLNLWQKLKLSRDDAKPLLRLKGFPSFPLVERQANEVDWWDMVCNVKKLINEKKEDGKVFWQNLAGYKRQEALRPYLSSEEDRKKGKKFARYQLGDLLLHLEKKHGEDWGKVYDEAWERIDKKVEGLSKHIKLEEERRSEDAQSKAALTDWLRAKASFVIEGLKEADKDEFCRCELKLQKWYGDLRGKPFAIEAENSRLDISGFSKQYNCAFIWQKDGVKKLNLYLIINYFKGGKLRFKKIKPEAFEANRFYTVINKKSGEIVPMEVNFNFDDPNLIILPLAFGKRQGREFIWNDLLSLETGSLKLANGRVIEKTLYNRRTRQDEPALFVALTFERREVLDSSNIKPMNLIGVDRGENIPAVIALTDPEGCPLSRFKDSLGNPTHILRIGESYKEKQRTIQAKKEVEQRRAGGYSRKYASKAKNLADDMVRNTARDLLYYAVTQDAMLIFENLSRGFGRQGKRTFMAERQYTRMEDWLTAKLAYEGLPSKTYLSKTLAQYTSKTCSNCGFTITSADYDRVLEKLKKTATGWMTTINGKELKVEGQITYYNRYKRQNVVKDLSVELDRLSEESVNNDISSWTKGRSGEALSLLKKRFSHRPVQEKFVCLNCGFETHADEQAALNIARSWLFLRSQEYKKYQTNKTTGNTDKRAFVETWQSFYRKKLKEVWKPAV

SEQ ID NO: 327 - protein, 978 aa, synthetic construct
QEIKRINKIRRRLVKDSNTKKAGKTGPMKTLLVRVMTPDLRERLENLRKKPENIPQPISNTSRANLNKLLTDYTEMKKAILHVYWEEFQKDPVGLMSRVAQPASKKIDQNKLKPEMDEKGNLTTAGFACSQCGQPLFVYKLEQVSEKGKAYTNYFGRCNVAEHEKLILLAQLKPEKDSDEAVTYSLGKFGQRALDFYSIHVTKESTHPVKPLAQIAGNRYASGPVGKALSDACMGTIASFLSKYQDIIIEHQKVVKGNQKRLESLRELAGKENLEYPSVTLPPQPHTKEGVDAYNEVIARVRMWVNLNLWQKLKLSRDDAKPLLRLKGFPSFPLVERQANEVDWWDMVCNVKKLINEKKEDGKVFWQNLAGYKRQEALRPYLSSEEDRKKGKKFARYQLGDLLLHLEKKHGEDWGKVYDEAWERIDKKVEGLSKHIKLEEERRSEDAQSKAALTDWLRAKASFVIEGLKEADKDEFCRCELKLQKWYGDLRGKPFAIEAENSKLDISGFSKQYNCAFIWQKDGVKKLNLYLIINYFKGGKLRFKKIKPEAFEANRFYTVINKKSGEIVPMEVNFNFDDPNLIILPLAFGKRQGREFIWNDLLSLETGSLKLANGRVIEKTLYNRRTRQDEPALFVALTFERREVLDSSNIKPMNLIGVDRGENIPAVIALTDPEGCPLSRFKDSLGNPTHILRIGESYKEKQRTIQAKKEVEQRRAGGYSRKYASKAKNLADDMVRNTARDLLYYAVTQDAMLIFENLSRGFGRQGKRTFMAERQYTRMEDWLTAKLAYEGLPSKTYLSKTLAQYTSKTCSNCGFTITSADYDRVLEKLKKTATGWMTTINGKELKVEGQITYYNRYKRQNVVKDLSVELDRLSEESVNNDISSWTKGRSGEALSLLKKRFSHRPVQEKFVCLNCGFETHADEQAALNIARSWLFLRSQEYKKYQTNKTTGNTDKRAFVETWQSFYRKKLKEVWKPAV

SEQ ID NO: 328 - protein, 978 aa, synthetic construct
QEIKRINKIRRRLVKDSNTKKAGKTGPMKTLLVRVMTPDLRERLENLRKKPENIPQPISNTSRANLNKLLTDYTEMKKAILHVYWEEFQKDPVGLMSRVAQPASKKIDQNKLKPEMDEKGNLTTAGFACSQCGQPLFVYKLEQVSEKGKAYTNYFGRCNVAEHEKLILLAQLKPEKDSDEAVTYSLGKFGQRALDFYSIHVTKESTHPVKPLAQIAGNRYASGPVGKALSDACMGTIASFLSKYQDIIIEHQKVVKGNQKRLESLRELAGKENLEYPSVTLPPQPHTKEGVDAYNEVIARVRMWVNLNLWQKLKLSRDDAKPLLRLKGFPSFPLVERQANEVDWWDMVCNVKKLINEKKEDGKVFWQNLAGYKRQEALRPYLSSEEDRKKGKKFARYQLGDLLLHLEKKHGEDWGKVYDEAWERIDKKVEGLSKHIKLEEERRSEDAQSKAALTDWLRAKASFVIEGLKEADKDEFCRCELKLQKWYGDLRGKPFAIEAENSILDISGFSKQYNCAFIWQKDGVKKLNLYLIINYFKGGKLRFKKIKPEAFEANRFYTVINKKSGEIVPMEVNFNFDDPNLIILPLAFGKRQGREFIWNDLLSLETGSLQLANGRVIEKTLYNRRTRQDEPALFVALTFERREVLDSSNIKPMNLIGVDRGENIPAVIALTDPEGCPLSRFKDSLGNPTHILRIGESYKEKQRTIQAKKEVEQRRAGGYSRKYASKAKNLADDMVRNTARDLLYYAVTQDAMLIFENLSRGFGRQGKRTFMAERQYTRMEDWLTAKLAYEGLPSKTYLSKTLAQYTSKTCSNCGFTITSADYDRVLEKLKKTATGWMTTINGKELKVEGQITYYNRYKRQNVVKDLSVELDRLSEESVNNDISSWTKGRSGEALSLLKKRFSHRPVQEKFVCLNCGFETHADEQAALNIARSWLFLRSQEYKKYQTNKTTGNTDKRAFVETWQSFYRKKLKEVWKPAV

SEQ ID NO: 329 - protein, 978 aa, synthetic construct
QEIKRINKIRRRLVKDSNTKKAGKTGPMKTLLVRVMTPDLRERLENLRKKPENIPQPISNTSRANLNKLLTDYTEMKKAILHVYWEEFQKDPVGLMSRVAQPASKKIDQNKLKPEMDEKGNLTTAGFACSQCGQPLFVYKLEQVSEKGKAYTNYFGRCNVAEHEKLILLAQLKPEKDSDEAVTYSLGKFGQRALDFYSIHVTKESTHPVKPLAQIAGNRYASGPVGKALSDACMGTIASFLSKYQDIIIEHQKVVKGNQKRLESLRELAGKENLEYPSVTLPPQPHTKEGVDAYNEVIARVRMWVNLNLWQKLKLSRDDAKPLLRLKGFPSFPLVERQANEVDWWDMVCNVKKLINEKKEDGKVFWQNLAGYKRQEALRPYLSSEEDRKKGKKFARYQLGDLLLHLEKKHGEDWGKVYDEAWERIDKKVEGLSKHIKLEEERRSEDAQSKAALTDWLRAKASFVIEGLKEADKDEFCRCELKLQKWYGDLRGKPFAIEAENSILDISGFSKQYNCAFIWQKDGVKKLNLYLIINYFKGGKLRFKKIKPEAFEANRFYTVINKKSGEIVPMEVNFNFDDPNLIILPLAFGKRQGREFIWNDLLSLETGSLKLANGQVIEKTLYNRRTRQDEPALFVALTFERREVLDSSNIKPMNLIGVDRGENIPAVIALTDPEGCPLSRFKDSLGNPTHILRIGESYKEKQRTIQAKKEVEQRRAGGYSRKYASKAKNLADDMVRNTARDLLYYAVTQDAMLIFENLSRGFGRQGKRTFMAERQYTRMEDWLTAKLAYEGLPSKTYLSKTLAQYTSKTCSNCGFTITSADYDRVLEKLKKTATGWMTTINGKELKVEGQITYYNRYKRQNVVKDLSVELDRLSEESVNNDISSWTKGRSGEALSLLKKRFSHRPVQEKFVCLNCGFETHADEQAALNIARSWLFLRSQEYKKYQTNKTTGNTDKRAFVETWQSFYRKKLKEVWKPAV

SEQ ID NO: 330 - protein, 978 aa, synthetic construct
QEIKRINKIRRRLVKDSNTKKAGKTGPMKTLLVRVMTPDLRERLENLRKKPENIPQPISNTSRANLNKLLTDYTEMKKAILHVYWEEFQKDPVGLMSRVAQPASKKIDQNKLKPEMDEKGNLTTAGFACSQCGQPLFVYKLEQVSEKGKATTNYFGRCNVAEHEKLILLAQLKPEKDSDEAVTYSLGKFGQRALDFYSIHVTKESTHPVKPLAQIAGNRYASGPVGKALSDACMGTIASFLSKYQDIIIEHQKVVKGNQKRLESLRELAGKENLEYPSVTLPPQPHTKEGVDAYNEVIARVRMWVNLNLWQKLKLSRDDAKPLLRLKGFPSFPLVERQANEVDWWDMVCNVKKLINEKKEDGKVFWQNLAGYKRQEALRPYLSSEEDRKKGKKFARYQLGDLLLHLEKKHGEDWGKVYDEAWERIDKKVEGLSKHIKLEEERRSEDAQSKAALTDWLRAKASFVIEGLKEADKDEFCRCELKLQKWYGDLRGKPFAIEAENSILDISGFSKQYNCAFIWQKDGVKKLNLYLIINYFKGGKLRFKKIKPEAFEANRFYTVINKKSGEIVPMEVNFNFDDPNLIILPLAFGKRQGREFIWNDLLSLETGSLKLANGRVIEKTLYNRRTRQDEPALFVALTFERREVLDSSNIKPMNLIGVDRGENIPAVIALTDPEGCPLSRFKDSLGNPTHILRIGESYKEKQRTIQAKKEVEQRRAGGYSRKYASKAKNLADDMVRNTARDLLYYAVTQDAMLIFENLSRGFGRQGKRTFMAERQYTRMEDWLTAKLAYEGLPSKTYLSKTLAQYTSKTCSNCGFTITSADYDRVLEKLKKTATGWMTTINGKELKVEGQITYYNRYKRQNVVKDLSVELDRLSEESVNNDISSWTKGRSGEALSLLKKRFSHRPVQEKFVCLNCGFETHADEQAALNIARSWLFLRSQEYKKYQTNKTTGNTDKRAFVETWQSFYRKKLKEVWKPAV

SEQ ID NO: 331 - protein, 978 aa, synthetic construct
QEIKRINKIRRRLVKDSNTKKAGKTGPMKTLLVRVMTPDLRERLENLRKKPENIPQPISNTSRANLNKLLTDYTEMKKAILHVYWEEFQKDPVGLMSRVAQPASKKIDQNKLKPEMDEKGNLTTAGFACSQCGQPLFVYKLEQVSEKGKAYTNYFGRCNVAEHEKLILLAQLKPEKDSDEAVTYSLGQFGQRALDFYSIHVTKESTHPVKPLAQIAGNRYASGPVGKALSDACMGTIASFLSKYQDIIIEHQKVVKGNQKRLESLRELAGKENLEYPSVTLPPQPHTKEGVDAYNEVIARVRMWVNLNLWQKLKLSRDDAKPLLRLKGFPSFPLVERQANEVDWWDMVCNVKKLINEKKEDGKVFWQNLAGYKRQEALRPYLSSEEDRKKGKKFARYQLGDLLLHLEKKHGEDWGKVYDEAWERIDKKVEGLSKHIKLEEERRSEDAQSKAALTDWLRAKASFVIEGLKEADKDEFCRCELKLQKWYGDLRGKPFAIEAENSILDISGFSKQYNCAFIWQKDGVKKLNLYLIINYFKGGKLRFKKIKPEAFEANRFYTVINKKSGEIVPMEVNFNFDDPNLIILPLAFGKRQGREFIWNDLLSLETGSLKLANGRVIEKTLYNRRTRQDEPALFVALTFERREVLDSSNIKPMNLIGVDRGENIPAVIALTDPEGCPLSRFKDSLGNPTHILRIGESYKEKQRTIQAKKEVEQRRAGGYSRKYASKAKNLADDMVRNTARDLLYYAVTQDAMLIFENLSRGFGRQGKRTFMAERQYTRMEDWLTAKLAYEGLPSKTYLSKTLAQYTSKTCSNCGFTITSADYDRVLEKLKKTATGWMTTINGKELKVEGQITYYNRYKRQNVVKDLSVELDRLSEESVNNDISSWTKGRSGEALSLLKKRFSHRPVQEKFVCLNCGFETHADEQAALNIARSWLFLRSQEYKKYQTNKTTGNTDKRAFVETWQSFYRKKLKEVWKPAV

SEQ ID NO: 332 - protein, 978 aa, synthetic construct
QEIKRINKIRRRLVKDSNTKKAGKTGPMKTLLVRVMTPDLRERLENLRKKPENIPQPISNTSRANLNKLLTDYTEMKKAILHVYWEEFQKDPVGLMSRVAQPASKKIDQNKLKPEMDEKGNLTTAGFACSQCGQPLFVYKLEQVSEKGKAYTNYFGRCNVAEHEKLILLAQLKPEKDSDEAVTYSLGKFQQRALDFYSIHVTKESTHPVKPLAQIAGNRYASGPVGKALSDACMGTIASFLSKYQDIIIEHQKVVKGNQKRLESLRELAGKENLEYPSVTLPPQPHTKEGVDAYNEVIARVRMWVNLNLWQKLKLSRDDAKPLLRLKGFPSFPLVERQANEVDWWDMVCNVKKLINEKKEDGKVFWQNLAGYKRQEALRPYLSSEEDRKKGKKFARYQLGDLLLHLEKKHGEDWGKVYDEAWERIDKKVEGLSKHIKLEEERRSEDAQSKAALTDWLRAKASFVIEGLKEADKDEFCRCELKLQKWYGDLRGKPFAIEAENSILDISGFSKQYNCAFIWQKDGVKKLNLYLIINYFKGGKLRFKKIKPEAFEANRFYTVINKKSGEIVPMEVNFNFDDPNLIILPLAFGKRQGREFIWNDLLSLETGSLKLANGRVIEKTLYNRRTRQDEPALFVALTFERREVLDSSNIKPMNLIGVDRGENIPAVIALTDPEGCPLSRFKDSLGNPTHILRIGESYKEKQRTIQAKKEVEQRRAGGYSRKYASKAKNLADDMVRNTARDLLYYAVTQDAMLIFENLSRGFGRQGKRTFMAERQYTRMEDWLTAKLAYEGLPSKTYLSKTLAQYTSKTCSNCGFTITSADYDRVLEKLKKTATGWMTTINGKELKVEGQITYYNRYKRQNVVKDLSVELDRLSEESVNNDISSWTKGRSGEALSLLKKRFSHRPVQEKFVCLNCGFETHADEQAALNIARSWLFLRSQEYKKYQTNKTTGNTDKRAFVETWQSFYRKKLKEVWKPAV

SEQ ID NO: 333 - protein, 978 aa, synthetic construct
QEIKPINKIRRRLVKDSNTKKAGKTGPMKTLLVRVMTPDLRERLENLRKKPENIPQPISNTSRANLNKLLTDYTEMKKAILHVYWEEFQKDPVGLMSRVAQPASKKIDQNKLKPEMDEKGNLTTAGFACSQCGQPLFVYKLEQVSEKGKAYTNYFGRCNVAEHEKLILLAQLKPEKDSDEAVTYSLGKFGQRALDFYSIHVTKESTHPVKPLAQIAGNRYASGPVGKALSDACMGTIASFLSKYQDIIIEHQKVVKGNQKRLESLRELAGKENLEYPSVTLPPQPHTKEGVDAYNEVIARVRMWVNLNLWQKLKLSRDDAKPLLRLKGFPSFPLVERQANEVDWWDMVCNVKKLINEKKEDGKVFWQNLAGYKRQEALRPYLSSEEDRKKGKKFARYQLGDLLLHLEKKHGEDWGKVYDEAWERIDKKVEGLSKHIKLEEERRSEDAQSKAALTDWLRAKASFVIEGLKEADKDEFCRCELKLQKWYGDLRGKPFAIEAENSILDISGFSKQYNCAFIWQKDGVKKLNLYLIINYFKGGKLRFKKIKPEAFEANRFYTVINKKSGEIVPMEVNFNFDDPNLIILPLAFGKRQGREFIWNDLLSLETGSLKLANGRVIEKTLYNRRTRQDEPALFVALTFERREVLDSSNIKPMNLIGVDRGENIPAVIALTDPEGCPLSRFKDSLGNPTHILRIGESYKEKQRTIQAKKEVEQRRAGGYSRKYASKAKNLADDMVRNTARDLLYYAVTQDAMLIFENLSRGFGRQGKRTFMAERQYTRMEDWLTAKLAYEGLPSKTYLSKTLAQYTSKTCSNCGFTITSADYDRVLEKLKKTATGWMTTINGKELKVEGQITYYNRYKRQNVVKDLSVELDRLSEESVNNDISSWTKGRSGEALSLLKKRFSHRPVQEKFVCLNCGFETHADEQAALNIARSWLFLRSQEYKKYQTNKTTGNTDKRAFVETWQSFYRKKLKEVWKPAV

SEQ ID NO: 334 - protein, 978 aa, synthetic construct
QEIWRINKIRRRLVKDSNTKKAGKTGPMKTLLVRVMTPDLRERLENLRKKPENIPQPISNTSRANLNKLLTDYTEMKKAILHVYWEEFQKDPVGLMSRVAQPASKKIDQNKLKPEMDEKGNLTTAGFACSQCGQPLFVYKLEQVSEKGKAYTNYFGRCNVAEHEKLILLAQLKPEKDSDEAVTYSLGKFGQRALDFYSIHVTKESTHPVKPLAQIAGNRYASGPVGKALSDACMGTIASFLSKYQDIIIEHQKVVKGNQKRLESLRELAGKENLEYPSVTLPPQPHTKEGVDAYNEVIARVRMWVNLNLWQKLKLSRDDAKPLLRLKGFPSFPLVERQANEVDWWDMVCNVKKLINEKKEDGKVFWQNLAGYKRQEALRPYLSSEEDRKKGKKFARYQLGDLLLHLEKKHGEDWGKVYDEAWERIDKKVEGLSKHIKLEEERRSEDAQSKAALTDWLRAKASFVIEGLKEADKDEFCRCELKLQKWYGDLRGKPFAIEAENSILDISGFSKQYNCAFIWQKDGVKKLNLYLIINYFKGGKLRFKKIKPEAFEANRFYTVINKKSGEIVPMEVNFNFDDPNLIILPLAFGKRQGREFIWNDLLSLETGSLKLANGRVIEKTLYNRRTRQDEPALFVALTFERREVLDSSNIKPMNLIGVDRGENIPAVIALTDPEGCPLSRFKDSLGNPTHILRIGESYKEKQRTIQAKKEVEQRRAGGYSRKYASKAKNLADDMVRNTARDLLYYAVTQDAMLIFENLSRGFGRQGKRTFMAERQYTRMEDWLTAKLAYEGLPSKTYLSKTLAQYTSKTCSNCGFTITSADYDRVLEKLKKTATGWMTTINGKELKVEGQITYYNRYKRQNVVKDLSVELDRLSEESVNNDISSWTKGRSGEALSLLKKRFSHRPVQEKFVCLNCGFETHADEQAALNIARSWLFLRSQEYKKYQTNKTTGNTDKRAFVETWQSFYRKKLKEVWKPAV

SEQ ID NO: 335 - protein, 979 aa, synthetic construct
QEIKRINKIRRRLVKDSNTKKAGKTGPMKTLLVRVMTPDLRERLENLRKKPENIPQPISNTSRANLNKLLTDYTEMKKAILHVYWEEFQKDPVGLMSRVAQPASKKIDQNKLKPEMDEKGNLTTAGFACSQCGQPLFVYKLEQVSEKGKAYTNYFGRCNVAEHEKLILLAQLKPEKDSDEAVTYSLGKFGQRALDFYSIHVTKESTHPVKPLAQIAGNRYASGPVGKALSDACMGTIASFLSKYQDIIIEHQKVVKGNQKRLESLRELAGKENLEYPSVTLPPQPHTKEGVDAYNEVIARVRMWVNLNLWQKLKLSRDDAKPLLRLKGFPSFPLVERQANEVDWWDMVCNVKKLINEKKEDGKVFWQNLAGYKRQEALRPYLSSEEDRKKGKKFARYQLGDLLLHLEKKHGEDWGKVYDEAWERIDKKVEGLSKHIKLEEERRSEDAQSKAALTDWLRAKASFVIEGLKEADKDEFCRCELKLQKWYGDLRGKPFAIEAENSILDISGFSKQYNCAFIWQKDGVKKLNLYLIINYFKGGKLRFKKIKPEAFEANRFYTVINKKSGEIVPMEVNFNFDDPNLIILPLAFGKRQGREFIWNDLLSLETGSLKLANGRVIEKTLYNRRTRQDEPALFVALTFERAREVLDSSNIKPMNLIGVDRGENIPAVIALTDPEGCPLSRFKDSLGNPTHILRIGESYKEKQRTIQAKKEVEQRRAGGYSRKYASKAKNLADDMVRNTARDLLYYAVTQDAMLIFENLSRGFGRQGKRTFMAERQYTRMEDWLTAKLAYEGLPSKTYLSKTLAQYTSKTCSNCGFTITSADYDRVLEKLKKTATGWMTTINGKELKVEGQITYYNRYKRQNVVKDLSVELDRLSEESVNNDISSWTKGRSGEALSLLKKRFSHRPVQEKFVCLNCGFETHADEQAALNIARSWLFLRSQEYKKYQTNKTTGNTDKRAFVETWQSFYRKKLKEVWKPAV

SEQ ID NO: 336 - protein, 978 aa, synthetic construct
QEIKRINKIRRRLVKDSNTKKAGKTGPMKTLLVRVMTPDLRERLENLRKKPENIPQPISNTSRANLNKLLTDYTEMKKAILHVYWEEFQKDPVGLMSRVAQPASKKIDQNKLKPEMDEKGNLTTAGFACSQCGQPLFVYKLEQVSEKGKAYTNYFGRCNVAEHEKLILLAQLKPEKDSDEAVTYSLGKFGQRALDFYSIHVTKESTHPVKPLAQIAGNRYASGPVGKALSDACMLTIASFLSKYQDIIIEHQKVVKGNQKRLESLRELAGKENLEYPSVTLPPQPHTKEGVDAYNEVIARVRMWVNLNLWQKLKLSRDDAKPLLRLKGFPSFPLVERQANEVDWWDMVCNVKKLINEKKEDGKVFWQNLAGYKRQEALRPYLSSEEDRKKGKKFARYQLGDLLLHLEKKHGEDWGKVYDEAWERIDKKVEGLSKHIKLEEERRSEDAQSKAALTDWLRAKASFVIEGLKEADKDEFCRCELKLQKWYGDLRGKPFAIEAENSILDISGFSKQYNCAFIWQKDGVKKLNLYLIINYFKGGKLRFKKIKPEAFEANRFYTVINKKSGEIVPMEVNFNFDDPNLIILPLAFGKRQGREFIWNDLLSLETGSLKLANGRVIEKTLYNRRTRQDEPALFVALTFERREVLDSSNIKPMNLIGVDRGENIPAVIALTDPEGCPLSRFKDSLGNPTHILRIGESYKEKQRTIQAKKEVEQRRAGGYSRKYASKAKNLADDMVRNTARDLLYYAVTQDAMLIFENLSRGFGRQGKRTFMAERQYTRMEDWLTAKLAYEGLPSKTYLSKTLAQYTSKTCSNCGFTITSADYDRVLEKLKKTATGWMTTINGKELKVEGQITYYNRYKRQNVVKDLSVELDRLSEESVNNDISSWTKGRSGEALSLLKKRFSHRPVQEKFVCLNCGFETHADEQAALNIARSWLFLRSQEYKKYQTNKTTGNTDKRAFVETWQSFYRKKLKEVWKPAV

SEQ ID NO: 337 - protein, 978 aa, synthetic construct
QEIKRINKIRRRLVKDSNTKKAGKTGPMKTLLVRVMTPDLRERLENLRKKPENIPQPISNTSRANLNKLLTDYTEMKKAILHVYWEEFQKDPVGLMSRVAQPASKKIDQNKLKPEMDEKGNLTTAGFACSQCGQPLFVYKLEQVSEKGKAYTNYFGRCNVAEHEKLILLAQLKPEKDSDEAVTYSLGKFGQRALDFYSIHVTKESTHPVKPLAQIAGNRYASGPVGKALSDACMHTIASFLSKYQDIIIEHQKVVKGNQKRLESLRELAGKENLEYPSVTLPPQPHTKEGVDAYNEVIARVRMWVNLNLWQKLKLSRDDAKPLLRLKGFPSFPLVERQANEVDWWDMVCNVKKLINEKKEDGKVFWQNLAGYKRQEALRPYLSSEEDRKKGKKFARYQLGDLLLHLEKKHGEDWGKVYDEAWERIDKKVEGLSKHIKLEEERRSEDAQSKAALTDWLRAKASFVIEGLKEADKDEFCRCELKLQKWYGDLRGKPFAIEAENSILDISGFSKQYNCAFIWQKDGVKKLNLYLIINYFKGGKLRFKKIKPEAFEANRFYTVINKKSGEIVPMEVNFNFDDPNLIILPLAFGKRQGREFIWNDLLSLETGSLKLANGRVIEKTLYNRRTRQDEPALFVALTFERREVLDSSNIKPMNLIGVDRGENIPAVIALTDPEGCPLSRFKDSLGNPTHILRIGESYKEKQRTIQAKKEVEQRRAGGYSRKYASKAKNLADDMVRNTARDLLYYAVTQDAMLIFENLSRGFGRQGKRTFMAERQYTRMEDWLTAKLAYEGLPSKTYLSKTLAQYTSKTCSNCGFTITSADYDRVLEKLKKTATGWMTTINGKELKVEGQITYYNRYKRQNVVKDLSVELDRLSEESVNNDISSWTKGRSGEALSLLKKRFSHRPVQEKFVCLNCGFETHADEQAALNIARSWLFLRSQEYKKYQTNKTTGNTDKRAFVETWQSFYRKKLKEVWKPAV

SEQ ID NO: 338 - protein, 978 aa, synthetic construct
QEIKRINKIRRRLVKDSNTKKAGKTGPMKTLLVRVMTPDLRERLENLRKKPENIPQPISNTSRANLNKLLTDYTEMKKAILHVYWEEFQKDPVGLMSRVAQPASKKIDQNKLKPEMDEKGNLTTAGFACSQCGQPLFVYKLEQVSEKGKAYTNYFGRCNVAEHEKLILLAQLKPEKDSDEAVTYSLGKFGQRALDFYSIHVTKESTHPVKPLAQIAGNRYASGPVGKALSDACMGTIASFLSKYQDIIIEHQKVVKGNQKRLESLRELAGKENLEYPSVTLPPQPHTKEGVDAYNEVIARVRMWVNLNLWQKLKLSRDDAKPLLRLKGFPSFPLVERQANEVDWWDMVCNVKKLINEKKEDGKVFWQNLAGYKRQEALRPYLSSEEDRKKGKKFARYQLGDLLLHLEKKHGEDWGKVYDEAWERIDKKVEGLSKHIKLEEERRSEDAQSKAALTDWLRAKASFVIEGLKEADKDEFCRCELKLQKWYGDLRGKPFAIEAENSILDISGFSKQYNCAFIWQKDGVKKLNLYLIINYFKGGKLRFKKIKPEAFEANRFYTVINKKSGEIVPMEVNFNFDDPNLIILPLAFGKRQGREFIWNDLLSLETGSLKLANGRVIEKTLYNRRTRQDEPALFVALTFERREVLDSSNIKPMNLIGVDRGENIPAVIALTDPEGCPLSRFKDSLGNPTHILRIGESYKEKQRTIQAKKEVEQRRAGGYSRKYASKAKNLADDMVRNTARDLLYYAVTQDAMLIFENLSRGFGRQGKRTFMAERQYTRMEDWLTAKLAYEGLPSKTYLSKTLAQYTSKTCSNCGFTITSADYDRVLEKLKKTATGWMTTINGKELKVEGQITYYNRYKRQNVVKDLSVELDRLSEESVNNDISSWTKGRSGEALSLLKKRFSHRPTQEKFVCLNCGFETHADEQAALNIARSWLFLRSQEYKKYQTNKTTGNTDKRAFVETWQSFYRKKLKEVWKPAV

SEQ ID NO: 339 - protein, 978 aa, synthetic construct
QEIKRINKIRRRLVKDSNTKKAGKTGPMKTLLVRVMTPDLRERLENLRKKPENIPQPISNTSRANLNKLLTDYTEMKKAILHVYWEEFQKDPVGLMSRVAQPASKKIDQNKLKPEMDEKGNLTTAGFACSQCGQPLFVYKLEQVSEKGKAYTNYFGRCNVAEHEKLILLAQLKPEKDSDEAVTYSLGKFGQRALDFYSIHVTKESTHPVKPLAQIAGNRYASGPVGKALSDACMGTIASFLSKYQDIIIEHQKVVKGNQKRLESLRELAGKENLEYPSVTLPPQPHTKEGVDAYNEVIARVRMWVNLNLWQKLKLSRDDAKPLLRLKGFPSFPLVERQANEVDWWDMVCNVKKLINEKKEDGKVFWQNLAGYKRQEALRPYLSSEEDRKKGKKFARYQLGDLLLHLEKKHGEDWGKVYDEAWERIDKKVEGLSKHIKLEEERRSEDAQSKAALTDWLRAKASFVIEGLKEADKDEFCRCELKLQKWYGDLRGKPFAIEAENSILDISGFSKQYNCAFIWQKDGVKKLNLYLIINYFKGGKLEFKKIKPEAFEANRFYTVINKKSGEIVPMEVNFNFDDPNLIILPLAFGKRQGREFIWNDLLSLETGSLKLANGRVIEKTLYNRRTRQDEPALFVALTFERREVLDSSNIKPMNLIGVDRGENIPAVIALTDPEGCPLSRFKDSLGNPTHILRIGESYKEKQRTIQAKKEVEQRRAGGYSRKYASKAKNLADDMVRNTARDLLYYAVTQDAMLIFENLSRGFGRQGKRTFMAERQYTRMEDWLTAKLAYEGLPSKTYLSKTLAQYTSKTCSNCGFTITSADYDRVLEKLKKTATGWMTTINGKELKVEGQITYYNRYKRQNVVKDLSVELDRLSEESVNNDISSWTKGRSGEALSLLKKRFSHRPVQEKFVCLNCGFETHADEQAALNIARSWLFLRSQEYKKYQTNKTTGNTDKRAFVETWQSFYRKKLKEVWKPAV

SEQ ID NO: 340 - protein, 977 aa, synthetic construct
QEIKRINKIRRRLVKDSNTKKAGKTGPMKTLLVRVMTPDLRERLENLRKKPENIPQPISNTSRANLNKLLTDYTEMKKAILHVYWEEFQKDPVGLMSRVAQPASKKIDQNKLKPEMDEKGNLTTAGFACSQCGQPLFVYKLEQVSEKGKAYTNYFGRCNVAEHEKLILLAQLKPEKDSDEAVTYSLGKFGQRALDFYSIHVTKESTHPVKPLAQIAGNRYASGPVGKALSDACMGTIASFLSKYQDIIIEHQKVVKGNQKRLESLRELAGKENLEYPSVTLPPQPHTKEGVDAYNEVIARVRMWVNLNLWQKLKLSRDDAKPLLRLKGFPSFPLVERQANEVDWWDMVCNVKKLINEKKEDGKVFWQNLAGYKRQEALRPYLSSEEDRKKGKKFARYQLGDLLLHLEKKHGEDWGKVYDEAWERIDKKVEGLSKHIKLEEERRSEDAQSKAALTDWLRAKASFVIEGLKEADKDEFCRCELKLQKWYGDLRGKPFAIEAENSILDISGFSKQYNCAFIWQKDGVKKLNLYLIINYFKGGKLRFKKIKPEAFEANRFYTVINKSGEIVPMEVNFNFDDPNLIILPLAFGKRQGREFIWNDLLSLETGSLKLANGRVIEKTLYNRRTRQDEPALFVALTFERREVLDSSNIKPMNLIGVDRGENIPAVIALTDPEGCPLSRFKDSLGNPTHILRIGESYKEKQRTIQAKKEVEQRRAGGYSRKYASKAKNLADDMVRNTARDLLYYAVTQDAMLIFENLSRGFGRQGKRTFMAERQYTRMEDWLTAKLAYEGLPSKTYLSKTLAQYTSKTCSNCGFTITSADYDRVLEKLKKTATGWMTTINGKELKVEGQITYYNRYKRQNVVKDLSVELDRLSEESVNNDISSWTKGRSGEALSLLKKRFSHRPVQEKFVCLNCGFETHADEQAALNIARSWLFLRSQEYKKYQTNKTTGNTDKRAFVETWQSFYRKKLKEVWKPAV

SEQ ID NO: 341 - protein, 979 aa, synthetic construct
QEIKRINKIRRRLVKDSNTKKAGKTGPMKTLLVRVMTPDLRERLENLRKKPENIPQPISNTSRANLNKLLTDYTEMKKAILHVYWEEFQKDPVGLMSRVAQPASKKIDQNKLKPEMDEKGNLTTAGFACSQCGQPLFVYKLEQVSEKGKAYTNYFGRCNVAEHEKLILLAQLKPEKDSDEAVTYSLGKFGQRALDFYSIHVTKESTHPVKPLAQIAGNRYASGPVGKALSDACMGTIASFLSKYQDIIIEHQKVVKGNQKRLESLRELAGKENLEYPSVTLPPQPHTKEGVDAYNEVIARVRMWVNLNLWQKLKLSRDDAKPLLRLKGFPSFPLVERQANEVDWWDMVCNVKKLINEKKEDGKVFWQNLAGYKRQEALRPYLSSEEDRKKGKKFARYQLGDLLLHLEKKHGEDWGKVYDEAWERIDKKVEGLSKHIKLEEERRSEDAQSKAALTDWLRAKASFVIEGLKEADKDEFCRCELKLQKWYGDLRGKPFAIEAENSILDISGFSKQYNCAFIWQKDGVKKLNLYLIINYFKGGKLRFKKIKPEAFEANRFYTVINKKSGEIVPMEVNFNFDDPNLIILPLAFGKRQAGREFIWNDLLSLETGSLKLANGRVIEKTLYNRRTRQDEPALFVALTFERREVLDSSNIKPMNLIGVDRGENIPAVIALTDPEGCPLSRFKDSLGNPTHILRIGESYKEKQRTIQAKKEVEQRRAGGYSRKYASKAKNLADDMVRNTARDLLYYAVTQDAMLIFENLSRGFGRQGKRTFMAERQYTRMEDWLTAKLAYEGLPSKTYLSKTLAQYTSKTCSNCGFTITSADYDRVLEKLKKTATGWMTTINGKELKVEGQITYYNRYKRQNVVKDLSVELDRLSEESVNNDISSWTKGRSGEALSLLKKRFSHRPVQEKFVCLNCGFETHADEQAALNIARSWLFLRSQEYKKYQTNKTTGNTDKRAFVETWQSFYRKKLKEVWKPAV

SEQ ID NO: 342 - protein, 979 aa, synthetic construct
QEIKRINKIRRRLVKDSNTKKAGKTGPMKTLLVRVMTPDLRERLENLRKKPENIPQPISNTSRANLNKLLTDYTEMKKAILHVYWEEFQKDPVGLMSRVAQPASKKIDQNKLKPEMDEKGNLTTAGFACSQCGQPLFVYKLEQVSEKGKAYTNYFGRCNVAEHEKLILLAQLKPEKDSDEAVTYSLGKFGQRALDFYSIHVTKESTHPVKPLAQIAGNRYASGPVGKALSDACMGTIASFLSKYQDIIIEHQKVVKGNQKRLESLRELAGKENLEYPSVTLPPQPHTKEGVDAYNEVIARVRMWVNLNLWQKLKLSRDDAKPLLRLKGFPSFPLVERQANEVDWWDMVCNVKKLINEKKEDGKVFWQNLAGYKRQEALRPYLSSEEDRKKGKKFARYQLGDLLLHLEKKHGEDWGKVYDEAWERIDKKVEGLSKHIKLEKEERRSEDAQSKAALTDWLRAKASFVIEGLKEADKDEFCRCELKLQKWYGDLRGKPFAIEAENSILDISGFSKQYNCAFIWQKDGVKKLNLYLIINYFKGGKLRFKKIKPEAFEANRFYTVINKKSGEIVPMEVNFNFDDPNLIILPLAFGKRQGREFIWNDLLSLETGSLKLANGRVIEKTLYNRRTRQDEPALFVALTFERREVLDSSNIKPMNLIGVDRGENIPAVIALTDPEGCPLSRFKDSLGNPTHILRIGESYKEKQRTIQAKKEVEQRRAGGYSRKYASKAKNLADDMVRNTARDLLYYAVTQDAMLIFENLSRGFGRQGKRTFMAERQYTRMEDWLTAKLAYEGLPSKTYLSKTLAQYTSKTCSNCGFTITSADYDRVLEKLKKTATGWMTTINGKELKVEGQITYYNRYKRQNVVKDLSVELDRLSEESVNNDISSWTKGRSGEALSLLKKRFSHRPVQEKFVCLNCGFETHADEQAALNIARSWLFLRSQEYKKYQTNKTTGNTDKRAFVETWQSFYRKKLKEVWKPAV

SEQ ID NO: 343 - protein, 54 aa, synthetic construct
EKRINKIRKKLSADNATKPVSRSGPMKTLLVRVMTDDLKKRLEKRRKKPEVMPQ

SEQ ID NO: 344 - protein, 44 aa, synthetic construct
VISNNAANNLRMLLDDYTKMKEAILQVYWQEFKDDHVGLMCKFA

SEQ ID NO: 345 - protein, 91 aa, synthetic construct
QPASKKIDQNKLKPEMDEKGNLTTAGFACSQCGQPLFVYKLEQVSEKGKAYTNYFGRCNVAEHEKLILLAQLKPEKDSDEAVTYSLGKFGQ

SEQ ID NO: 346 - protein, 141 aa, synthetic construct
RALDFYSIHVTKESTHPVKPLAQIAGNRYASGPVGKALSDACMGTIASFLSKYQDIIIEHQKVVKGNQKRLESLRELAGKENLEYPSVTLPPQPHTKEGVDAYNEVIARVRMWVNLNLWQKLKLSRDDAKPLLRLKGFPSF

SEQ ID NO: 347 - protein, 177 aa, synthetic construct
PVVERRENEVDWWNTINEVKKLIDAKRDMGRVFWSGVTAEKRNTILEGYNYLPNENDHKKREGSLENPKKPAKRQFGDLLLYLEKKYAGDWGKVFDEAWERIDKKIAGLTSHIEREEARNAEDAQSKAVLTDWLRAKASFVLERLKEMDEKEFYACEIQLQKWYGDLRGNPFAVEAE

SEQ ID NO: 348 - protein, 151 aa, synthetic construct
NRVVDISGFSIGSDGHSIQYRNLLAWKYLENGKREFYLLMNYGKKGRIRFTDGTDIKKSGKWQGLLYGGGKAKVIDLTFDPDDEQLIILPLAFGTRQGREFIWNDLLSLETGLIKLANGRVIEKTIYNKKIGRDEPALFVALTFERREVVD

SEQ ID NO: 349 - protein, 164 aa, synthetic construct
PSNIKPVNLIGVDRGENIPAVIALTDPEGCPLPEFKDSSGGPTDILRIGEGYKEKQRAIQAAKEVEQRRAGGYSRKFASKSRNLADDMVRNSARDLFYHAVTHDAVLVFENLSRGFGRQGKRTFMTERQYTKMEDWLTAKLAYEGLTSKTYLSKTLAQYTSKTC

SEQ ID NO: 350 - protein, 110 aa, synthetic construct
SNCGFTITTADYDGMLVRLKKTSDGWATTLNNKELKAEGQITYYNRYKRQTVEKELSAELDRLSEESGNNDISKWTKGRRDEALFLLKKRFSHRPVQEQFVCLDCGHEVH

SEQ ID NO: 351 - protein, 53 aa, synthetic construct
ADEQAALNIARSWLFLNSNSTEFKSYKSGKQPFVGAWQAFYKRRLKEVWKPNA

SEQ ID NO: 352 - protein, 56 aa, synthetic construct
QEIKRINKIRRRLVKDSNTKKAGKTGPMKTLLVRVMTPDLRERLENLRKKPENIPQ

SEQ ID NO: 353 - protein, 44 aa, synthetic construct
PISNTSRANLNKLLTDYTEMKKAILHVYWEEFQKDPVGLMSRVA

SEQ ID NO: 354 - protein, 90 aa, synthetic construct
QPAPKNIDQRKLIPVKDGNERLTSSGFACSQCCQPLYVYKLEQVNDKGKPHTNYFGRCNVSEHERLILLSPHKPEANDELVTYSLGKFGQ

SEQ ID NO: 355 - protein, 141 aa, synthetic construct
RALDFYSIHVTRESNHPVKPLEQIGGNSCASGPVGKALSDACMGAVASFLTKYQDIILEHQKVIKKNEKRLANLKDIASANGLAFPKITLPPQPHTKEGIEAYNNVVAQIVIWVNLNLWQKLKIGRDEAKPLQRLKGFPSF

SEQ ID NO: 356 - protein, 168 aa, synthetic construct
PLVERQANEVDWWDMVCNVKKLINEKKEDGKVFWQNLAGYKRQEALLPYLSSEEDRKKGKKFARYQFGDLLLHLEKKHGEDWGKVYDEAWERIDKKVEGLSKHIKLEEERRSEDAQSKAALTDWLRAKASFVIEGLKEADKDEFCRCELKLQKWYGDLRGKPFAIEAE

SEQ ID NO: 357 - protein, 146 aa, synthetic construct
NSILDISGFSKQYNCAFIWQKDGVKKLNLYLIINYFKGGKLRFKKIKPEAFEANRFYTVINKKSGEIVPMEVNFNFDDPNLIILPLAFGKRQGREFIWNDLLSLETGSLKLANGRVIEKTLYNRRTRQDEPALFVALTFERREVLD

SEQ ID NO: 358 - protein, 164 aa, synthetic construct
SSNIKPMNLIGIDRGENIPAVIALTDPEGCPLSRFKDSLGNPTHILRIGESYKEKQRTIQAAKEVEQRRAGGYSRKYASKAKNLADDMVRNTARDLLYYAVTQDAMLIFENLSRGFGRQGKRTFMAERQYTRMEDWLTAKLAYEGLPSKTYLSKTLAQYTSKTC

SEQ ID NO: 359 - protein, 110 aa, synthetic construct
SNCGFTITSADYDRVLEKLKKTATGWMTTINGKELKVEGQITYYNRYKRQNVVKDLSVELDRLSEESVNNDISSWTKGRSGEALSLLKKRFSHRPVQEKFVCLNCGFETH

SEQ ID NO: 360 - protein, 58 aa, synthetic construct
ADEQAALNIARSWLFLRSQEYKKYQTNKTTGNTDKRAFVETWQSFYRKKLKEVWKPAV

SEQ ID NO: 361 - protein, 7 aa, synthetic construct
PKKKRKV

SEQ ID NO: 362 - protein, 16 aa, synthetic construct
KRPAATKKAGQAKKKK

SEQ ID NO: 363 - protein, 9 aa, synthetic construct
PAAKRVKLD

SEQ ID NO: 364 - protein, 11 aa, synthetic construct
RQRRNELKRSP

SEQ ID NO: 365 - protein, 9 aa, synthetic construct
PKKKRKVSR

SEQ ID NO: 366 - protein, 39 aa, synthetic construct
PKKKRKVGGSPKKKRKVGGSPKKKRKVGGSPKKKRKVSR

SEQ ID NO: 367 - protein, 59 aa, synthetic construct
PKKKRKVGGSPKKKRKVGGSPKKKRKVGGSPKKKRKVGGSPKKKRKVGGSPKKKRKVSR

SEQ ID NO: 368 - protein, 11 aa, synthetic construct
PAAKRVKLDSR

SEQ ID NO: 369 - protein, 23 aa, synthetic construct
PAAKRVKLDGGSPAAKRVKLDSR

SEQ ID NO: 370 - protein, 47 aa, synthetic construct
PAAKRVKLDGGSPAAKRVKLDGGSPAAKRVKLDGGSPAAKRVKLDSR

SEQ ID NO: 371 - protein, 71 aa, synthetic construct
PAAKRVKLDGGSPAAKRVKLDGGSPAAKRVKLDGGSPAAKRVKLDGGSPAAKRVKLDGGSPAAKRVKLDSR

SEQ ID NO: 372 - protein, 18 aa, synthetic construct
KRPAATKKAGQAKKKKSR

SEQ ID NO: 373 - protein, 37 aa, synthetic construct
KRPAATKKAGQAKKKKGGSKRPAATKKAGQAKKKKSR

SEQ ID NO: 374 - protein, 21 aa, synthetic construct
PAAKRVKLDGGSPKKKRKVSR

SEQ ID NO: 375 - protein, 21 aa, synthetic construct
PAAKKKKLDGGSPKKKRKVSR

SEQ ID NO: 376 - protein, 11 aa, synthetic construct
PAAKKKKLDSR

SEQ ID NO: 377 - protein, 35 aa, synthetic construct
PAAKKKKLDGGSPAAKKKKLDGGSPAAKKKKLDSR

SEQ ID NO: 378 - protein, 47 aa, synthetic construct
PAAKKKKLDGGSPAAKKKKLDGGSPAAKKKKLDGGSPAAKKKKLDSR

SEQ ID NO: 379 - protein, 13 aa, synthetic construct
PAKRARRGYKCSR

SEQ ID NO: 380 - protein, 26 aa, synthetic construct
PAKRARRGYKCGSPAKRARRGYKCSR

SEQ ID NO: 381 - protein, 9 aa, synthetic construct
PRRKREESR

SEQ ID NO: 382 - protein, 9 aa, synthetic construct
PYRGRKESR

SEQ ID NO: 383 - protein, 10 aa, synthetic construct
PLRKRPRRSR

SEQ ID NO: 384 - protein, 20 aa, synthetic construct
PLRKRPRRGSPLRKRPRRSR

SEQ ID NO: 385 - protein, 32 aa, synthetic construct
PAAKRVKLDGGKRTADGSEFESPKKKRKVGGS

SEQ ID NO: 386 - protein, 34 aa, synthetic construct
PAAKRVKLDGGKRTADGSEFESPKKKRKVPPPPG

SEQ ID NO: 387 - protein, 39 aa, synthetic construct
PAAKRVKLDGGKRTADGSEFESPKKKRKVGIHGVPAAPG

SEQ ID NO: 388 - protein, 39 aa, synthetic construct
PAAKRVKLDGGKRTADGSEFESPKKKRKVGGGSGGGSPG

SEQ ID NO: 389 - protein, 40 aa, synthetic construct
PAAKRVKLDGGKRTADGSEFESPKKKRKVPGGGSGGGSPG

SEQ ID NO: 390 - protein, 48 aa, synthetic construct
PAAKRVKLDGGKRTADGSEFESPKKKRKVAEAAAKEAAAKEAAAKAPG

SEQ ID NO: 391 - protein, 22 aa, synthetic construct
PAAKRVKLDGGSPKKKRKVGGS

SEQ ID NO: 392 - protein, 21 aa, synthetic construct
PAAKRVKLDPPPPKKKRKVPG

SEQ ID NO: 393 - protein, 11 aa, synthetic construct
PAAKRVKLDPG

SEQ ID NO: 394 - protein, 21 aa, synthetic construct
PAAKRVKLDGGGSGGGSGGGS

SEQ ID NO: 395 - protein, 12 aa, synthetic construct
PAAKRVKLDPPP

SEQ ID NO: 396 - protein, 24 aa, synthetic construct
PAAKRVKLDGGGSGGGSGGGSPPP

SEQ ID NO: 397 - protein, 10 aa, synthetic construct
PKKKRKVPPP

SEQ ID NO: 398 - protein, 10 aa, synthetic construct
PKKKRKVGGS

SEQ ID NO: 399 - protein, 39 aa, synthetic construct
GSPKKKRKVGGSPKKKRKVGGSPKKKRKVGGSPKKKRKV

SEQ ID NO: 400 - protein, 59 aa, synthetic construct
GSPKKKRKVGGSPKKKRKVGGSPKKKRKVGGSPKKKRKVGGSPKKKRKVGGSPKKKRKV

SEQ ID NO: 401 - protein, 23 aa, synthetic construct
GSPAAKRVKLDGGSPAAKRVKLD

SEQ ID NO: 402 - protein, 47 aa, synthetic construct
GSPAAKRVKLDGGSPAAKRVKLDGGSPAAKRVKLDGGSPAAKRVKLD

SEQ ID NO: 403 - protein, 18 aa, synthetic construct
GSKRPAATKKAGQAKKKK

SEQ ID NO: 404 - protein, 35 aa, synthetic construct
KRPAATKKAGQAKKKKGGSKRPAATKKAGQAKKKK

SEQ ID NO: 405 - protein, 15 aa, synthetic construct
GSKLGPRKATGRWGS

SEQ ID NO: 406 - protein, 19 aa, synthetic construct
GSKRKGSPERGERKRHWGS

SEQ ID NO: 407 - protein, 31 aa, synthetic construct
GSPKKKRKVGSGSKRPAATKKAGQAKKKKLE

SEQ ID NO: 408 - protein, 30 aa, synthetic construct
GPKRTADSQHSTPPKTKRKVEFEPKKKRKV

SEQ ID NO: 409 - protein, 36 aa, synthetic construct
GGGSGGGSKRTADSQHSTPPKTKRKVEFEPKKKRKV

SEQ ID NO: 410 - protein, 45 aa, synthetic construct
AEAAAKEAAAKEAAAKAKRTADSQHSTPPKTKRKVEFEPKKKRKV

SEQ ID NO: 411 - protein, 40 aa, synthetic construct
GPPKKKRKVGGSKRTADSQHSTPPKTKRKVEFEPKKKRKV

SEQ ID NO: 412 - protein, 28 aa, synthetic construct
GPAEAAAKEAAAKEAAAKAPAAKRVKLD

SEQ ID NO: 413 - protein, 23 aa, synthetic construct
GPGGGSGGGSGGGSPAAKRVKLD

SEQ ID NO: 414 - protein, 11 aa, synthetic construct
GPPAAKRVKLD

SEQ ID NO: 415 - protein, 19 aa, synthetic construct
VGSKRPAATKKAGQAKKKK

SEQ ID NO: 416 - protein, 44 aa, synthetic construct
TGGGPGGGAAAGSGSPKKKRKVGSGSKRPAATKKAGQAKKKKLE

SEQ ID NO: 417 - protein, 26 aa, synthetic construct
TGGGPGGGAAAGSGSPKKKRKVGSGS

SEQ ID NO: 418 - protein, 13 aa, synthetic construct
PPPPKKKRKVPPP

SEQ ID NO: 419 - protein, 13 aa, synthetic construct
GGSPKKKRKVPPP

SEQ ID NO: 420 - protein, 10 aa, synthetic construct
PPPPKKKRKV

SEQ ID NO: 421 - protein, 10 aa, synthetic construct
GGSPKKKRKV

SEQ ID NO: 422 - protein, 19 aa, synthetic construct
GGSPKKKRKVGGSGGSGGS

SEQ ID NO: 423 - protein, 20 aa, synthetic construct
GGSPKKKRKVGGSPKKKRKV

SEQ ID NO: 424 - protein, 26 aa, synthetic construct
GGSGGSGGSPKKKRKVGGSPKKKRKV

SEQ ID NO: 425 - protein, 22 aa, synthetic construct
VGGGSGGGSGGGSPAAKRVKLD

SEQ ID NO: 426 - protein, 13 aa, synthetic construct
VPPPPAAKRVKLD

SEQ ID NO: 427 - protein, 25 aa, synthetic construct
VPPPGGGSGGGSGGGSPAAKRVKLD

SEQ ID NO: 428 - protein, 12 aa, synthetic construct
VGSPAAKRVKLD

SEQ ID NO: 429 - protein, 5 aa, synthetic construct
  VARIANT 2..5: note = individual amino acid residues may be present or absent
GGGGG

SEQ ID NO: 430 - protein, 10 aa, synthetic construct
  VARIANT 3..4: note = grouped amino acid residues may be present or absent
  VARIANT 5..6: note = grouped amino acid residues may be present or absent
  VARIANT 7..8: note = grouped amino acid residues may be present or absent
  VARIANT 9..10: note = grouped amino acid residues may be present or absent
GSGSGSGSGS

SEQ ID NO: 431 - protein, 25 aa, synthetic construct
  VARIANT 6..10: note = grouped amino acid residues may be present or absent
  VARIANT 11..15: note = grouped amino acid residues may be present or absent
  VARIANT 16..20: note = grouped amino acid residues may be present or absent
  VARIANT 21..25: note = grouped amino acid residues may be present or absent
GSGGSGSGGSGSGGSGSGGSGSGGS

SEQ ID NO: 432 - protein, 30 aa, synthetic construct
  VARIANT 7..12: note = grouped amino acid residues may be present or absent
  VARIANT 13..18: note = grouped amino acid residues may be present or absent
  VARIANT 19..24: note = grouped amino acid residues may be present or absent
  VARIANT 25..30: note = grouped amino acid residues may be present or absent
GGSGGSGGSGGSGGSGGSGGSGGSGGSGGS

SEQ ID NO: 433 - protein, 20 aa, synthetic construct
  VARIANT 5..8: note = grouped amino acid residues may be present or absent
  VARIANT 9..12: note = grouped amino acid residues may be present or absent
  VARIANT 13..16: note = grouped amino acid residues may be present or absent
  VARIANT 17..20: note = grouped amino acid residues may be present or absent
GGGSGGGSGGGSGGGSGGGS

SEQ ID NO: 434 - protein, 4 aa, synthetic construct
GGSG

SEQ ID NO: 435 - protein, 5 aa, synthetic construct
GGSGG

SEQ ID NO: 436 - protein, 5 aa, synthetic construct
GSGSG

SEQ ID NO: 437 - protein, 5 aa, synthetic construct
GSGGG

SEQ ID NO: 438 - protein, 5 aa, synthetic construct
GGGSG

SEQ ID NO: 439 - protein, 5 aa, synthetic construct
GSSSG

SEQ ID NO: 440 - protein, 4 aa, synthetic construct
GPGP

SEQ ID NO: 441 - protein, 6 aa, synthetic construct
PPAPPA

SEQ ID NO: 442 - protein, 4 aa, synthetic construct
PPPG

SEQ ID NO: 443 - protein, 7 aa, synthetic construct
PPPGPPP

SEQ ID NO: 444 - protein, 23 aa, synthetic construct
  VARIANT 8..11: note = grouped amino acid residues may be present or absent
  VARIANT 12..15: note = grouped amino acid residues may be present or absent
  VARIANT 16..19: note = grouped amino acid residues may be present or absent
  VARIANT 20..23: note = grouped amino acid residues may be present or absent
PPPGGGSGGGSGGGSGGGSGGGS

SEQ ID NO: 445 - protein, 23 aa, synthetic construct
  VARIANT 1..4: note = grouped amino acid residues may be present or absent
  VARIANT 5..8: note = grouped amino acid residues may be present or absent
  VARIANT 9..12: note = grouped amino acid residues may be present or absent
  VARIANT 13..16: note = grouped amino acid residues may be present or absent
GGGSGGGSGGGSGGGSGGGSPPP

SEQ ID NO: 446 - protein, 17 aa, synthetic construct
AEAAAKEAAAKEAAAKA

SEQ ID NO: 447 - protein, 12 aa, synthetic construct
TPPKTKRKVEFE

SEQ ID NO: 448 - protein, 7 aa, synthetic construct
GGSGGGS

SEQ ID NO: 449 - protein, 7 aa, synthetic construct
GSGSGGG

SEQ ID NO: 450 - protein, 27 aa, synthetic construct
SSGNSNANSRGPSFSSGLVPLSLRGSH

SEQ ID NO: 451 - RNA, 108 nt, synthetic construct
  source 1..108: mol_type = other RNA
acatctggcgcgtttattccattactttggagccagtcccagcgactatgtcgtatggacgaagcgcttatttatcggagagaaaccgataagtaaaacgcatcaaag

SEQ ID NO: 452 - RNA, 108 nt, synthetic construct
  source 1..108: mol_type = other RNA
tactggcgcttttatctcattactttgagagccatcaccagcgactatgtcgtatgggtaaagcgcttatttatcggagagaaatccgataaataagaagcatcaaag

SEQ ID NO: 453 - RNA, 81 nt, synthetic construct
  source 1..81: mol_type = other RNA
acatctggcgcgtttattccattactttggagccagtcccagcgactatgtcgtatggacgaagcgcttatttatcggaga

SEQ ID NO: 454 - RNA, 78 nt, synthetic construct
  source 1..78: mol_type = other RNA
acatctggcgcgtttattccattactttggagccagtcccagcgactatgtcgtatggacgaagcgcttatttatcgg

SEQ ID NO: 455 - RNA, 80 nt, synthetic construct
  source 1..80: mol_type = other RNA
tactggcgcttttatctcattactttgagagccatcaccagcgactatgtcgtatgggtaaagcgcttatttatcggaga

SEQ ID NO: 456 - RNA, 77 nt, synthetic construct
  source 1..77: mol_type = other RNA
tactggcgcttttatctcattactttgagagccatcaccagcgactatgtcgtatgggtaaagcgcttatttatcgg

SEQ ID NO: 457 - RNA, 25 nt, synthetic construct
  source 1..25: mol_type = other RNA
gtttacacactccctctcatagggt

SEQ ID NO: 458 - RNA, 25 nt, synthetic construct
  source 1..25: mol_type = other RNA
gtttacacactccctctcatgaggt

SEQ ID NO: 459 - RNA, 25 nt, synthetic construct
  source 1..25: mol_type = other RNA
ttttacataccccctctcatgggat

SEQ ID NO: 460 - RNA, 25 nt, synthetic construct
  source 1..25: mol_type = other RNA
gtttacacactccctctcatggggg

SEQ ID NO: 461 - RNA, 20 nt, synthetic construct
  source 1..20: mol_type = other RNA
ccagcgactatgtcgtatgg

SEQ ID NO: 462 - RNA, 39 nt, synthetic construct
  source 1..39: mol_type = other RNA
gcgcttatttatcggagagaaatccgataaataagaagc

SEQ ID NO: 463 - RNA, 74 nt, synthetic construct
  source 1..74: mol_type = other RNA
ggcgcttttatctcattactttgagagccatcaccagcgactatgtcgtatgggtaaagcgcttatttatcgga

SEQ ID NO: 464 - RNA, 89 nt, synthetic construct
  source 1..89: mol_type = other RNA
actggcgcttttatctgattactttgagagccatcaccagcgactatgtcgtagtgggtaaagctccctcttcggagggagcatcaaag

SEQ ID NO: 465 - RNA, 99 nt, synthetic construct
  source 1..99: mol_type = other RNA
actggcgcttctatctgattactctgagcgccatcaccagcgactatgtcgtagtgggtaaagccgcttacggacttcggtccgtaagaggcatcagag

SEQ ID NO: 466 - RNA, 89 nt, synthetic construct
  source 1..89: mol_type = other RNA
actggcgcttctatctgattactctgagcgccatcaccagcgactatgtcgtagtgggtaaagctccctcttcggagggagcatcagag

SEQ ID NO: 467 - RNA, 97 nt, synthetic construct
  source 1..97: mol_type = other RNA
actggcgcctttatctcattactttgagagccatcaccagcgactatgtcgtatgggtaaagcgcttacggacttcggtccgtaagaagcatcaaag

SEQ ID NO: 468 - RNA, 89 nt, synthetic construct
  source 1..89: mol_type = other RNA
gctggcgcttttatctgattactttgagagccatcaccagcgactatgtcgtagtgggtaaagctccctcttcggagggagcatcaaag

SEQ ID NO: 469 - RNA, 88 nt, synthetic construct
  source 1..88: mol_type = other RNA
actggcgcttttatctgattactttgagagccatcaccagcgactatgtcgtatgggtaaagctccctcttcggagggagcatcaaag

SEQ ID NO: 470 - RNA, 151 nt, synthetic construct
  source 1..151: mol_type = other RNA
actggcgcttttatctgattactttgagagccatcaccagcgactatgtcgtagtgggtaaataggagctgcactatgggcgcagtgtcattgacgctgacggtacaggccagacaattattgtctggtatagtgcagctcctaatcaaag

SEQ ID NO: 471 - RNA, 97 nt, synthetic construct
  source 1..97: mol_type = other RNA
actggcgcctttatctgattactttgagagccatcaccagcgactatgtcgtatgggtaaagcgcttacggacttcggtccgtaagaagcatcaaag

SEQ ID NO: 472 - RNA, 97 nt, synthetic construct
  source 1..97: mol_type = other RNA
actggcgcttttatctgattactttgagagccatcaccagcgactatgtcgtatgggtaaagcgcttacggacttcggtccgtaagaagcatcaaag

SEQ ID NO: 473 - RNA, 98 nt, synthetic construct
  source 1..98: mol_type = other RNA
actggcgcttttatctgattactttgagagccatcaccagcgactatgtcgtagtgggtaaagcgcttacggacttcggtccgtaagaagcatcaaag

SEQ ID NO: 474 - RNA, 89 nt, synthetic construct
  source 1..89: mol_type = other RNA
actggcgcttttatctgattactttgagagccatcaccagcgactatgtcgtattgggtaaagctccctcttcggagggagcatcaaag

SEQ ID NO: 475 - RNA, 98 nt, synthetic construct
  source 1..98: mol_type = other RNA
actggcgcttttatctgattactttgagagccatcaccagcgactatgtcgtattgggtaaagcgcttacggacttcggtccgtaagaagcatcaaag

SEQ ID NO: 476 - RNA, 98 nt, synthetic construct
  source 1..98: mol_type = other RNA
actggcgcctttatcatcattactttgagagccatcaccagcgactatgtcgtatgggtaaagcgcttacggacttcggtccgtaagaagcatcaaag

SEQ ID NO: 477 - RNA, 90 nt, synthetic construct
  source 1..90: mol_type = other RNA
actggcgcttttatctgattactttgagagccatcaccagcgactatgtcgtagtgggtaaagcgccctcttcggagggaagcatcaaag

SEQ ID NO: 478 - RNA, 89 nt, synthetic construct
  source 1..89: mol_type = other RNA
actggcacttttacctgattactttgagagccaacaccagcgactatgtcgtagtgggtaaagctccctcttcggagggagcatcaaag

SEQ ID NO: 479 - RNA, 89 nt, synthetic construct
  source 1..89: mol_type = other RNA
actggcacttttatctgattactttgagagccatcaccagcgactatgtcgtagtgggtaaagctccctcttcggagggagcatcaaag

SEQ ID NO: 480 - RNA, 89 nt, synthetic construct
  source 1..89: mol_type = other RNA
actggcccttttatctgattactttgagagccatcaccagcgactatgtcgtagtgggtaaagctccctcttcggagggagcatcaaag

SEQ ID NO: 481 - RNA, 89 nt, synthetic construct
  source 1..89: mol_type = other RNA
actggcgcttttacctgattactttgagagccatcaccagcgactatgtcgtagtgggtaaagctccctcttcggagggagcatcaaag

SEQ ID NO: 482 - RNA, 89 nt, synthetic construct
  source 1..89: mol_type = other RNA
actggcgcttttatctgattactttgagagccaacaccagcgactatgtcgtagtgggtaaagctccctcttcggagggagcatcaaag

SEQ ID NO: 483 - RNA, 97 nt, synthetic construct
  source 1..97: mol_type = other RNA
actggcacctttacctgattactttgagagccaacaccagcgactatgtcgtatgggtaaagcgcttacggacttcggtccgtaagaagcatcaaag

SEQ ID NO: 484 - RNA, 97 nt, synthetic construct
  source 1..97: mol_type = other RNA
actggcacctttatctgattactttgagagccatcaccagcgactatgtcgtatgggtaaagcgcttacggacttcggtccgtaagaagcatcaaag

SEQ ID NO: 485 - RNA, 97 nt, synthetic construct
  source 1..97: mol_type = other RNA
actggcccctttatctgattactttgagagccatcaccagcgactatgtcgtatgggtaaagcgcttacggacttcggtccgtaagaagcatcaaag

SEQ ID NO: 486 - RNA, 97 nt, synthetic construct
  source 1..97: mol_type = other RNA
actggcgcctttatctgattactttgagagccaacaccagcgactatgtcgtatgggtaaagcgcttacggacttcggtccgtaagaagcatcaaag

SEQ ID NO: 487 - RNA, 90 nt, synthetic construct
  source 1..90: mol_type = other RNA
gactggcgcttttatctgattactttgagagccatcaccagcgactatgtcgtagtgggtaaagctccctcttcggagggagcatcaaag

SEQ ID NO: 488 - RNA, 90 nt, synthetic construct
  source 1..90: mol_type = other RNA
actggcgcctttatctgattactttggagagccatcaccagcgactatgtcgtagtgggtaaagctccctcttcggagggagcatcaaag

SEQ ID NO: 489 - RNA, 89 nt, synthetic construct
  source 1..89: mol_type = other RNA
actggcgcatttatctgattactttgtgagccatcaccagcgactatgtcgtagtgggtaaagctccctcttcggagggagcatcaaag

SEQ ID NO: 490 - RNA, 89 nt, synthetic construct
  source 1..89: mol_type = other RNA
actggcgcctttatctgattactttgagagccatcaccagcgactatgtcgtagtgggtaaagctccctcttcggagggagcatcaaag

SEQ ID NO: 491 - RNA, 90 nt, synthetic construct
  source 1..90: mol_type = other RNA
actggcgcttttatctgattactttggagagccatcaccagcgactatgtcgtagtgggtaaagctccctcttcggagggagcatcaaag

SEQ ID NO: 492 - RNA, 89 nt, synthetic construct
  source 1..89: mol_type = other RNA
actggcgcatttatctgattactttgagagccatcaccagcgactatgtcgtagtgggtaaagctccctcttcggagggagcatcaaag

SEQ ID NO: 493 - RNA, 89 nt, synthetic construct
  source 1..89: mol_type = other RNA
actggcgcttttatctgattactttgtgagccatcaccagcgactatgtcgtagtgggtaaagctccctcttcggagggagcatcaaag

SEQ ID NO: 494 - RNA, 90 nt, synthetic construct
  source 1..90: mol_type = other RNA
actggcgcttttattctgattactttgagagccatcaccagcgactatgtcgtagtgggtaaagctccctcttcggagggagcatcaaag

SEQ ID NO: 495 - RNA, 88 nt, synthetic construct
  source 1..88: mol_type = other RNA
acggcgcttttatctgattactttgagagccatcaccagcgactatgtcgtagtgggtaaagctccctcttcggagggagcatcaaag

SEQ ID NO: 496 - RNA, 89 nt, synthetic construct
  source 1..89: mol_type = other RNA
actggcgcttttatatgattactttgagagccatcaccagcgactatgtcgtagtgggtaaagctccctcttcggagggagcatcaaag

SEQ ID NO: 497 - RNA, 90 nt, synthetic construct
  source 1..90: mol_type = other RNA
actggcgcttttatcttgattactttgagagccatcaccagcgactatgtcgtagtgggtaaagctccctcttcggagggagcatcaaag

SEQ ID NO: 498 - RNA, 89 nt, synthetic construct
  source 1..89: mol_type = other RNA
actggcgcttttatctgattactttgagagccagcaccagcgactatgtcgtagtgggtaaagctccctcttcggagggagcatcaaag

SEQ ID NO: 499 - RNA, 89 nt, synthetic construct
  source 1..89: mol_type = other RNA
actggcgctgttatctgattacttcgagagccatcaccagcgactatgtcgtagtgggtaaagctccctcttcggagggagcatcgaag

SEQ ID NO: 500 - RNA, 89 nt, synthetic construct
  source 1..89: mol_type = other RNA
actggcgctcttatctgattacttcgagagccatcaccagcgactatgtcgtagtgggtaaagctccctcttcggagggagcatcgaag

SEQ ID NO: 501 - RNA, 89 nt, synthetic construct
  source 1..89: mol_type = other RNA
actggcgcttgtatctgattactctgagagccatcaccagcgactatgtcgtagtgggtaaagctccctcttcggagggagcatcagag

SEQ ID NO: 502 - RNA, 89 nt, synthetic construct
  source 1..89: mol_type = other RNA
actggcgcttctatctgattactctgagagccatcaccagcgactatgtcgtagtgggtaaagctccctcttcggagggagcatcagag

SEQ ID NO: 503 - RNA, 89 nt, synthetic construct
  source 1..89: mol_type = other RNA
actggcgctttgatctgattaccttgagagccatcaccagcgactatgtcgtagtgggtaaagctccctcttcggagggagcatcaagg

SEQ ID NO: 504 - RNA, 89 nt, synthetic construct
  source 1..89: mol_type = other RNA
actggcgctttcatctgattaccttgagagccatcaccagcgactatgtcgtagtgggtaaagctccctcttcggagggagcatcaagg

SEQ ID NO: 505 - RNA, 89 nt, synthetic construct
  source 1..89: mol_type = other RNA
actggcgctgttatctgattactttgagagccatcaccagcgactatgtcgtagtgggtaaagctccctcttcggagggagcatcaaag

SEQ ID NO: 506 - RNA, 89 nt, synthetic construct
  source 1..89: mol_type = other RNA
actggcgcttttatctgattactttgagagccatcaccagcgactatgtcgtagtgggtaaagctccctcttcggagggagcatcgaag

SEQ ID NO: 507 - RNA, 89 nt, synthetic construct
  source 1..89: mol_type = other RNA
actggcgcttttatctgattacttcgagagccatcaccagcgactatgtcgtagtgggtaaagctccctcttcggagggagcatcaaag

SEQ ID NO: 508 - RNA, 98 nt, synthetic construct
  source 1..98: mol_type = other RNA
actggcacttctatctgattactctgagagccatcaccagcgactatgtcgtatgggtaaagccgcttacggacttcggtccgtaagaggcatcagag

SEQ ID NO: 509 - RNA, 89 nt, synthetic construct
  source 1..89: mol_type = other RNA
actggcacttctatctgattactctgagagccatcaccagcgactatgtcgtagtgggtaaagctccctcttcggagggagcatcagag

SEQ ID NO: 510 - RNA, 98 nt, synthetic construct
  source 1..98: mol_type = other RNA
actggcacctttatctgattactttgagagccatcaccagcgactatgtcgtatgggtaaagccgcttacggacttcggtccgtaagaggcatcaaag

SEQ ID NO: 511 - RNA, 98 nt, synthetic construct
  source 1..98: mol_type = other RNA
actggcacttgtatctgattactctgagagccatcaccagcgactatgtcgtatgggtaaagccgcttacggacttcggtccgtaagaggcatcagag

SEQ ID NO: 512 - RNA, 89 nt, synthetic construct
  source 1..89: mol_type = other RNA
actggcacttgtatctgattactctgagagccatcaccagcgactatgtcgtagtgggtaaagctccctcttcggagggagcatcagag

SEQ ID NO: 513 - RNA, 97 nt, synthetic construct
  source 1..97: mol_type = other RNA
actggcacttctatctgattactctgagagccatcaccagcgactatgtcgtatgggtaaagcgcttacggacttcggtccgtaagaagcatcagag

SEQ ID NO: 514 - RNA, 98 nt, synthetic construct
  source 1..98: mol_type = other RNA
actggcgcttctatctgattactctgagagccatcaccagcgactatgtcgtatgggtaaagccgcttacggacttcggtccgtaagaggcatcagag

SEQ ID NO: 515 - RNA, 98 nt, synthetic construct
  source 1..98: mol_type = other RNA
actggcacttctatctgattactctgagcgccatcaccagcgactatgtcgtatgggtaaagccgcttacggacttcggtccgtaagaggcatcagag

SEQ ID NO: 516 - RNA, 98 nt, synthetic construct
  source 1..98: mol_type = other RNA
actggcgcttctatctgattactctgagcgccatcaccagcgactatgtcgtatgggtaaagccgcttacggacttcggtccgtaagaggcatcagag

SEQ ID NO: 517 - RNA, 98 nt, synthetic construct
  source 1..98: mol_type = other RNA
actggcgcttctatctgattactctgagcgccatcaccagcgactatgtcgtatgggtaaagcgccttacggacttcggtccgtaaggagcatcagag

SEQ ID NO: 518 - RNA, 98 nt, synthetic construct
  source 1..98: mol_type = other RNA
acgggactttctatctgattactctgaagtccctcaccagcgactatgtcgtatgggtaaagccgcttacggacttcggtccgtaagaggcatcagag

SEQ ID NO: 519 - RNA, 98 nt, synthetic construct
  source 1..98: mol_type = other RNA
acctgtagttctatctgattactctgactacagtcaccagcgactatgtcgtatgggtaaagccgcttacggacttcggtccgtaagaggcatcagag

SEQ ID NO: 520 - RNA, 99 nt, synthetic construct
  source 1..99: mol_type = other RNA
actgggccttctatctgattactctgaggcccatcaccagcgactatgtcgtagtgggtaaagccgcttagggacttcggtccctaagaggcatcagag

SEQ ID NO: 521 - RNA, 97 nt, synthetic construct
  source 1..97: mol_type = other RNA
actgggccttctatctgattactctgaggcccatcaccagcgactatgtcgtagtgggtaaagcccttagggacttcggtccctaagggcatcagag

SEQ ID NO: 522 - RNA, 99 nt, synthetic construct
  source 1..99: mol_type = other RNA
actgggccttctatctgattactctgaggcccatcaccagcgactatgtcgtagtgggtaaagcctcttagggacttcggtccctaagaggcatcagag

SEQ ID NO: 523 - RNA, 89 nt, synthetic construct
  source 1..89: mol_type = other RNA
actgggccttctatctgattactctgaggcccatcaccagcgactatgtcgtagtgggtaaagctccctcttcggagggagcatcagag

SEQ ID NO: 524 - RNA, 97 nt, synthetic construct
  source 1..97: mol_type = other RNA
actgggccttctatctgattactctgaggcccatcaccagcgactatgtcgtagtgggtaaagcccttagggaccttggtccctaagggcatcagag

SEQ ID NO: 525 - RNA, 99 nt, synthetic construct
  source 1..99: mol_type = other RNA
actgggccttctatctgattactctgaggcccatcaccagcgactatgtcgtagtgggtaaagcctcttagggaccttggtccctaagaggcatcagag

SEQ ID NO: 526 - RNA, 89 nt, synthetic construct
  source 1..89: mol_type = other RNA
actgggccttctatctgattactctgaggcccatcaccagcgactatgtcgtagtgggtaaagctccctccttggagggagcatcagag

SEQ ID NO: 527 - RNA, 97 nt, synthetic construct
  source 1..97: mol_type = other RNA
actgggccttctatctgattactctgaggcccatcaccagcgactatgtcgtagtgggtaaagcccttagggaggaaactccctaagggcatcagag

SEQ ID NO: 528 - RNA, 99 nt, synthetic construct
  source 1..99: mol_type = other RNA
actgggccttctatctgattactctgaggcccatcaccagcgactatgtcgtagtgggtaaagcctcttagggaggaaactccctaagaggcatcagag

SEQ ID NO: 529 - RNA, 89 nt, synthetic construct
  source 1..89: mol_type = other RNA
actgggccttctatctgattactctgaggcccatcaccagcgactatgtcgtagtgggtaaagctccctggaaacagggagcatcagag

SEQ ID NO: 530 - RNA, 98 nt, synthetic construct
  source 1..98: mol_type = other RNA
actgggccttctatctgattactctgaggcccatcaccagcgactatgtcgtagtgggtaaagcccttagggacttcaggtccctaagggcatcagag

SEQ ID NO: 531 - RNA, 100 nt, synthetic construct
  source 1..100: mol_type = other RNA
actgggccttctatctgattactctgaggcccatcaccagcgactatgtcgtagtgggtaaagcctcttagggacttcaggtccctaagaggcatcagag

SEQ ID NO: 532 - RNA, 90 nt, synthetic construct
  source 1..90: mol_type = other RNA
actgggccttctatctgattactctgaggcccatcaccagcgactatgtcgtagtgggtaaagctccctcttcaggagggagcatcagag

SEQ ID NO: 533 - RNA, 97 nt, synthetic construct
  source 1..97: mol_type = other RNA
actgggccttctatctgattactctgaggcccatcaccaggcactatgtgctagtgggtaaagcccttagggaccttggtccctaagggcatcagag

SEQ ID NO: 534 - RNA, 99 nt, synthetic construct
  source 1..99: mol_type = other RNA
actgggccttctatctgattactctgaggcccatcaccaggcactatgtgctagtgggtaaagcctcttagggaccttggtccctaagaggcatcagag

SEQ ID NO: 535 - RNA, 89 nt, synthetic construct
  source 1..89: mol_type = other RNA
actgggccttctatctgattactctgaggcccatcaccaggcactatgtgctagtgggtaaagctccctccttggagggagcatcagag

SEQ ID NO: 536 - RNA, 97 nt, synthetic construct
  source 1..97: mol_type = other RNA
actgggccttctatctgattactctgaggcccatcaccaggcactatgtgctagtgggtaaagcccttagggaggaaactccctaagggcatcagag

SEQ ID NO: 537 - RNA, 99 nt, synthetic construct
  source 1..99: mol_type = other RNA
actgggccttctatctgattactctgaggcccatcaccaggcactatgtgctagtgggtaaagcctcttagggaggaaactccctaagaggcatcagag

SEQ ID NO: 538 - RNA, 89 nt, synthetic construct
  source 1..89: mol_type = other RNA
actgggccttctatctgattactctgaggcccatcaccaggcactatgtgctagtgggtaaagctccctggaaacagggagcatcagag

SEQ ID NO: 539 - RNA, 98 nt, synthetic construct
  source 1..98: mol_type = other RNA
actgggccttctatctgattactctgaggcccatcaccaggcactatgtgctagtgggtaaagcccttagggacttcaggtccctaagggcatcagag

SEQ ID NO: 540 - RNA, 100 nt, synthetic construct
  source 1..100: mol_type = other RNA
actgggccttctatctgattactctgaggcccatcaccaggcactatgtgctagtgggtaaagcctcttagggacttcaggtccctaagaggcatcagag

SEQ ID NO: 541 - RNA, 90 nt, synthetic construct
  source 1..90: mol_type = other RNA
actgggccttctatctgattactctgaggcccatcaccaggcactatgtgctagtgggtaaagctccctcttcaggagggagcatcagag

SEQ ID NO: 542 - RNA, 21 nt, synthetic construct
  source 1..21: mol_type = other RNA
ccagcgactatgtcgtagtgg

SEQ ID NO: 543 - protein, 2040 aa, Homo sapiens
MEHKEVVLLLLLFLKSAAPEQSHVVQDCYHGDGQSYRGTYSTTVTGRTCQAWSSMTPHQHNRTTENYPNAGLIMNYCRNPDAVAAPYCYTRDPGVRWEYCNLTQCSDAEGTAVAPPTVTPVPSLEAPSEQAPTEQRPGVQECYHGNGQSYRGTYSTTVTGRTCQAWSSMTPHSHSRTPEYYPNAGLIMNYCRNPDAVAAPYCYTRDPGVRWEYCNLTQCSDAEGTAVAPPTVTPVPSLEAPSEQAPTEQRPGVQECYHGNGQSYRGTYSTTVTGRTCQAWSSMTPHSHSRTPEYYPNAGLIMNYCRNPDAVAAPYCYTRDPGVRWEYCNLTQCSDAEGTAVAPPTVTPVPSLEAPSEQAPTEQRPGVQECYHGNGQSYRGTYSTTVTGRTCQAWSSMTPHSHSRTPEYYPNAGLIMNYCRNPDAVAAPYCYTRDPGVRWEYCNLTQCSDAEGTAVAPPTVTPVPSLEAPSEQAPTEQRPGVQECYHGNGQSYRGTYSTTVTGRTCQAWSSMTPHSHSRTPEYYPNAGLIMNYCRNPDAVAAPYCYTRDPGVRWEYCNLTQCSDAEGTAVAPPTVTPVPSLEAPSEQAPTEQRPGVQECYHGNGQSYRGTYSTTVTGRTCQAWSSMTPHSHSRTPEYYPNAGLIMNYCRNPDAVAAPYCYTRDPGVRWEYCNLTQCSDAEGTAVAPPTVTPVPSLEAPSEQAPTEQRPGVQECYHGNGQSYRGTYSTTVTGRTCQAWSSMTPHSHSRTPEYYPNAGLIMNYCRNPDAVAAPYCYTRDPGVRWEYCNLTQCSDAEGTAVAPPTVTPVPSLEAPSEQAPTEQRPGVQECYHGNGQSYRGTYSTTVTGRTCQAWSSMTPHSHSRTPEYYPNAGLIMNYCRNPDPVAAPYCYTRDPSVRWEYCNLTQCSDAEGTAVAPPTITPIPSLEAPSEQAPTEQRPGVQECYHGNGQSYQGTYFITVTGRTCQAWSSMTPHSHSRTPAYYPNAGLIKNYCRNPDPVAAPWCYTTDPSVRWEYCNLTRCSDAEWTAFVPPNVILAPSLEAFFEQALTEETPGVQDCYYHYGQSYRGTYSTTVTGRTCQAWSSMTPHQHSRTPENYPNAGLTRNYCRNPDAEIRPWCYTMDPSVRWEYCNLTQCLVTESSVLATLTVVPDPSTEASSEEAPTEQSPGVQDCYHGDGQSYRGSFSTTVTGRTCQSWSSMTPHWHQRTTEYYPNGGLTRNYCRNPDAEISPWCYTMDPNVRWEYCNLTQCPVTESSVLATSTAVSEQAPTEQSPTVQDCYHGDGQSYRGSFSTTVTGRTCQSWSSMTPHWHQRTTEYYPNGGLTRNYCRNPDAEIRPWCYTMDPSVRWEYCNLTQCPVMESTLLTTPTVVPVPSTELPSEEAPTENSTGVQDCYRGDGQSYRGTLSTTITGRTCQSWSSMTPHWHRRIPLYYPNAGLTRNYCRNPDAEIRPWCYTMDPSVRWEYCNLTRCPVTESSVLTTPTVAPVPSTEAPSEQAPPEKSPVVQDCYHGDGRSYRGISSTTVTGRTCQSWSSMIPHWHQRTPENYPNAGLTENYCRNPDSGKQPWCYTTDPCVRWEYCNLTQCSETESGVLETPTVVPVPSMEAHSEAAPTEQTPVVRQCYHGNGQSYRGTFSTTVTGRTCQSWSSMTPHRHQRTPENYPNDGLTMNYCRNPDADTGPWCFTMDPSIRWEYCNLTRCSDTEGTVVAPPTVIQVPSLGPPSEQDCMFGNGKGYRGKKATTVTGTPCQEWAAQEPHRHSTFIPGTNKWAGLEKNYCRNPDGDINGPWCYTMNPRKLFDYCDIPLCASSSFDCGKPQVEPKKCPGSIVGGCVAHPHSWPWQVSLRTRFGKHFCGGTLISPEWVLTAAHCLKKSSRPSSYKVILGAHQEVNLESHVQEIEVSRLFLEPTQADIALLKLSRPAVITDKVMPACLPSPDYMVTARTECYITGWGETQGTFGTGLLKEAQLLVIENEVCNHYKYICAEHLARGTDSCQGDSGGPLVCFEKDKYILQGVTSWGLGCARPNKPGVYARVSRFVTWIEGMMRNN

SEQ ID NO: 544 - RNA, 20 nt, synthetic construct
  source 1..20: mol_type = other RNA
agatttagcacaatggcaaa

SEQ ID NO: 545 - RNA, 20 nt, synthetic construct
  source 1..20: mol_type = other RNA
tcaagatttagcacaatggc

SEQ ID NO: 546 - RNA, 20 nt, synthetic construct
  source 1..20: mol_type = other RNA
tcatttgtatccgtagtctg

SEQ ID NO: 547 - RNA, 20 nt, synthetic construct
  source 1..20: mol_type = other RNA
aatggccagaaggtcatatg

SEQ ID NO: 548 - RNA, 20 nt, synthetic construct
  source 1..20: mol_type = other RNA
atggactgatcctgccgctg

SEQ ID NO: 549 - RNA, 20 nt, synthetic construct
  source 1..20: mol_type = other RNA
tgccgctggacttaccctgc

SEQ ID NO: 550 - RNA, 20 nt, synthetic construct
  source 1..20: mol_type = other RNA
gggagggcttcaatcctctt

SEQ ID NO: 551 - RNA, 20 nt, synthetic construct
  source 1..20: mol_type = other RNA
tcttgtcacctgtggcctac

SEQ ID NO: 552 - RNA, 20 nt, synthetic construct
  source 1..20: mol_type = other RNA
ctgagggcaggtaggccaca

SEQ ID NO: 553 - RNA, 20 nt, synthetic construct
  source 1..20: mol_type = other RNA
agtggccgacatagagatgt

SEQ ID NO: 554 - RNA, 20 nt, synthetic construct
  source 1..20: mol_type = other RNA
ctatgtcggccactggatgg

SEQ ID NO: 555 - RNA, 20 nt, synthetic construct
  source 1..20: mol_type = other RNA
actttcctggcaacttgcgg

SEQ ID NO: 556 - RNA, 20 nt, synthetic construct
  source 1..20: mol_type = other RNA
tgataatggtgaaaacctac

SEQ ID NO: 557 - RNA, 20 nt, synthetic construct
  source 1..20: mol_type = other RNA
gctatttgagcaaggcaaac

SEQ ID NO: 558 - RNA, 20 nt, synthetic construct
  source 1..20: mol_type = other RNA
cctggactacatagttgtgt

SEQ ID NO: 559 - RNA, 20 nt, synthetic construct
  source 1..20: mol_type = other RNA
ggcagagggtgcatcacctg

SEQ ID NO: 560 - RNA, 20 nt, synthetic construct
  source 1..20: mol_type = other RNA
gggcagagctgcatgatgga

SEQ ID NO: 561 - RNA, 20 nt, synthetic construct
  source 1..20: mol_type = other RNA
tgcagctctgcccagattga

SEQ ID NO: 562 - RNA, 20 nt, synthetic construct
  source 1..20: mol_type = other RNA
ttccaggagggggtggtggc

SEQ ID NO: 563 - RNA, 20 nt, synthetic construct
  source 1..20: mol_type = other RNA
atccttccaggagggggtgg

SEQ ID NO: 564 - RNA, 20 nt, synthetic construct
  source 1..20: mol_type = other RNA
tataccaaactgtgccgaaa

SEQ ID NO: 565 - RNA, 20 nt, synthetic construct
  source 1..20: mol_type = other RNA
ccacatcctataccaaactg

SEQ ID NO: 566 - RNA, 20 nt, synthetic construct
  source 1..20: mol_type = other RNA
taaaagtagctcatatttgc

SEQ ID NO: 567 - RNA, 20 nt, synthetic construct
  source 1..20: mol_type = other RNA
ttcctgattagtcttgtttc

SEQ ID NO: 568 - RNA, 20 nt, synthetic construct
  source 1..20: mol_type = other RNA
ggaaagatgaaggtctaggg

SEQ ID NO: 569 - RNA, 20 nt, synthetic construct
  source 1..20: mol_type = other RNA
attgacattgcactctcaaa

SEQ ID NO: 570 - RNA, 20 nt, synthetic construct
  source 1..20: mol_type = other RNA
tagtttccatgggctgaaat

SEQ ID NO: 571 - RNA, 20 nt, synthetic construct
  source 1..20: mol_type = other RNA
acatcctagtttccatgggc

SEQ ID NO: 572 - RNA, 20 nt, synthetic construct
  source 1..20: mol_type = other RNA
ttccaatgtgtgctggaatg

SEQ ID NO: 573 - RNA, 20 nt, synthetic construct
  source 1..20: mol_type = other RNA
tctattcacaaattgctaag

SEQ ID NO: 574 - RNA, 20 nt, synthetic construct
  source 1..20: mol_type = other RNA
gccaatgcctgttcaataat

SEQ ID NO: 575 - RNA, 20 nt, synthetic construct
  source 1..20: mol_type = other RNA
agttttccagcatagagcat

SEQ ID NO: 576 - RNA, 20 nt, synthetic construct
  source 1..20: mol_type = other RNA
tcctccttgccctgccctca

SEQ ID NO: 577 - RNA, 20 nt, synthetic construct
  source 1..20: mol_type = other RNA
agtagaaaggcagatgaaca

SEQ ID NO: 578 - RNA, 20 nt, synthetic construct
  source 1..20: mol_type = other RNA
gcctttctactggatacttg

SEQ ID NO: 579 - RNA, 20 nt, synthetic construct
  source 1..20: mol_type = other RNA
gcatacaaacacatgttctc

SEQ ID NO: 580 - RNA, 20 nt, synthetic construct
  source 1..20: mol_type = other RNA
gcatgtggcccccaccacac

SEQ ID NO: 581 - RNA, 20 nt, synthetic construct
  source 1..20: mol_type = other RNA
tggaccacatggctttgctc

SEQ ID NO: 582 - RNA, 20 nt, synthetic construct
  source 1..20: mol_type = other RNA
atgacaccacatcaacataa

SEQ ID NO: 583 - RNA, 20 nt, synthetic construct
  source 1..20: mol_type = other RNA
acataataggaccacagaaa

SEQ ID NO: 584 - RNA, 20 nt, synthetic construct
  source 1..20: mol_type = other RNA
tgtggcagccccttattgtt

SEQ ID NO: 585 - RNA, 20 nt, synthetic construct
  source 1..20: mol_type = other RNA
gggtaatagttggaggcgcg

SEQ ID NO: 586 - RNA, 20 nt, synthetic construct
  source 1..20: mol_type = other RNA
aggcacatacttcattactg

SEQ ID NO: 587 - RNA, 20 nt, synthetic construct
  source 1..20: mol_type = other RNA
ggatttcggcagtagttctt

SEQ ID NO: 588 - RNA, 20 nt, synthetic construct
  source 1..20: mol_type = other RNA
agaactactgccgaaatcca

SEQ ID NO: 589 - RNA, 20 nt, synthetic construct
  source 1..20: mol_type = other RNA
tgtggcagccccttggtgtt

SEQ ID NO: 590 - RNA, 20 nt, synthetic construct
  source 1..20: mol_type = other RNA
gagcatcgtgtcaggttgca

SEQ ID NO: 591 - RNA, 20 nt, synthetic construct
  source 1..20: mol_type = other RNA
agtgtccttgcaactctcac

SEQ ID NO: 592 - RNA, 20 nt, synthetic construct
  source 1..20: mol_type = other RNA
gggaccaccgtgagagttgc

SEQ ID NO: 593 - RNA, 20 nt, synthetic construct
  source 1..20: mol_type = other RNA
aagcacagaggcttcttctg

SEQ ID NO: 594 - RNA, 20 nt, synthetic construct
  source 1..20: mol_type = other RNA
tggaccccggggctttgctc

SEQ ID NO: 595 - RNA, 20 nt, synthetic construct
  source 1..20: mol_type = other RNA
gaggacaacagaatattatc

SEQ ID NO: 596 - RNA, 20 nt, synthetic construct
  source 1..20: mol_type = other RNA
agatgctgagattagtcctt

SEQ ID NO: 597 - RNA, 20 nt, synthetic construct
  source 1..20: mol_type = other RNA
atggtataacaccaaggact

SEQ ID NO: 598 - RNA, 20 nt, synthetic construct
  source 1..20: mol_type = other RNA
agtgtccttgcgacgtccac

SEQ ID NO: 599 - RNA, 20 nt, synthetic construct
  source 1..20: mol_type = other RNA
ctggacattgcgtcaggttg

SEQ ID NO: 600 - RNA, 20 nt, synthetic construct
  source 1..20: mol_type = other RNA
actctcctcacaactcccac

SEQ ID NO: 601 - RNA, 20 nt, synthetic construct
  source 1..20: mol_type = other RNA
cctcggtagcagtcctggac

SEQ ID NO: 602 - RNA, 20 nt, synthetic construct
  source 1..20: mol_type = other RNA
aggcacactctccaccacta

SEQ ID NO: 603 - RNA, 20 nt, synthetic construct
  source 1..20: mol_type = other RNA
tccgatgccaatgtggtgtc

SEQ ID NO: 604 - RNA, 20 nt, synthetic construct
  source 1..20: mol_type = other RNA
gaggatcccattatactatc

SEQ ID NO: 605 - RNA, 20 nt, synthetic construct
  source 1..20: mol_type = other RNA
cattatactatccaaatgcg

SEQ ID NO: 606 - RNA, 20 nt, synthetic construct
  source 1..20: mol_type = other RNA
agtgtcctcacaactcccac

SEQ ID NO: 607 - RNA, 20 nt, synthetic construct
  source 1..20: mol_type = other RNA
tggaccacagggcttttctc

SEQ ID NO: 608 - RNA, 20 nt, synthetic construct
  source 1..20: mol_type = other RNA
aggcatatcctccaccactg

SEQ ID NO: 609 - RNA, 20 nt, synthetic construct
  source 1..20: mol_type = other RNA
tccaccactgtcacaggaag

SEQ ID NO: 610 - RNA, 20 nt, synthetic construct
  source 1..20: mol_type = other RNA
tagatgaccaagattgacag

SEQ ID NO: 611 - RNA, 20 nt, synthetic construct
  source 1..20: mol_type = other RNA
tggtcatctatgataccaca

SEQ ID NO: 612 - RNA, 20 nt, synthetic construct
  source 1..20: mol_type = other RNA
atgataccacactggcatca

SEQ ID NO: 613 - RNA, 20 nt, synthetic construct
  source 1..20: mol_type = other RNA
gagttgtcggggaagtggag

SEQ ID NO: 614 - RNA, 20 nt, synthetic construct
  source 1..20: mol_type = other RNA
gagctctagtgctgtgttgg

SEQ ID NO: 615 - RNA, 20 nt, synthetic construct
  source 1..20: mol_type = other RNA
tctgaaaccaggacccactt

SEQ ID NO: 616 - RNA, 20 nt, synthetic construct
  source 1..20: mol_type = other RNA
atgctatttaagatactcag

SEQ ID NO: 617 - RNA, 20 nt, synthetic construct
  source 1..20: mol_type = other RNA
taaatagcatggatggagct

SEQ ID NO: 618 - RNA, 20 nt, synthetic construct
  source 1..20: mol_type = other RNA
catgtaaatgaactcataca

SEQ ID NO: 619 - RNA, 20 nt, synthetic construct
  source 1..20: mol_type = other RNA
tttacatttcctccaaaaga

SEQ ID NO: 620 - RNA, 20 nt, synthetic construct
  source 1..20: mol_type = other RNA
gtgctacccccttaccactg

SEQ ID NO: 621 - RNA, 20 nt, synthetic construct
  source 1..20: mol_type = other RNA
ggattcctgcagtagttctc

SEQ ID NO: 622 - RNA, 20 nt, synthetic construct
  source 1..20: mol_type = other RNA
gacacaatgctcagaaacag

SEQ ID NO: 623 - RNA, 20 nt, synthetic construct
  source 1..20: mol_type = other RNA
ggtgtcctagagactcccac

SEQ ID NO: 624 - RNA, 20 nt, synthetic construct
  source 1..20: mol_type = other RNA
ggccacagacttcttacctg

SEQ ID NO: 625 - RNA, 20 nt, synthetic construct
  source 1..20: mol_type = other RNA
aggttccaagcctagggcct

SEQ ID NO: 626 - RNA, 20 nt, synthetic construct
  source 1..20: mol_type = other RNA
cacgctagacaaagaagggt

SEQ ID NO: 627 - RNA, 20 nt, synthetic construct
  source 1..20: mol_type = other RNA
taggaaatcaatgaagggta

SEQ ID NO: 628 - RNA, 20 nt, synthetic construct
  source 1..20: mol_type = other RNA
atgaagggtagtgcagctct

SEQ ID NO: 629 - RNA, 20 nt, synthetic construct
  source 1..20: mol_type = other RNA
tacgagaaaggccatctggg

SEQ ID NO: 630 - RNA, 20 nt, synthetic construct
  source 1..20: mol_type = other RNA
aatgtcaattccccttcccc

SEQ ID NO: 631 - RNA, 20 nt, synthetic construct
  source 1..20: mol_type = other RNA
tcatcttttctaggtcctca

SEQ ID NO: 632 - RNA, 20 nt, synthetic construct
  source 1..20: mol_type = other RNA
catgttcaggaaatagaagt

SEQ ID NO: 633 - RNA, 20 nt, synthetic construct
  source 1..20: mol_type = other RNA
gcttgtgtgggctccaagaa

SEQ ID NO: 634 - RNA, 20 nt, synthetic construct
  source 1..20: mol_type = other RNA
ccagactacatggtcaccgc

SEQ ID NO: 635 - RNA, 20 nt, synthetic construct
  source 1..20: mol_type = other RNA
atgtaagtctcatctgcaat

SEQ ID NO: 636 - RNA, 20 nt, synthetic construct
  source 1..20: mol_type = other RNA
gcccagtgattgcagatgag

SEQ ID NO: 637 - RNA, 20 nt, synthetic construct
  source 1..20: mol_type = other RNA
gcaatcactgggctgatccc

SEQ ID NO: 638 - RNA, 20 nt, synthetic construct
  source 1..20: mol_type = other RNA
ctgggctgatcccgtggccc

SEQ ID NO: 639 - RNA, 20 nt, synthetic construct
  source 1..20: mol_type = other RNA
cgtggccctgtctccagggc

SEQ ID NO: 640 - RNA, 20 nt, synthetic construct
  source 1..20: mol_type = other RNA
tcaggttacctgtggcccac

SEQ ID NO: 641 - RNA, 20 nt, synthetic construct
  source 1..20: mol_type = other RNA
ctacattggccacgagatgg

SEQ ID NO: 642 - RNA, 20 nt, synthetic construct
  source 1..20: mol_type = other RNA
tgataagagggaaaacccac

SEQ ID NO: 643 - RNA, 20 nt, synthetic construct
  source 1..20: mol_type = other RNA
cctggactgcacagatgtgt

SEQ ID NO: 644 - RNA, 20 nt, synthetic construct
  source 1..20: mol_type = other RNA
gtgcagtccaggtgatgcat

SEQ ID NO: 645 - RNA, 20 nt, synthetic construct
  source 1..20: mol_type = other RNA
catgcccaatgctcggtagt

SEQ ID NO: 646 - RNA, 20 nt, synthetic construct
  source 1..20: mol_type = other RNA
ttgtcttcggtgtcagaaaa

SEQ ID NO: 647 - RNA, 20 nt, synthetic construct
  source 1..20: mol_type = other RNA
aagtttccaatgttgcaagc

SEQ ID NO: 648 - RNA, 20 nt, synthetic construct
  source 1..20: mol_type = other RNA
ctataagtatatttgtgctg

SEQ ID NO: 649 - RNA, 20 nt, synthetic construct
  source 1..20: mol_type = other RNA
attgatcttttcttacctgg

SEQ ID NO: 650 - RNA, 20 nt, synthetic construct
  source 1..20: mol_type = other RNA
acctacttagaagctgaaac

SEQ ID NO: 651 - RNA, 20 nt, synthetic construct
  source 1..20: mol_type = other RNA
ttacccacgtttcagcttct

SEQ ID NO: 652 - RNA, 20 nt, synthetic construct
  source 1..20: mol_type = other RNA
atgtcggccactggatggca

SEQ ID NO: 653 - RNA, 20 nt, synthetic construct
  source 1..20: mol_type = other RNA
cccctagaccttcatctttc

SEQ ID NO: 654 - RNA, 20 nt, synthetic construct
  source 1..20: mol_type = other RNA
ttccctcacccctagacctt

SEQ ID NO: 655 - RNA, 20 nt, synthetic construct
  source 1..20: mol_type = other RNA
acattgcctttatgtctcct

SEQ ID NO: 656 - RNA, 20 nt, synthetic construct
  source 1..20: mol_type = other RNA
gctgctccacattgccttta

SEQ ID NO: 657 - RNA, 20 nt, synthetic construct
  source 1..20: mol_type = other RNA
aactattaccccgattccaa

SEQ ID NO: 658 - RNA, 20 nt, synthetic construct
  source 1..20: mol_type = other RNA
aggcttggaatcggggtaat

SEQ ID NO: 659 - RNA, 20 nt, synthetic construct
  source 1..20: mol_type = other RNA
cacctgacactgggatctgt

SEQ ID NO: 660 - RNA, 20 nt, synthetic construct
  source 1..20: mol_type = other RNA
gatgcagaatggactgcctt

SEQ ID NO: 661 - RNA, 20 nt, synthetic construct
  source 1..20: mol_type = other RNA
gaatgttattctggctccaa

SEQ ID NO: 662 - RNA, 20 nt, synthetic construct
  source 1..20: mol_type = other RNA
aggcttggagccagaataac

SEQ ID NO: 663 - RNA, 20 nt, synthetic construct
  source 1..20: mol_type = other RNA
gtccataatggtagtagcag

SEQ ID NO: 664 - RNA, 20 nt, synthetic construct
  source 1..20: mol_type = other RNA
gtaactctgtccataatggt

SEQ ID NO: 665 - RNA, 20 nt, synthetic construct
  source 1..20: mol_type = other RNA
cggtggtcccagatccaagc

SEQ ID NO: 666 - RNA, 20 nt, synthetic construct
  source 1..20: mol_type = other RNA
aggttgtacccatttggata

SEQ ID NO: 667 - RNA, 20 nt, synthetic construct
  source 1..20: mol_type = other RNA
tgggagaaaactcaaagaca

SEQ ID NO: 668 - RNA, 20 nt, synthetic construct
  source 1..20: mol_type = other RNA
cctcacaactcccacggtgg

SEQ ID NO: 669 - RNA, 20 nt, synthetic construct
  source 1..20: mol_type = other RNA
tcacaactcccacggtggtc

SEQ ID NO: 670 - RNA, 20 nt, synthetic construct
  source 1..20: mol_type = other RNA
caactcccacggtggtccca

SEQ ID NO: 671 - RNA, 20 nt, synthetic construct
  source 1..20: mol_type = other RNA
gtagcagtcctggaccccag

SEQ ID NO: 672 - RNA, 20 nt, synthetic construct
  source 1..20: mol_type = other RNA
gtccatcacctcggtagcag

SEQ ID NO: 673 - RNA, 20 nt, synthetic construct
  source 1..20: mol_type = other RNA
ataactctgtccatcacctc

SEQ ID NO: 674 - RNA, 20 nt, synthetic construct
  source 1..20: mol_type = other RNA
ccaccactatcacaggaaga

SEQ ID NO: 675 - RNA, 20 nt, synthetic construct
  source 1..20: mol_type = other RNA
attctgtcactggacatcgt

SEQ ID NO: 676 - RNA, 20 nt, synthetic construct
  source 1..20: mol_type = other RNA
caactcccacagtggccccg

SEQ ID NO: 677 - RNA, 20 nt, synthetic construct
  source 1..20: mol_type = other RNA
cacagtggccccggttccaa

SEQ ID NO: 678 - RNA, 20 nt, synthetic construct
  source 1..20: mol_type = other RNA
gaaacagaatcaggtgtcct

SEQ ID NO: 679 - RNA, 20 nt, synthetic construct
  source 1..20: mol_type = other RNA
gcttgattttgtctattttc

SEQ ID NO: 680 - RNA, 20 nt, synthetic construct
  source 1..20: mol_type = other RNA
cacctgatgctggggtccat

SEQ ID NO: 681 - RNA, 20 nt, synthetic construct
  source 1..20: mol_type = other RNA
gacacagaagggactgtggt

SEQ ID NO: 682 - RNA, 20 nt, synthetic construct
  source 1..20: mol_type = other RNA
ctgcttgaagaagtacgttt

SEQ ID NO: 683 - RNA, 20 nt, synthetic construct
  source 1..20: mol_type = other RNA
aggccttcatcctacaaggt

SEQ ID NO: 684 - RNA, 20 nt, synthetic construct
  source 1..20: mol_type = other RNA
aatctcatgttcaggaaata

SEQ ID NO: 685 - RNA, 20 nt, synthetic construct
  source 1..20: mol_type = other RNA
acattggccacgagatggca

SEQ ID NO: 686 - RNA, 20 nt, synthetic construct
  source 1..20: mol_type = other RNA
actgctctgttcttctggaa

SEQ ID NO: 687 - RNA, 20 nt, synthetic construct
  source 1..20: mol_type = other RNA
aggaagcccagctccttgtt

SEQ ID NO: 688 - RNA, 20 nt, synthetic construct
  source 1..20: mol_type = other RNA
ataacaaggagctgggcttc

SEQ ID NO: 689 - RNA, 20 nt, synthetic construct
  source 1..20: mol_type = other RNA
ttgttattgagaatgaagtg

SEQ ID NO: 690 - RNA, 20 nt, synthetic construct
  source 1..20: mol_type = other RNA
gcacaaatatacttatagtg

SEQ ID NO: 691 - RNA, 20 nt, synthetic construct
  source 1..20: mol_type = other RNA
gcacttattttgatttgaat

SEQ ID NO: 692 - RNA, 20 nt, synthetic construct
  source 1..20: mol_type = other RNA
gcgagtaggtgctgccatcc

SEQ ID NO: 693 - RNA, 20 nt, synthetic construct
  source 1..20: mol_type = other RNA
atgcctccagccaaatgccc

SEQ ID NO: 694 - RNA, 20 nt, synthetic construct
  source 1..20: mol_type = other RNA
aggggtgagggaaggagtaa

SEQ ID NO: 695 - RNA, 20 nt, synthetic construct
  source 1..20: mol_type = other RNA
atagatgctgggaagtggtg

SEQ ID NO: 696 - RNA, 20 nt, synthetic construct
  source 1..20: mol_type = other RNA
tataaaatatttgagagtgc

SEQ ID NO: 697 - RNA, 20 nt, synthetic construct
  source 1..20: mol_type = other RNA
tcacggggaaattaaactta

SEQ ID NO: 698 - RNA, 20 nt, synthetic construct
  source 1..20: mol_type = other RNA
ttagtatcactgcaaacctc

SEQ ID NO: 699 - RNA, 20 nt, synthetic construct
  source 1..20: mol_type = other RNA
tctatgacaccacatcaaca

SEQ ID NO: 700 - RNA, 20 nt, synthetic construct
  source 1..20: mol_type = other RNA
tattatgttgatgtggtgtc

SEQ ID NO: 701 - RNA, 20 nt, synthetic construct
  source 1..20: mol_type = other RNA
cgcctccaactattaccccg

SEQ ID NO: 702 - RNA, 20 nt, synthetic construct
  source 1..20: mol_type = other RNA
attctgcatctgagcatcgt

SEQ ID NO: 703 - RNA, 20 nt, synthetic construct
  source 1..20: mol_type = other RNA
ctccgaatgttattctggct

SEQ ID NO: 704 - RNA, 20 nt, synthetic construct
  source 1..20: mol_type = other RNA
ggcacaacttcttaccttgt

SEQ ID NO: 705 - RNA, 20 nt, synthetic construct
  source 1..20: mol_type = other RNA
tctgttttaatttcagcact

SEQ ID NO: 706 - RNA, 20 nt, synthetic construct
  source 1..20: mol_type = other RNA
tgtaccccgggggtttcctc

SEQ ID NO: 707 - RNA, 20 nt, synthetic construct
  source 1..20: mol_type = other RNA
ataatggtagtagcagtcct

SEQ ID NO: 708 - RNA, 20 nt, synthetic construct
  source 1..20: mol_type = other RNA
gactatgctggtgtggtgtc

SEQ ID NO: 709 - RNA, 20 nt, synthetic construct
  source 1..20: mol_type = other RNA
ccaggcattgtgtcaggttg

SEQ ID NO: 710 - RNA, 20 nt, synthetic construct
  source 1..20: mol_type = other RNA
ttgcaactctcacggtggtc

SEQ ID NO: 711 - RNA, 20 nt, synthetic construct
  source 1..20: mol_type = other RNA
cagatccaagcacagaggct

SEQ ID NO: 712 - RNA, 20 nt, synthetic construct
  source 1..20: mol_type = other RNA
ggccatagacttcctacctt

SEQ ID NO: 713 - RNA, 20 nt, synthetic construct
  source 1..20: mol_type = other RNA
ttgaagaaaactcaaggttg

SEQ ID NO: 714 - RNA, 20 nt, synthetic construct
  source 1..20: mol_type = other RNA
gtctttgaagaaaactcaag

SEQ ID NO: 715 - RNA, 20 nt, synthetic construct
  source 1..20: mol_type = other RNA
ttggtgttataccatggatc

SEQ ID NO: 716 - RNA, 20 nt, synthetic construct
  source 1..20: mol_type = other RNA
caaggacacttgattctgtc

SEQ ID NO: 717 - RNA, 20 nt, synthetic construct
  source 1..20: mol_type = other RNA
ttgcgacgtccacggctgtt

SEQ ID NO: 718 - RNA, 20 nt, synthetic construct
  source 1..20: mol_type = other RNA
acggctgtttctgaacaagg

SEQ ID NO: 719 - RNA, 20 nt, synthetic construct
  source 1..20: mol_type = other RNA
agtgatggaatcaactctcc

SEQ ID NO: 720 - RNA, 20 nt, synthetic construct
  source 1..20: mol_type = other RNA
cagttccaagcacagagctt

SEQ ID NO: 721 - RNA, 20 nt, synthetic construct
  source 1..20: mol_type = other RNA
gactgcaggcttcttacctt

SEQ ID NO: 722 - RNA, 20 nt, synthetic construct
  source 1..20: mol_type = other RNA
tggaccccagtgctgttttc

SEQ ID NO: 723 - RNA, 20 nt, synthetic construct
  source 1..20: mol_type = other RNA
atcacctcggtagcagtcct

SEQ ID NO: 724 - RNA, 20 nt, synthetic construct
  source 1..20: mol_type = other RNA
aggactgctaccgaggtgat

SEQ ID NO: 725 - RNA, 20 nt, synthetic construct
  source 1..20: mol_type = other RNA
atgacaccacattggcatcg

SEQ ID NO: 726 - RNA, 20 nt, synthetic construct
  source 1..20: mol_type = other RNA
tcacaactcccacagtggcc

SEQ ID NO: 727 - RNA, 20 nt, synthetic construct
  source 1..20: mol_type = other RNA
atcttggtcatctatgatac

SEQ ID NO: 728 - RNA, 20 nt, synthetic construct
  source 1..20: mol_type = other RNA
ctaggacacctgattctgtt

SEQ ID NO: 729 - RNA, 20 nt, synthetic construct
  source 1..20: mol_type = other RNA
attttcagcaccaactgagc

SEQ ID NO: 730 - RNA, 20 nt, synthetic construct
  source 1..20: mol_type = other RNA
tccaggttccaagcctaggg

SEQ ID NO: 731 - RNA, 20 nt, synthetic construct
  source 1..20: mol_type = other RNA
ctggaatgaacgtgctgtgt

SEQ ID NO: 732 - RNA, 20 nt, synthetic construct
  source 1..20: mol_type = other RNA
ctggtgctacacaatgaatc

SEQ ID NO: 733 - RNA, 20 nt, synthetic construct
  source 1..20: mol_type = other RNA
gcacccactctggggatatt

SEQ ID NO: 734 - RNA, 20 nt, synthetic construct
  source 1..20: mol_type = other RNA
gttttcccttaaacgtactt

SEQ ID NO: 735 - RNA, 20 nt, synthetic construct
  source 1..20: mol_type = other RNA
gtgatgacggcaggcctgta

SEQ ID NO: 736 - RNA, 20 nt, synthetic construct
  source 1..20: mol_type = other RNA
ggggatggcagacaagctgg

SEQ ID NO: 737 - RNA, 20 nt, synthetic construct
  source 1..20: mol_type = other RNA
gccatccccagactacatgg

SEQ ID NO: 738 - RNA, 20 nt, synthetic construct
  source 1..20: mol_type = other RNA
tggcggtgaccatgtagtct

SEQ ID NO: 739 - RNA, 20 nt, synthetic construct
  source 1..20: mol_type = other RNA
ccgccaggactgaatgttac

SEQ ID NO: 740 - RNA, 20 nt, synthetic construct
  source 1..20: mol_type = other RNA
atgagtatgtgctgccatct

SEQ ID NO: 741 - RNA, 20 nt, synthetic construct
  source 1..20: mol_type = other RNA
gtgcctctggccaaatgctc

SEQ ID NO: 742 - RNA, 20 nt, synthetic construct
  source 1..20: mol_type = other RNA
attatttccagcatgctaaa

SEQ ID NO: 743 - RNA, 20 nt, synthetic construct
  source 1..20: mol_type = other RNA
tcgtttgattgctgtctatt

SEQ ID NO: 744 - RNA, 20 nt, synthetic construct
  source 1..20: mol_type = other RNA
gaccttaaaagcttatacac

SEQ ID NO: 745 - RNA, 20 nt, synthetic construct
  source 1..20: mol_type = other RNA
gtcagaccttaaaagcttat

SEQ ID NO: 746 - RNA, 20 nt, synthetic construct
  source 1..20: mol_type = other RNA
gactgacaaattctgtatta

SEQ ID NO: 747 - RNA, 20 nt, synthetic construct
  source 1..20: mol_type = other RNA
tagctatgacaccttaatac

SEQ ID NO: 748 - RNA, 20 nt, synthetic construct
  source 1..20: mol_type = other RNA
tagctatgacatttgttaaa

SEQ ID NO: 749 - RNA, 20 nt, synthetic construct
  source 1..20: mol_type = other RNA
cggggaaattaaacttattt

SEQ ID NO: 750 - RNA, 20 nt, synthetic construct
  source 1..20: mol_type = other RNA
cagtgatctacatcctagtt

SEQ ID NO: 751 - RNA, 20 nt, synthetic construct
  source 1..20: mol_type = other RNA
gaaggaagctctgtgcttgg

SEQ ID NO: 752 - RNA, 20 nt, synthetic construct
  source 1..20: mol_type = other RNA
ccgtgaagactgtcacggtg

SEQ ID NO: 753 - RNA, 20 nt, synthetic construct
  source 1..20: mol_type = other RNA
agcacacattggaaagataa

SEQ ID NO: 754 - RNA, 20 nt, synthetic construct
  source 1..20: mol_type = other RNA
aatgtgtgctggaatgcccg

SEQ ID NO: 755 - RNA, 20 nt, synthetic construct
  source 1..20: mol_type = other RNA
agggtgatgggcttcacaac

SEQ ID NO: 756 - RNA, 20 nt, synthetic construct
  source 1..20: mol_type = other RNA
aagcacagagcttccttctg

SEQ ID NO: 757 - RNA, 20 nt, synthetic construct
  source 1..20: mol_type = other RNA
ctccacttccccgacaactc

SEQ ID NO: 758 - RNA, 20 nt, synthetic construct
  source 1..20: mol_type = other RNA
ccgacaactcagatgactca

SEQ ID NO: 759 - RNA, 20 nt, synthetic construct
  source 1..20: mol_type = other RNA
tcagaaggaagctctgtgct

SEQ ID NO: 760 - RNA, 20 nt, synthetic construct
  source 1..20: mol_type = other RNA
taccttcttcagaaggaagc

SEQ ID NO: 761 - RNA, 20 nt, synthetic construct
  source 1..20: mol_type = other RNA
atttcctgaacatgagattc

SEQ ID NO: 762 - RNA, 20 nt, synthetic construct
  source 1..20: mol_type = other RNA
gactacggatacaaatgaag

SEQ ID NO: 763 - RNA, 20 nt, synthetic construct
  source 1..20: mol_type = other RNA
cagggccaaggccttgtaca

SEQ ID NO: 764 - RNA, 20 nt, synthetic construct
  source 1..20: mol_type = other RNA
tagtggggcatgttagcaaa

SEQ ID NO: 765 - RNA, 20 nt, synthetic construct
  source 1..20: mol_type = other RNA
acagcaaaactattttgcta

SEQ ID NO: 766 - RNA, 20 nt, synthetic construct
  source 1..20: mol_type = other RNA
atcctcttgtcacctgtggc

SEQ ID NO: 767 - RNA, 20 nt, synthetic construct
  source 1..20: mol_type = other RNA
ccattatcaggatgtttgcc

SEQ ID NO: 768 - RNA, 20 nt, synthetic construct
  source 1..20: mol_type = other RNA
ttctcaatcacagggagctg

SEQ ID NO: 769 - RNA, 20 nt, synthetic construct
  source 1..20: mol_type = other RNA
cttatgttgtcatttcggca

SEQ ID NO: 770 - RNA, 20 nt, synthetic construct
  source 1..20: mol_type = other RNA
tctttcctgattagtcttgt

SEQ ID NO: 771 - RNA, 20 nt, synthetic construct
  source 1..20: mol_type = other RNA
tatcccctgcactccctaca

SEQ ID NO: 772 - RNA, 20 nt, synthetic construct
  source 1..20: mol_type = other RNA
gcccatggaaactaggatgt

SEQ ID NO: 773 - RNA, 20 nt, synthetic construct
  source 1..20: mol_type = other RNA
caaattgctaagtcttttac

SEQ ID NO: 774 - RNA, 20 nt, synthetic construct
  source 1..20: mol_type = other RNA
ataatccagttttccagcat

SEQ ID NO: 775 - RNA, 20 nt, synthetic construct
  source 1..20: mol_type = other RNA
tgcaaagtccttggccacag

SEQ ID NO: 776 - RNA, 20 nt, synthetic construct
  source 1..20: mol_type = other RNA
tctgcctttctactggatac

SEQ ID NO: 777 - RNA, 20 nt, synthetic construct
  source 1..20: mol_type = other RNA
gaacctcccctgaccctgta

SEQ ID NO: 778 - RNA, 20 nt, synthetic construct
  source 1..20: mol_type = other RNA
ttactgtcacaggaagaacc

SEQ ID NO: 779 - RNA, 20 nt, synthetic construct
  source 1..20: mol_type = other RNA
gcactgactgaggaaacccc

SEQ ID NO: 780 - RNA, 20 nt, synthetic construct
  source 1..20: mol_type = other RNA
gaaacagccgtggacgtcgc

SEQ ID NO: 781 - RNA, 20 nt, synthetic construct
  source 1..20: mol_type = other RNA
gcaccaactgaaaacagcac

SEQ ID NO: 782 - RNA, 20 nt, synthetic construct
  source 1..20: mol_type = other RNA
gcaccacctgagaaaagccc

SEQ ID NO: 783 - RNA, 20 nt, synthetic construct
  source 1..20: mol_type = other RNA
cccccacaccatacagaagc

SEQ ID NO: 784 - RNA, 20 nt, synthetic construct
  source 1..20: mol_type = other RNA
agtgtaccagtaggttgcaa

SEQ ID NO: 785 - RNA, 20 nt, synthetic construct
  source 1..20: mol_type = other RNA
gcactgagtatcttaaatag

SEQ ID NO: 786 - RNA, 20 nt, synthetic construct
  source 1..20: mol_type = other RNA
tttacatgagatcatttaca

SEQ ID NO: 787 - RNA, 20 nt, synthetic construct
  source 1..20: mol_type = other RNA
gaaggaggccctaggcttgg

SEQ ID NO: 788 - RNA, 20 nt, synthetic construct
  source 1..20: mol_type = other RNA
ttccagggacaaataaatgg

SEQ ID NO: 789 - RNA, 20 nt, synthetic construct
  source 1..20: mol_type = other RNA
ttgtgtagcaccagggacca

SEQ ID NO: 790 - RNA, 20 nt, synthetic construct
  source 1..20: mol_type = other RNA
tgcatcccacgctagacaaa

SEQ ID NO: 791 - RNA, 20 nt, synthetic construct
  source 1..20: mol_type = other RNA
tcataatgactctaaatttg

SEQ ID NO: 792 - RNA, 20 nt, synthetic construct
  source 1..20: mol_type = other RNA
agcagtgagcagcagtcagc

SEQ ID NO: 793 - RNA, 20 nt, synthetic construct
  source 1..20: mol_type = other RNA
gtcctggcggtgaccatgta

SEQ ID NO: 794 - RNA, 20 nt, synthetic construct
  source 1..20: mol_type = other RNA
ttctcaataacaaggagctg

SEQ ID NO: 795 - RNA, 20 nt, synthetic construct
  source 1..20: mol_type = other RNA
ctctgtctcccgtccaatta

SEQ ID NO: 796 - RNA, 20 nt, synthetic construct
  source 1..20: mol_type = other RNA
gcttctaagtaggttgatgc

SEQ ID NO: 797 - RNA, 20 nt, synthetic construct
  source 1..20: mol_type = other RNA
aatcaaaataagtgcagagt

SEQ ID NO: 798 - RNA, 20 nt, synthetic construct
  source 1..20: mol_type = other RNA
aacaagggttcttaacaaga

SEQ ID NO: 799 - RNA, 20 nt, synthetic construct
  source 1..20: mol_type = other RNA
tggcaacttgcggtaggttt

SEQ ID NO: 800 - RNA, 20 nt, synthetic construct
  source 1..20: mol_type = other RNA
atcatgcagctctgcccaga

SEQ ID NO: 801 - RNA, 20 nt, synthetic construct
  source 1..20: mol_type = other RNA
aggagggggtggtggctcat

SEQ ID NO: 802 - RNA, 20 nt, synthetic construct
  source 1..20: mol_type = other RNA
tgattagtcttgtttcctcc

SEQ ID NO: 803 - RNA, 20 nt, synthetic construct
  source 1..20: mol_type = other RNA
cccctcagctgctccacatt

SEQ ID NO: 804 - RNA, 20 nt, synthetic construct
  source 1..20: mol_type = other RNA
cagcatctattgacattgca

SEQ ID NO: 805 - RNA, 20 nt, synthetic construct
  source 1..20: mol_type = other RNA
cagttcaaaatcttgtatat

SEQ ID NO: 806 - RNA, 20 nt, synthetic construct
  source 1..20: mol_type = other RNA
agcaccgtgacagtcttcac

SEQ ID NO: 807 - RNA, 20 nt, synthetic construct
  source 1..20: mol_type = other RNA
agcatagagcatattaaatt

SEQ ID NO: 808 - RNA, 20 nt, synthetic construct
  source 1..20: mol_type = other RNA
tcaatttaatatgctctatg

SEQ ID NO: 809 - RNA, 20 nt, synthetic construct
  source 1..20: mol_type = other RNA
ctagaagtctcgctgctttc

SEQ ID NO: 810 - RNA, 20 nt, synthetic construct
  source 1..20: mol_type = other RNA
atggaattaagcaacaggac

SEQ ID NO: 811 - RNA, 20 nt, synthetic construct
  source 1..20: mol_type = other RNA
atggaagcttggctatcttc

SEQ ID NO: 812 - RNA, 20 nt, synthetic construct
  source 1..20: mol_type = other RNA
cccaacatggcagaactccg

SEQ ID NO: 813 - RNA, 20 nt, synthetic construct
  source 1..20: mol_type = other RNA
gtggtagcactcctgcaccc

SEQ ID NO: 814 - RNA, 20 nt, synthetic construct
  source 1..20: mol_type = other RNA
tgtgacagtaatgaagtatg

SEQ ID NO: 815 - RNA, 20 nt, synthetic construct
  source 1..20: mol_type = other RNA
taccttcttcagaagaagcc

SEQ ID NO: 816 - RNA, 20 nt, synthetic construct
  source 1..20: mol_type = other RNA
atcactggacattgcgtcag

SEQ ID NO: 817 - RNA, 20 nt, synthetic construct
  source 1..20: mol_type = other RNA
tgtgatagtggtggagagtg

SEQ ID NO: 818 - RNA, 20 nt, synthetic construct
  source 1..20: mol_type = other RNA
ttttatggctaacatgatag

SEQ ID NO: 819 - RNA, 20 nt, synthetic construct
  source 1..20: mol_type = other RNA
aagcacagaggctccttctg

SEQ ID NO: 820 - RNA, 20 nt, synthetic construct
  source 1..20: mol_type = other RNA
tgtgacagtggtggaggata

SEQ ID NO: 821 - RNA, 20 nt, synthetic construct
  source 1..20: mol_type = other RNA
ccccacctggaaacagactt

SEQ ID NO: 822 - RNA, 20 nt, synthetic construct
  source 1..20: mol_type = other RNA
tcttttggaggaaatgtaaa

SEQ ID NO: 823 - RNA, 20 nt, synthetic construct
  source 1..20: mol_type = other RNA
tccaaaagaggaaaaactaa

SEQ ID NO: 824 - RNA, 20 nt, synthetic construct
  source 1..20: mol_type = other RNA
tgcagtagttctcggtcagg

SEQ ID NO: 825 - RNA, 20 nt, synthetic construct
  source 1..20: mol_type = other RNA
aagcctagggcctccttctg

SEQ ID NO: 826 - RNA, 20 nt, synthetic construct
  source 1..20: mol_type = other RNA
agggacaaataaatgggcag

SEQ ID NO: 827 - RNA, 20 nt, synthetic construct
  source 1..20: mol_type = other RNA
agacctgcccatttatttgt

SEQ ID NO: 828 - RNA, 20 nt, synthetic construct
  source 1..20: mol_type = other RNA
tcattgctctgagactctta

SEQ ID NO: 829 - RNA, 20 nt, synthetic construct
  source 1..20: mol_type = other RNA
ccttcccctgatccaagcct

SEQ ID NO: 830 - RNA, 20 nt, synthetic construct
  source 1..20: mol_type = other RNA
cttaaacgtacttcttcaag

SEQ ID NO: 831 - RNA, 20 nt, synthetic construct
  source 1..20: mol_type = other RNA
tgaacatgagattcgaggtt

SEQ ID NO: 832 - RNA, 20 nt, synthetic construct
  source 1..20: mol_type = other RNA
ttacaggcctgccgtcatca

SEQ ID NO: 833 - RNA, 20 nt, synthetic construct
  source 1..20: mol_type = other RNA
ctcttatcaggatgtttgcc

SEQ ID NO: 834 - RNA, 20 nt, synthetic construct
  source 1..20: mol_type = other RNA
gcagagctgcatggaggaag

SEQ ID NO: 835 - RNA, 20 nt, synthetic construct
  source 1..20: mol_type = other RNA
tccatgcagctctgcggaag

SEQ ID NO: 836 - RNA, 20 nt, synthetic construct
  source 1..20: mol_type = other RNA
cctacctctgtttagggtga

SEQ ID NO: 837 - RNA, 20 nt, synthetic construct
  source 1..20: mol_type = other RNA
ctcaatccaagtaacaaacc

SEQ ID NO: 838 - RNA, 20 nt, synthetic construct
  source 1..20: mol_type = other RNA
cagctaccagctatgccaaa

SEQ ID NO: 839 - RNA, 20 nt, synthetic construct
  source 1..20: mol_type = other RNA
gcacagtttggtataggatg

SEQ ID NO: 840 - RNA, 20 nt, synthetic construct
  source 1..20: mol_type = other RNA
gcagtagttcttgatcaagc

SEQ ID NO: 841 - RNA, 20 nt, synthetic construct
  source 1..20: mol_type = other RNA
gagggacgaaggcagtccat

SEQ ID NO: 842 - RNA, 20 nt, synthetic construct
  source 1..20: mol_type = other RNA
tccctccgaatgttattctg

SEQ ID NO: 843 - RNA, 20 nt, synthetic construct
  source 1..20: mol_type = other RNA
gtgtcagaaaactgacaccg

SEQ ID NO: 844 - RNA, 20 nt, synthetic construct
  source 1..20: mol_type = other RNA
gtgtcagttttctgacaccg

SEQ ID NO: 845 - RNA, 20 nt, synthetic construct
  source 1..20: mol_type = other RNA
tttgattgctgtctattatt

SEQ ID NO: 846 - RNA, 20 nt, synthetic construct
  source 1..20: mol_type = other RNA
gtcatttgagttagctcagt

SEQ ID NO: 847 - RNA, 20 nt, synthetic construct
  source 1..20: mol_type = other RNA
taacaagactgagctaactc

SEQ ID NO: 848 - RNA, 20 nt, synthetic construct
  source 1..20: mol_type = other RNA
ggccatttgatttattggag

SEQ ID NO: 849 - RNA, 20 nt, synthetic construct
  source 1..20: mol_type = other RNA
tctttggaggttttcacagg

SEQ ID NO: 850 - RNA, 20 nt, synthetic construct
  source 1..20: mol_type = other RNA
ttggaggttttcacagggcc

SEQ ID NO: 851 - RNA, 20 nt, synthetic construct
  source 1..20: mol_type = other RNA
ctagaatctgctatttgagc

SEQ ID NO: 852 - RNA, 20 nt, synthetic construct
  source 1..20: mol_type = other RNA
agagaacggtgctccctcac

SEQ ID NO: 853 - RNA, 20 nt, synthetic construct
  source 1..20: mol_type = other RNA
gactaccaagcatcgggcag

SEQ ID NO: 854 - RNA, 20 nt, synthetic construct
  source 1..20: mol_type = other RNA
gcccattcattccagcaccg

SEQ ID NO: 855 - RNA, 20 nt, synthetic construct
  source 1..20: mol_type = other RNA
agcctttgggtgtagcctgc

SEQ ID NO: 856 - RNA, 20 nt, synthetic construct
  source 1..20: mol_type = other RNA
attcacaaattgctaagtct

SEQ ID NO: 857 - RNA, 20 nt, synthetic construct
  source 1..20: mol_type = other RNA
actggatacttgtcatcggc

SEQ ID NO: 858 - RNA, 20 nt, synthetic construct
  source 1..20: mol_type = other RNA
ctgcagtgtgtcatctttca

SEQ ID NO: 859 - RNA, 20 nt, synthetic construct
  source 1..20: mol_type = other RNA
agggaatacagggtcagggg

SEQ ID NO: 860 - RNA, 20 nt, synthetic construct
  source 1..20: mol_type = other RNA
ctcctgctgccacccccact

SEQ ID NO: 861 - RNA, 20 nt, synthetic construct
  source 1..20: mol_type = other RNA
agtcactctttaacccactc

SEQ ID NO: 862 - RNA, 20 nt, synthetic construct
  source 1..20: mol_type = other RNA
tctgttttaattttagcagc

SEQ ID NO: 863 - RNA, 20 nt, synthetic construct
  source 1..20: mol_type = other RNA
gttttaattttagcagcacc

SEQ ID NO: 864 - RNA, 20 nt, synthetic construct
  source 1..20: mol_type = other RNA
gtggtcctattatgttgatg

SEQ ID NO: 865 - RNA, 20 nt, synthetic construct
  source 1..20: mol_type = other RNA
gccatgttgggggaagcctc

SEQ ID NO: 866 - RNA, 20 nt, synthetic construct
  source 1..20: mol_type = other RNA
ggtgcaacttgggtgggctt

SEQ ID NO: 867 - RNA, 20 nt, synthetic construct
  source 1..20: mol_type = other RNA
aaagacaaagcccacccaag

SEQ ID NO: 868 - RNA, 20 nt, synthetic construct
  source 1..20: mol_type = other RNA
ggccacaggctccttacctt

SEQ ID NO: 869 - RNA, 20 nt, synthetic construct
  source 1..20: mol_type = other RNA
tttcttttcatttcagcacc

SEQ ID NO: 870 - RNA, 20 nt, synthetic construct
  source 1..20: mol_type = other RNA
tttcatttcagcaccaactg

SEQ ID NO: 871 - RNA, 20 nt, synthetic construct
  source 1..20: mol_type = other RNA
tcctgtgacagtaatgaagt

SEQ ID NO: 872 - RNA, 20 nt, synthetic construct
  source 1..20: mol_type = other RNA
tttggaatttccagtggctt

SEQ ID NO: 873 - RNA, 20 nt, synthetic construct
  source 1..20: mol_type = other RNA
gcatctgagcatcgtgtcag

SEQ ID NO: 874 - RNA, 20 nt, synthetic construct
  source 1..20: mol_type = other RNA
ggctccaagcctagaggctt

SEQ ID NO: 875 - RNA, 20 nt, synthetic construct
  source 1..20: mol_type = other RNA
gttttaatttcagcactgac

SEQ ID NO: 876 - RNA, 20 nt, synthetic construct
  source 1..20: mol_type = other RNA
ggggtccgactatgctggtg

SEQ ID NO: 877 - RNA, 20 nt, synthetic construct
  source 1..20: mol_type = other RNA
gtcaccaggcattgtgtcag

SEQ ID NO: 878 - RNA, 20 nt, synthetic construct
  source 1..20: mol_type = other RNA
tcagaagaagcctctgtgct

SEQ ID NO: 879 - RNA, 20 nt, synthetic construct
  source 1..20: mol_type = other RNA
gttgtcctctgatgccagtg

SEQ ID NO: 880 - RNA, 20 nt, synthetic construct
  source 1..20: mol_type = other RNA
taccttgttcagaaacagcc

SEQ ID NO: 881 - RNA, 20 nt, synthetic construct
  source 1..20: mol_type = other RNA
ctgatgccagtgtggtgtca

SEQ ID NO: 882 - RNA, 20 nt, synthetic construct
  source 1..20: mol_type = other RNA
gtggttctctgatgccagtg

SEQ ID NO: 883 - RNA, 20 nt, synthetic construct
  source 1..20: mol_type = other RNA
cttgggagaaaactcaaaga

SEQ ID NO: 884 - RNA, 20 nt, synthetic construct
  source 1..20: mol_type = other RNA
tcctgtgatagtggtggaga

SEQ ID NO: 885 - RNA, 20 nt, synthetic construct
  source 1..20: mol_type = other RNA
gtatggtgtgggggtgaagt

SEQ ID NO: 886 - RNA, 20 nt, synthetic construct
  source 1..20: mol_type = other RNA
gaaaccaggacccacttgag

SEQ ID NO: 887 - RNA, 20 nt, synthetic construct
  source 1..20: mol_type = other RNA
tattatcttctgaaaccagg

SEQ ID NO: 888 - RNA, 20 nt, synthetic construct
  source 1..20: mol_type = other RNA
gtatgagttcatttacatga

SEQ ID NO: 889 - RNA, 20 nt, synthetic construct
  source 1..20: mol_type = other RNA
gttgaaagaaaccaatgtat

SEQ ID NO: 890 - RNA, 20 nt, synthetic construct
  source 1..20: mol_type = other RNA
tggattcattgtgtagcacc

SEQ ID NO: 891 - RNA, 20 nt, synthetic construct
  source 1..20: mol_type = other RNA
ttgtctagcgtgggatgcat

SEQ ID NO: 892 - RNA, 20 nt, synthetic construct
  source 1..20: mol_type = other RNA
cagctgcagaagaggacagt

SEQ ID NO: 893 - RNA, 20 nt, synthetic construct
  source 1..20: mol_type = other RNA
tctcagctgcagaagaggac

SEQ ID NO: 894 - RNA, 20 nt, synthetic construct
  source 1..20: mol_type = other RNA
cgtaagattactactcatga

SEQ ID NO: 895 - RNA, 20 nt, synthetic construct
  source 1..20: mol_type = other RNA
tttcccaccttgtgccacag

SEQ ID NO: 896 - RNA, 20 nt, synthetic construct
  source 1..20: mol_type = other RNA
ttctaggtttggaaagcact

SEQ ID NO: 897 - RNA, 20 nt, synthetic construct
  source 1..20: mol_type = other RNA
tcaagcagtgagcagcagtc

SEQ ID NO: 898 - RNA, 20 nt, synthetic construct
  source 1..20: mol_type = other RNA
tggagcccacacaagcagat

SEQ ID NO: 899 - RNA, 20 nt, synthetic construct
  source 1..20: mol_type = other RNA
caaaatattttgctgaaagt

SEQ ID NO: 900 - RNA, 20 nt, synthetic construct
  source 1..20: mol_type = other RNA
gacaccgaagacaatgatct

SEQ ID NO: 901 - RNA, 20 nt, synthetic construct
  source 1..20: mol_type = other RNA
caataacaaggagctgggct

SEQ ID NO: 902 - RNA, 20 nt, synthetic construct
  source 1..20: mol_type = other RNA
aagtaggttgatgcttcact

SEQ ID NO: 903 - RNA, 20 nt, synthetic construct
  source 1..20: mol_type = other RNA
gtattaaggtgtcatagcta

SEQ ID NO: 904 - RNA, 20 nt, synthetic construct
  source 1..20: mol_type = other RNA
tgatagatgcagaaaaggct

SEQ ID NO: 905 - RNA, 20 nt, synthetic construct
  source 1..20: mol_type = other RNA
atcaagataatcatgtgggt

SEQ ID NO: 906 - RNA, 20 nt, synthetic construct
  source 1..20: mol_type = other RNA
agataatcatgtgggttttg

SEQ ID NO: 907 - RNA, 20 nt, synthetic construct
  source 1..20: mol_type = other RNA
tgtgggttttgtctttagtc

SEQ ID NO: 908 - RNA, 20 nt, synthetic construct
  source 1..20: mol_type = other RNA
cataaatgtgactaaagaca

SEQ ID NO: 909 - RNA, 20 nt, synthetic construct
  source 1..20: mol_type = other RNA
ataaaatgtgactcatcaca

SEQ ID NO: 910 - RNA, 20 nt, synthetic construct
  source 1..20: mol_type = other RNA
ctgggatgtaagattggttc

SEQ ID NO: 911 - RNA, 20 nt, synthetic construct
  source 1..20: mol_type = other RNA
tacatcccagggatgaagac

SEQ ID NO: 912 - RNA, 20 nt, synthetic construct
  source 1..20: mol_type = other RNA
aatagtcttcatccctggga

SEQ ID NO: 913 - RNA, 20 nt, synthetic construct
  source 1..20: mol_type = other RNA
cagggatgaagactatttga

SEQ ID NO: 914 - RNA, 20 nt, synthetic construct
  source 1..20: mol_type = other RNA
tgatcaaatagtcttcatcc

SEQ ID NO: 915 - RNA, 20 nt, synthetic construct
  source 1..20: mol_type = other RNA
atcatgatcaaatagtcttc

SEQ ID NO: 916 - RNA, 20 nt, synthetic construct
  source 1..20: mol_type = other RNA
aaaagctaatccatcatgat

SEQ ID NO: 917 - RNA, 20 nt, synthetic construct
  source 1..20: mol_type = other RNA
tgatggattagctttttgat

SEQ ID NO: 918 - RNA, 20 nt, synthetic construct
  source 1..20: mol_type = other RNA
agcaggacatcaaaaagcta

SEQ ID NO: 919 - RNA, 20 nt, synthetic construct
  source 1..20: mol_type = other RNA
tcaacaaaatacttgcaaac

SEQ ID NO: 920 - RNA, 20 nt, synthetic construct
  source 1..20: mol_type = other RNA
ttgatgaacactgatacaaa

SEQ ID NO: 921 - RNA, 20 nt, synthetic construct
  source 1..20: mol_type = other RNA
gtgttcatcaaggatatcag

SEQ ID NO: 922 - RNA, 20 nt, synthetic construct
  source 1..20: mol_type = other RNA
aggatatcagcctgaagttt

SEQ ID NO: 923 - RNA, 20 nt, synthetic construct
  source 1..20: mol_type = other RNA
gcctgaagtttttattgttg

SEQ ID NO: 924 - RNA, 20 nt, synthetic construct
  source 1..20: mol_type = other RNA
tgataccaaaacctgaaaga

SEQ ID NO: 925 - RNA, 20 nt, synthetic construct
  source 1..20: mol_type = other RNA
tcctgataccaaaacctgaa

SEQ ID NO: 926 - RNA, 20 nt, synthetic construct
  source 1..20: mol_type = other RNA
ggatgatgctggcctcatag

SEQ ID NO: 927 - RNA, 20 nt, synthetic construct
  source 1..20: mol_type = other RNA
ggtagaattcagctgtgaat

SEQ ID NO: 928 - RNA, 20 nt, synthetic construct
  source 1..20: mol_type = other RNA
atctggtcctggccttttgt

SEQ ID NO: 929 - RNA, 20 nt, synthetic construct
  source 1..20: mol_type = other RNA
ggtcctggccttttgtttct

SEQ ID NO: 930 - RNA, 20 nt, synthetic construct
  source 1..20: mol_type = other RNA
gtaatgaatagcctactaag

SEQ ID NO: 931 - RNA, 20 nt, synthetic construct
  source 1..20: mol_type = other RNA
ccaaaattgaatcagtaatg

SEQ ID NO: 932 - RNA, 20 nt, synthetic construct
  source 1..20: mol_type = other RNA
ttgtggttctgttcaaggaa

SEQ ID NO: 933 - RNA, 20 nt, synthetic construct
  source 1..20: mol_type = other RNA
atttcttcctggttctgtct

SEQ ID NO: 934 - RNA, 20 nt, synthetic construct
  source 1..20: mol_type = other RNA
agaagagatggataaattac

SEQ ID NO: 935 - RNA, 20 nt, synthetic construct
  source 1..20: mol_type = other RNA
atctcttctagattttctag

SEQ ID NO: 936 - RNA, 20 nt, synthetic construct
  source 1..20: mol_type = other RNA
cttctagattttctagtttg

SEQ ID NO: 937 - RNA, 20 nt, synthetic construct
  source 1..20: mol_type = other RNA
gaaactactacagacagctc

SEQ ID NO: 938 - RNA, 20 nt, synthetic construct
  source 1..20: mol_type = other RNA
cccttgtcatttgtaattgt

SEQ ID NO: 939 - RNA, 20 nt, synthetic construct
  source 1..20: mol_type = other RNA
gtcttattaatgttttcaaa

SEQ ID NO: 940 - RNA, 20 nt, synthetic construct
  source 1..20: mol_type = other RNA
aagagttggttttttgaaaa

SEQ ID NO: 941 - RNA, 20 nt, synthetic construct
  source 1..20: mol_type = other RNA
acaaatccaagagttggttt

SEQ ID NO: 942 - RNA, 20 nt, synthetic construct
  source 1..20: mol_type = other RNA
tttgaatgttttttcatgtc

SEQ ID NO: 943 - RNA, 20 nt, synthetic construct
  source 1..20: mol_type = other RNA
gagttgaaatgaagaaagtc

SEQ ID NO: 944 - RNA, 20 nt, synthetic construct
  source 1..20: mol_type = other RNA
actccaaaactagcagcagg

SEQ ID NO: 945 - RNA, 20 nt, synthetic construct
  source 1..20: mol_type = other RNA
caacttgaagaattagagaa

SEQ ID NO: 946 - RNA, 20 nt, synthetic construct
  source 1..20: mol_type = other RNA
caaagtaagaacctaacatc

SEQ ID NO: 947 - RNA, 20 nt, synthetic construct
  source 1..20: mol_type = other RNA
aaaagaaagatcccaaagta

SEQ ID NO: 948 - RNA, 20 nt, synthetic construct
  source 1..20: mol_type = other RNA
ttctttttgatgtgagcttt

SEQ ID NO: 949 - RNA, 20 nt, synthetic construct
  source 1..20: mol_type = other RNA
ctgggacacagctaaggtag

SEQ ID NO: 950 - RNA, 20 nt, synthetic construct
  source 1..20: mol_type = other RNA
agaagttctttgaaactaaa

SEQ ID NO: 951 - RNA, 20 nt, synthetic construct
  source 1..20: mol_type = other RNA
tcagcaaatgcaaaagaacc

SEQ ID NO: 952 - RNA, 20 nt, synthetic construct
  source 1..20: mol_type = other RNA
accacataattggacataaa

SEQ ID NO: 953 - RNA, 20 nt, synthetic construct
  source 1..20: mol_type = other RNA
catggcacattctctaaaaa

SEQ ID NO: 954 - RNA, 20 nt, synthetic construct
  source 1..20: mol_type = other RNA
gatagacctccacagaactc

SEQ ID NO: 955 - RNA, 20 nt, synthetic construct
  source 1..20: mol_type = other RNA
aatggatctgatagacctcc

SEQ ID NO: 956 - RNA, 20 nt, synthetic construct
  source 1..20: mol_type = other RNA
gatccatttgatccaatgtt

SEQ ID NO: 957 - RNA, 20 nt, synthetic construct
  source 1..20: mol_type = other RNA
atttgatccaatgttgagtt

SEQ ID NO: 958 - RNA, 20 nt, synthetic construct
  source 1..20: mol_type = other RNA
aatgttgagttcaggtcctg

SEQ ID NO: 959 - RNA, 20 nt, synthetic construct
  source 1..20: mol_type = other RNA
ttgaggcagaaaacttacaa

SEQ ID NO: 960 - RNA, 20 nt, synthetic construct
  source 1..20: mol_type = other RNA
ttgtaagttttctgcctcaa

SEQ ID NO: 961 - RNA, 20 nt, synthetic construct
  source 1..20: mol_type = other RNA
gtctaatactgtcagtgaac

SEQ ID NO: 962 - RNA, 20 nt, synthetic construct
  source 1..20: mol_type = other RNA
cagtctctttgtaggtctct

SEQ ID NO: 963 - RNA, 20 nt, synthetic construct
  source 1..20: mol_type = other RNA
aacacaagagcacccagctt

SEQ ID NO: 964 - RNA, 20 nt, synthetic construct
  source 1..20: mol_type = other RNA
taaatatatatgcatccaac

SEQ ID NO: 965 - RNA, 20 nt, synthetic construct
  source 1..20: mol_type = other RNA
taatttcagacaaaacagac

SEQ ID NO: 966 - RNA, 20 nt, synthetic construct
  source 1..20: mol_type = other RNA
gaaaaaagcaggggtggcaa

SEQ ID NO: 967 - RNA, 20 nt, synthetic construct
  source 1..20: mol_type = other RNA
accacgcaaatggaaatcag

SEQ ID NO: 968 - RNA, 20 nt, synthetic construct
  source 1..20: mol_type = other RNA
ctttattttgagcctttggg

SEQ ID NO: 969 - RNA, 20 nt, synthetic construct
  source 1..20: mol_type = other RNA
cacatgtaatgacacccaaa

SEQ ID NO: 970 - RNA, 20 nt, synthetic construct
  source 1..20: mol_type = other RNA
agcttgccactctgtgcctc

SEQ ID NO: 971 - RNA, 20 nt, synthetic construct
  source 1..20: mol_type = other RNA
aattcacacataccaatact

SEQ ID NO: 972 - RNA, 20 nt, synthetic construct
  source 1..20: mol_type = other RNA
gagcatcaaattcacacata

SEQ ID NO: 973 - RNA, 20 nt, synthetic construct
  source 1..20: mol_type = other RNA
tgaaaagagcaccaactata

SEQ ID NO: 974 - RNA, 20 nt, synthetic construct
  source 1..20: mol_type = other RNA
cttgtaaggcaggtctggtg

SEQ ID NO: 975 - RNA, 20 nt, synthetic construct
  source 1..20: mol_type = other RNA
cttttagataagcaaatgtt

SEQ ID NO: 976 - RNA, 20 nt, synthetic construct
  source 1..20: mol_type = other RNA
aaaagggatcttatttctct

SEQ ID NO: 977 - RNA, 20 nt, synthetic construct
  source 1..20: mol_type = other RNA
tatttctctgttgcttagga

SEQ ID NO: 978 - RNA, 20 nt, synthetic construct
  source 1..20: mol_type = other RNA
aaccaaactaagcttcctaa

SEQ ID NO: 979 - RNA, 20 nt, synthetic construct
  source 1..20: mol_type = other RNA
cttctggcttgcagaggttc

SEQ ID NO: 980 - RNA, 20 nt, synthetic construct
  source 1..20: mol_type = other RNA
acctaacagcatacctctca

SEQ ID NO: 981 - RNA, 20 nt, synthetic construct
  source 1..20: mol_type = other RNA
acaaagggaaccccatcaac

SEQ ID NO: 982 - RNA, 20 nt, synthetic construct
  source 1..20: mol_type = other RNA
gcttttccaaggtcaaaatg

SEQ ID NO: 983 - RNA, 20 nt, synthetic construct
  source 1..20: mol_type = other RNA
tcagcttttccaaggtcaaa

SEQ ID NO: 984 - RNA, 20 nt, synthetic construct
  source 1..20: mol_type = other RNA
caagacacataatcatcagc

SEQ ID NO: 985 - RNA, 20 nt, synthetic construct
  source 1..20: mol_type = other RNA
tcccaagacacataatcatc

SEQ ID NO: 986 - RNA, 20 nt, synthetic construct
  source 1..20: mol_type = other RNA
ctgccagattctacacaaga

SEQ ID NO: 987 - RNA, 20 nt, synthetic construct
  source 1..20: mol_type = other RNA
tcttgtgtagaatctggcag

SEQ ID NO: 988 - RNA, 20 nt, synthetic construct
  source 1..20: mol_type = other RNA
ggcagggattctctgtattt

SEQ ID NO: 989 - RNA, 20 nt, synthetic construct
  source 1..20: mol_type = other RNA
tgctagagaggccaacagtc

SEQ ID NO: 990 - RNA, 20 nt, synthetic construct
  source 1..20: mol_type = other RNA
ggaaaacaatttaggatacc

SEQ ID NO: 991 - RNA, 20 nt, synthetic construct
  source 1..20: mol_type = other RNA
taaattgttttccagattgt

SEQ ID NO: 992 - RNA, 20 nt, synthetic construct
  source 1..20: mol_type = other RNA
ctgaaagggatggggagaaa

SEQ ID NO: 993 - RNA, 20 nt, synthetic construct
  source 1..20: mol_type = other RNA
ttggcatctctgaaagggat

SEQ ID NO: 994 - RNA, 20 nt, synthetic construct
  source 1..20: mol_type = other RNA
ctttcagagatgccaatgat

SEQ ID NO: 995 - RNA, 20 nt, synthetic construct
  source 1..20: mol_type = other RNA
acaaatcattggcatctctg

SEQ ID NO: 996 - RNA, 20 nt, synthetic construct
  source 1..20: mol_type = other RNA
gacagttgacaaaaatgaag

SEQ ID NO: 997 - RNA, 20 nt, synthetic construct
  source 1..20: mol_type = other RNA
cagaaatggaagactagctc

SEQ ID NO: 998 - RNA, 20 nt, synthetic construct
  source 1..20: mol_type = other RNA
tttcctcagcttggtctatt

SEQ ID NO: 999 - RNA, 20 nt, synthetic construct
  source 1..20: mol_type = other RNA
aagtattaataggagaatag

SEQ ID NO: 1000 - RNA, 20 nt, synthetic construct
  source 1..20: mol_type = other RNA
gacagagctgagagctgaga

SEQ ID NO: 1001 - RNA, 20 nt, synthetic construct
  source 1..20: mol_type = other RNA
gttaggttctttttttatac

SEQ ID NO: 1002 - RNA, 20 nt, synthetic construct
  source 1..20: mol_type = other RNA
ttcagcctctatattatttt

SEQ ID NO: 1003 - RNA, 20 nt, synthetic construct
  source 1..20: mol_type = other RNA
caataaaataatatagaggc

SEQ ID NO: 1004 - RNA, 20 nt, synthetic construct
  source 1..20: mol_type = other RNA
aattcaaggaaattaaaaat

SEQ ID NO: 1005 - RNA, 20 nt, synthetic construct
  source 1..20: mol_type = other RNA
tgatgatcttcatttgtatc

SEQ ID NO: 1006 - RNA, 20 nt, synthetic construct
  source 1..20: mol_type = other RNA
gtagtctgaattatatttct

SEQ ID NO: 1007 - RNA, 20 nt, synthetic construct
  source 1..20: mol_type = other RNA
acactgcagttaaagaaaca

SEQ ID NO: 1008 - RNA, 20 nt, synthetic construct
  source 1..20: mol_type = other RNA
caccccaaaacttcaacagc

SEQ ID NO: 1009 - RNA, 20 nt, synthetic construct
  source 1..20: mol_type = other RNA
ttaaaataaaaaatggatca

SEQ ID NO: 1010 - RNA, 20 nt, synthetic construct
  source 1..20: mol_type = other RNA
attttttattttaatgattg

SEQ ID NO: 1011 - RNA, 20 nt, synthetic construct
  source 1..20: mol_type = other RNA
aacacccttaagggctgggt

SEQ ID NO: 1012 - RNA, 20 nt, synthetic construct
  source 1..20: mol_type = other RNA
ggctaatttcacataaaaaa

SEQ ID NO: 1013 - RNA, 20 nt, synthetic construct
  source 1..20: mol_type = other RNA
tgtttagaaatacaatctgg

SEQ ID NO: 1014 - RNA, 20 nt, synthetic construct
  source 1..20: mol_type = other RNA
acatgtctaatgtgtgtggg

SEQ ID NO: 1015 - RNA, 20 nt, synthetic construct
  source 1..20: mol_type = other RNA
tagatttggggccatggggc

SEQ ID NO: 1016 - RNA, 20 nt, synthetic construct
  source 1..20: mol_type = other RNA
aggatagtatttggtattgg

SEQ ID NO: 1017 - RNA, 20 nt, synthetic construct
  source 1..20: mol_type = other RNA
accaataccaaatactatcc

SEQ ID NO: 1018 - RNA, 20 nt, synthetic construct
  source 1..20: mol_type = other RNA
tgcacagatgttccctctct

SEQ ID NO: 1019 - RNA, 20 nt, synthetic construct
  source 1..20: mol_type = other RNA
gtgcaggatgtggtatcagc

SEQ ID NO: 1020 - RNA, 20 nt, synthetic construct
  source 1..20: mol_type = other RNA
ctaagatgtagtccaggtgc

SEQ ID NO: 1021 - RNA, 20 nt, synthetic construct
  source 1..20: mol_type = other RNA
gcacctggactacatcttag

SEQ ID NO: 1022 - RNA, 20 nt, synthetic construct
  source 1..20: mol_type = other RNA
tagggattccttcttcattt

SEQ ID NO: 1023 - RNA, 20 nt, synthetic construct
  source 1..20: mol_type = other RNA
atcagacttacccccttgac

SEQ ID NO: 1024 - RNA, 20 nt, synthetic construct
  source 1..20: mol_type = other RNA
gacttacccccttgaccact

SEQ ID NO: 1025 - RNA, 20 nt, synthetic construct
  source 1..20: mol_type = other RNA
caaaacagtcttagtgttcc

SEQ ID NO: 1026 - RNA, 20 nt, synthetic construct
  source 1..20: mol_type = other RNA
ctgcctgactttctcagagg

SEQ ID NO: 1027 - RNA, 20 nt, synthetic construct
  source 1..20: mol_type = other RNA
gccttttgcataagctgtca

SEQ ID NO: 1028 - RNA, 20 nt, synthetic construct
  source 1..20: mol_type = other RNA
agaccagtggtttttaacct

SEQ ID NO: 1029 - RNA, 20 nt, synthetic construct
  source 1..20: mol_type = other RNA
agaaaccaaggaggatgaca

SEQ ID NO: 1030 - RNA, 20 nt, synthetic construct
  source 1..20: mol_type = other RNA
tccttggtttcttgatcccc

SEQ ID NO: 1031 - RNA, 20 nt, synthetic construct
  source 1..20: mol_type = other RNA
ccctttctgcactcctgagt

SEQ ID NO: 1032 - RNA, 20 nt, synthetic construct
  source 1..20: mol_type = other RNA
aagtcttagaggtttgcagc

SEQ ID NO: 1033 - RNA, 20 nt, synthetic construct
  source 1..20: mol_type = other RNA
tgcaccttctctgagcctca

SEQ ID NO: 1034 - RNA, 20 nt, synthetic construct
  source 1..20: mol_type = other RNA
atgagagttcatgacttttc

SEQ ID NO: 1035 - RNA, 20 nt, synthetic construct
  source 1..20: mol_type = other RNA
agtgtcgagcacgtgctacg

SEQ ID NO: 1036 - RNA, 20 nt, synthetic construct
  source 1..20: mol_type = other RNA
tggcagctcctactaatata

SEQ ID NO: 1037 - RNA, 20 nt, synthetic construct
  source 1..20: mol_type = other RNA
aacatgactctttcttgcaa

SEQ ID NO: 1038 - RNA, 20 nt, synthetic construct
  source 1..20: mol_type = other RNA
taagttggattttctgtcac

SEQ ID NO: 1039 - RNA, 20 nt, synthetic construct
  source 1..20: mol_type = other RNA
atcttaagttggattttctg

SEQ ID NO: 1040 - RNA, 20 nt, synthetic construct
  source 1..20: mol_type = other RNA
aacttaagatggattaagca

SEQ ID NO: 1041 - RNA, 20 nt, synthetic construct
  source 1..20: mol_type = other RNA
tgtgagcctaaagacttttc

SEQ ID NO: 1042 - RNA, 20 nt, synthetic construct
  source 1..20: mol_type = other RNA
cacctttgtgcccaaggatg

SEQ ID NO: 1043 - RNA, 20 nt, synthetic construct
  source 1..20: mol_type = other RNA
tccttgggcacaaaggtgag

SEQ ID NO: 1044 - RNA, 20 nt, synthetic construct
  source 1..20: mol_type = other RNA
ttgggcacaaaggtgagatt

SEQ ID NO: 1045 - RNA, 20 nt, synthetic construct
  source 1..20: mol_type = other RNA
gccaccacaagaatctcacc

SEQ ID NO: 1046 - RNA, 20 nt, synthetic construct
  source 1..20: mol_type = other RNA
gtgatgggttcagggacagg

SEQ ID NO: 1047 - RNA, 20 nt, synthetic construct
  source 1..20: mol_type = other RNA
ctgattggctccaacctgca

SEQ ID NO: 1048 - RNA, 20 nt, synthetic construct
  source 1..20: mol_type = other RNA
gctattacatgctagaggtg

SEQ ID NO: 1049 - RNA, 20 nt, synthetic construct
  source 1..20: mol_type = other RNA
accctttgcccttctgggta

SEQ ID NO: 1050 - RNA, 20 nt, synthetic construct
  source 1..20: mol_type = other RNA
tgttgagggatccacccttt

SEQ ID NO: 1051 - RNA, 20 nt, synthetic construct
  source 1..20: mol_type = other RNA
cataatcctgttgagggatc

SEQ ID NO: 1052 - RNA, 20 nt, synthetic construct
  source 1..20: mol_type = other RNA
ctcaacaggattatgggatg

SEQ ID NO: 1053 - RNA, 20 nt, synthetic construct
  source 1..20: mol_type = other RNA
ccctacatcccataatcctg

SEQ ID NO: 1054 - RNA, 20 nt, synthetic construct
  source 1..20: mol_type = other RNA
gtttgctttctggctgccca

SEQ ID NO: 1055 - RNA, 20 nt, synthetic construct
  source 1..20: mol_type = other RNA
gttgaggtattggagaggat

SEQ ID NO: 1056 - RNA, 20 nt, synthetic construct
  source 1..20: mol_type = other RNA
tctccaatacctcaactgat

SEQ ID NO: 1057 - RNA, 20 nt, synthetic construct
  source 1..20: mol_type = other RNA
ttatgattttagcttggtgc

SEQ ID NO: 1058 - RNA, 20 nt, synthetic construct
  source 1..20: mol_type = other RNA
taaggatctgggtgtgaatt

SEQ ID NO: 1059 - RNA, 20 nt, synthetic construct
  source 1..20: mol_type = other RNA
gggtgtgaattctggctcta

SEQ ID NO: 1060 - RNA, 20 nt, synthetic construct
  source 1..20: mol_type = other RNA
tccatgtgacattgggcagt

SEQ ID NO: 1061 - RNA, 20 nt, synthetic construct
  source 1..20: mol_type = other RNA
cttttagccttggctttctt

SEQ ID NO: 1062 - RNA, 20 nt, synthetic construct
  source 1..20: mol_type = other RNA
ccttatatgttagtacaggt

SEQ ID NO: 1063 - RNA, 20 nt, synthetic construct
  source 1..20: mol_type = other RNA
caatcaccttatatgttagt

SEQ ID NO: 1064 - RNA, 20 nt, synthetic construct
  source 1..20: mol_type = other RNA
tcatcgtcaacatcatcatc

SEQ ID NO: 1065 - RNA, 20 nt, synthetic construct
  source 1..20: mol_type = other RNA
tcgtcaacatcatcatcacc

SEQ ID NO: 1066 - RNA, 20 nt, synthetic construct
  source 1..20: mol_type = other RNA
tcaacatcatcatcaccatc

SEQ ID NO: 1067 - RNA, 20 nt, synthetic construct
  source 1..20: mol_type = other RNA
tcatcaccatccacattgcc

SEQ ID NO: 1068 - RNA, 20 nt, synthetic construct
  source 1..20: mol_type = other RNA
tcaccatccacattgccacc

SEQ ID NO: 1069 - RNA, 20 nt, synthetic construct
  source 1..20: mol_type = other RNA
ccatccacattgccaccacc

SEQ ID NO: 1070 - RNA, 20 nt, synthetic construct
  source 1..20: mol_type = other RNA
acattgccaccaccactccc

SEQ ID NO: 1071 - RNA, 20 nt, synthetic construct
  source 1..20: mol_type = other RNA
tcttcatcaacatcatcacc

SEQ ID NO: 1072 - RNA, 20 nt, synthetic construct
  source 1..20: mol_type = other RNA
tcatcaacatcatcaccacc

SEQ ID NO: 1073 - RNA, 20 nt, synthetic construct
  source 1..20: mol_type = other RNA
acatcatcaccaccgccacc

SEQ ID NO: 1074 - RNA, 20 nt, synthetic construct
  source 1..20: mol_type = other RNA
tcaccaccgccaccatcacc

SEQ ID NO: 1075 - RNA, 20 nt, synthetic construct
  source 1..20: mol_type = other RNA
ccaccgccaccatcaccatt

SEQ ID NO: 1076 - RNA, 20 nt, synthetic construct
  source 1..20: mol_type = other RNA
ccattatcattaccaccacc

SEQ ID NO: 1077 - RNA, 20 nt, synthetic construct
  source 1..20: mol_type = other RNA
ttaccaccaccgctatcact

SEQ ID NO: 1078 - RNA, 20 nt, synthetic construct
  source 1..20: mol_type = other RNA
ctattatcatcaccctcaac

SEQ ID NO: 1079 - RNA, 20 nt, synthetic construct
  source 1..20: mol_type = other RNA
tcaccctcaacatcatcacc

SEQ ID NO: 1080 - RNA, 20 nt, synthetic construct
  source 1..20: mol_type = other RNA
ccctcaacatcatcaccatc

SEQ ID NO: 1081 - RNA, 20 nt, synthetic construct
  source 1..20: mol_type = other RNA
tcaccatcatcactatcatc

SEQ ID NO: 1082 - RNA, 20 nt, synthetic construct
  source 1..20: mol_type = other RNA
ccatcatcactatcatcacc

SEQ ID NO: 1083 - RNA, 20 nt, synthetic construct
  source 1..20: mol_type = other RNA
tcactatcatcaccaccacc

SEQ ID NO: 1084 - RNA, 20 nt, synthetic construct
  source 1..20: mol_type = other RNA
ctatcatcaccaccaccatc

SEQ ID NO: 1085 - RNA, 20 nt, synthetic construct
  source 1..20: mol_type = other RNA
tcaccaccaccatcatcgtt

SEQ ID NO: 1086 - RNA, 20 nt, synthetic construct
  source 1..20: mol_type = other RNA
ccaccaccatcatcgttact

SEQ ID NO: 1087 - RNA, 20 nt, synthetic construct
  source 1..20: mol_type = other RNA
tcgttactaccactaccacc

SEQ ID NO: 1088 - RNA, 20 nt, synthetic construct
  source 1..20: mol_type = other RNA
ttactaccactaccaccacc

SEQ ID NO: 1089 - RNA, 20 nt, synthetic construct
  source 1..20: mol_type = other RNA
tcaccacagccaccaccacc

SEQ ID NO: 1090 - RNA, 20 nt, synthetic construct
  source 1..20: mol_type = other RNA
ccacagccaccaccaccatc

SEQ ID NO: 1091 - RNA, 20 nt, synthetic construct
  source 1..20: mol_type = other RNA
ccatcattactactcagcac

SEQ ID NO: 1092 - RNA, 20 nt, synthetic construct
  source 1..20: mol_type = other RNA
ttactactcagcaccaccat

SEQ ID NO: 1093 - RNA, 20 nt, synthetic construct
  source 1..20: mol_type = other RNA
tcattccaccaccatcacca

SEQ ID NO: 1094 - RNA, 20 nt, synthetic construct
  source 1..20: mol_type = other RNA
ttccaccaccatcaccatca

SEQ ID NO: 1095 - RNA, 20 nt, synthetic construct
  source 1..20: mol_type = other RNA
ccatcattccaccatcacca

SEQ ID NO: 1096 - RNA, 20 nt, synthetic construct
  source 1..20: mol_type = other RNA
ttccaccatcaccattatca

SEQ ID NO: 1097 - RNA, 20 nt, synthetic construct
  source 1..20: mol_type = other RNA
ccattatcattaccaccacc

SEQ ID NO: 1098 - RNA, 20 nt, synthetic construct
  source 1..20: mol_type = other RNA
ttaccaccaccactgtcact

SEQ ID NO: 1099 - RNA, 20 nt, synthetic construct
  source 1..20: mol_type = other RNA
tcaccctcaacatcatcacc

SEQ ID NO: 1100 - RNA, 20 nt, synthetic construct
  source 1..20: mol_type = other RNA
ccctcaacatcatcaccacc

SEQ ID NO: 1101 - RNA, 20 nt, synthetic construct
  source 1..20: mol_type = other RNA
tcaccaccaccatcatcatt

SEQ ID NO: 1102 - RNA, 20 nt, synthetic construct
  source 1..20: mol_type = other RNA
ccaccaccatcatcattact

SEQ ID NO: 1103 - RNA, 20 nt, synthetic construct
  source 1..20: mol_type = other RNA
tcattactaccaccaccacc

SEQ ID NO: 1104 - RNA, 20 nt, synthetic construct
  source 1..20: mol_type = other RNA
ttactaccaccaccaccacc

SEQ ID NO: 1105 - RNA, 20 nt, synthetic construct
  source 1..20: mol_type = other RNA
ccatcatcatcattctacca

SEQ ID NO: 1106 - RNA, 20 nt, synthetic construct
  source 1..20: mol_type = other RNA
tcatcattctaccaccatca

SEQ ID NO: 1107 - RNA, 20 nt, synthetic construct
  source 1..20: mol_type = other RNA
tcattctaccaccatcacca

SEQ ID NO: 1108 - RNA, 20 nt, synthetic construct
  source 1..20: mol_type = other RNA
ttctaccaccatcaccatta

SEQ ID NO: 1109 - RNA, 20 nt, synthetic construct
  source 1..20: mol_type = other RNA
ccattatcatcaccatcacc

SEQ ID NO: 1110 - RNA, 20 nt, synthetic construct
  source 1..20: mol_type = other RNA
tcaccatcaccatcaccacc

SEQ ID NO: 1111 - RNA, 20 nt, synthetic construct
  source 1..20: mol_type = other RNA
ccatcaccatcaccaccgct

SEQ ID NO: 1112 - RNA, 20 nt, synthetic construct
  source 1..20: mol_type = other RNA
ccatcaccaccgctatcatc

SEQ ID NO: 1113 - RNA, 20 nt, synthetic construct
  source 1..20: mol_type = other RNA
tgatgatagcggtggtgatg

SEQ ID NO: 1114 - RNA, 20 nt, synthetic construct
  source 1..20: mol_type = other RNA
ccaccgctatcatcatgata

SEQ ID NO: 1115 - RNA, 20 nt, synthetic construct
  source 1..20: mol_type = other RNA
tcatgataatcattatcatt

SEQ ID NO: 1116 - RNA, 20 nt, synthetic construct
  source 1..20: mol_type = other RNA
tgataatcattatcattacc

SEQ ID NO: 1117 - RNA, 20 nt, synthetic construct
  source 1..20: mol_type = other RNA
ttatcattaccaccaccatt

SEQ ID NO: 1118 - RNA, 20 nt, synthetic construct
  source 1..20: mol_type = other RNA
ttaccaccaccattagcatt

SEQ ID NO: 1119 - RNA, 20 nt, synthetic construct
  source 1..20: mol_type = other RNA
ttaccaccaccatcactatc

SEQ ID NO: 1120 - RNA, 20 nt, synthetic construct
  source 1..20: mol_type = other RNA
ctatcactatcaccatcacc

SEQ ID NO: 1121 - RNA, 20 nt, synthetic construct
  source 1..20: mol_type = other RNA
ctatcaccatcaccacgacc

SEQ ID NO: 1122 - RNA, 20 nt, synthetic construct
  source 1..20: mol_type = other RNA
ccatcaccacgaccactacc

SEQ ID NO: 1123 - RNA, 20 nt, synthetic construct
  source 1..20: mol_type = other RNA
ccacgaccactaccaccatc

SEQ ID NO: 1124 - RNA, 20 nt, synthetic construct
  source 1..20: mol_type = other RNA
ccaacaccatcattactacc

SEQ ID NO: 1125 - RNA, 20 nt, synthetic construct
  source 1..20: mol_type = other RNA
ttactacccaccaccaccat

SEQ ID NO: 1126 - RNA, 20 nt, synthetic construct
  source 1..20: mol_type = other RNA
tcatcattccaccaccatca

SEQ ID NO: 1127 - RNA, 20 nt, synthetic construct
  source 1..20: mol_type = other RNA
tcattccaccaccatcacaa

SEQ ID NO: 1128 - RNA, 20 nt, synthetic construct
  source 1..20: mol_type = other RNA
ttccaccaccatcacaatta

SEQ ID NO: 1129 - RNA, 20 nt, synthetic construct
  source 1..20: mol_type = other RNA
caattattaccaccaccacc

SEQ ID NO: 1130 - RNA, 20 nt, synthetic construct
  source 1..20: mol_type = other RNA
ccaccaccaccaccatcact

SEQ ID NO: 1131 - RNA, 20 nt, synthetic construct
  source 1..20: mol_type = other RNA
ctatcatcatcagtagacat

SEQ ID NO: 1132 - RNA, 20 nt, synthetic construct
  source 1..20: mol_type = other RNA
tcatcagtagacatcatata

SEQ ID NO: 1133 - RNA, 20 nt, synthetic construct
  source 1..20: mol_type = other RNA
tcagtagacatcatataacc

SEQ ID NO: 1134 - RNA, 20 nt, synthetic construct
  source 1..20: mol_type = other RNA
gtagacatcatataaccagt

SEQ ID NO: 1135 - RNA, 20 nt, synthetic construct
  source 1..20: mol_type = other RNA
tataaccagtttgtagctgg

SEQ ID NO: 1136 - RNA, 20 nt, synthetic construct
  source 1..20: mol_type = other RNA
acacatttctaaccaccatc

SEQ ID NO: 1137 - RNA, 20 nt, synthetic construct
  source 1..20: mol_type = other RNA
cccactaggcttctgcctcg

SEQ ID NO: 1138 - RNA, 20 nt, synthetic construct
  source 1..20: mol_type = other RNA
ttttctcagtggacctgcag

SEQ ID NO: 1139 - RNA, 20 nt, synthetic construct
  source 1..20: mol_type = other RNA
attttctacatgtcaataat

SEQ ID NO: 1140 - RNA, 20 nt, synthetic construct
  source 1..20: mol_type = other RNA
ggtcaattggcgttctcagc

SEQ ID NO: 1141 - RNA, 20 nt, synthetic construct
  source 1..20: mol_type = other RNA
aagtcagggaacacctggaa

SEQ ID NO: 1142 - RNA, 20 nt, synthetic construct
  source 1..20: mol_type = other RNA
aatgcagagtttggaggtgt

SEQ ID NO: 1143 - RNA, 20 nt, synthetic construct
  source 1..20: mol_type = other RNA
ccttggcctcaacacctcca

SEQ ID NO: 1144 - RNA, 20 nt, synthetic construct
  source 1..20: mol_type = other RNA
gtccattgattgtggatgac

SEQ ID NO: 1145 - RNA, 20 nt, synthetic construct
  source 1..20: mol_type = other RNA
acaatcaatggactgatcct

SEQ ID NO: 1146 - RNA, 20 nt, synthetic construct
  source 1..20: mol_type = other RNA
ggatgtttgccttgctcaaa

SEQ ID NO: 1147 - RNA, 20 nt, synthetic construct
  source 1..20: mol_type = other RNA
tccatgctgctcatgtcaac

SEQ ID NO: 1148 - RNA, 20 nt, synthetic construct
  source 1..20: mol_type = other RNA
ggagttgacatgagcagcat

SEQ ID NO: 1149 - RNA, 20 nt, synthetic construct
  source 1..20: mol_type = other RNA
ttgactttggttcagaaacc

SEQ ID NO: 1150 - RNA, 20 nt, synthetic construct
  source 1..20: mol_type = other RNA
aagtgcagtcaaaggctctg

SEQ ID NO: 1151 - RNA, 20 nt, synthetic construct
  source 1..20: mol_type = other RNA
cttgcctgtgccatgctcgc

SEQ ID NO: 1152 - RNA, 20 nt, synthetic construct
  source 1..20: mol_type = other RNA
ttgctttgcgagcatggcac

SEQ ID NO: 1153 - RNA, 20 nt, synthetic construct
  source 1..20: mol_type = other RNA
agttttctaattttgcaagc

SEQ ID NO: 1154 - RNA, 20 nt, synthetic construct
  source 1..20: mol_type = other RNA
ctgggtgtgtccatctggaa

SEQ ID NO: 1155 - RNA, 20 nt, synthetic construct
  source 1..20: mol_type = other RNA
ggaaaaacagcatttcctct

SEQ ID NO: 1156 - RNA, 20 nt, synthetic construct
  source 1..20: mol_type = other RNA
tcactctcccaaattgtcaa

SEQ ID NO: 1157 - RNA, 20 nt, synthetic construct
  source 1..20: mol_type = other RNA
aacaggttgaaattgtcctg

SEQ ID NO: 1158 - RNA, 20 nt, synthetic construct
  source 1..20: mol_type = other RNA
ggacaatttcaacctgttag

SEQ ID NO: 1159 - RNA, 20 nt, synthetic construct
  source 1..20: mol_type = other RNA
cttcaccacacttgtatgag

SEQ ID NO: 1160 - RNA, 20 nt, synthetic construct
  source 1..20: mol_type = other RNA
ttgttcataaagttcattct

SEQ ID NO: 1161 - RNA, 20 nt, synthetic construct
  source 1..20: mol_type = other RNA
ctcctgctctacagttaagg

SEQ ID NO: 1162 - RNA, 20 nt, synthetic construct
  source 1..20: mol_type = other RNA
tcacaacagtcctatgaaac

SEQ ID NO: 1163 - RNA, 20 nt, synthetic construct
  source 1..20: mol_type = other RNA
cacttcatcctcacaacagt

SEQ ID NO: 1164 - RNA, 20 nt, synthetic construct
  source 1..20: mol_type = other RNA
tttccaggcacaagcttata

SEQ ID NO: 1165 - RNA, 20 nt, synthetic construct
  source 1..20: mol_type = other RNA
tttactaagcattatccttt

SEQ ID NO: 1166 - RNA, 20 nt, synthetic construct
  source 1..20: mol_type = other RNA
tcatatttccagaatatttt

SEQ ID NO: 1167 - RNA, 20 nt, synthetic construct
  source 1..20: mol_type = other RNA
tatttccagaatattttcct

SEQ ID NO: 1168 - RNA, 20 nt, synthetic construct
  source 1..20: mol_type = other RNA
ccaaaggaaacctcatgctc

SEQ ID NO: 1169 - RNA, 20 nt, synthetic construct
  source 1..20: mol_type = other RNA
gtagctctcctttaaaatat

SEQ ID NO: 1170 - RNA, 20 nt, synthetic construct
  source 1..20: mol_type = other RNA
tcataactaatattttaaag

SEQ ID NO: 1171 - RNA, 20 nt, synthetic construct
  source 1..20: mol_type = other RNA
tagcactatacaaaactcat

SEQ ID NO: 1172 - RNA, 20 nt, synthetic construct
  source 1..20: mol_type = other RNA
caaaatttcacaccctgatt

SEQ ID NO: 1173 - RNA, 20 nt, synthetic construct
  source 1..20: mol_type = other RNA
tatcacaaaatttcacaccc

SEQ ID NO: 1174 - RNA, 20 nt, synthetic construct
  source 1..20: mol_type = other RNA
gggtgtgaaattttgtgata

SEQ ID NO: 1175 - RNA, 20 nt, synthetic construct
  source 1..20: mol_type = other RNA
gagctttgtcatggtgcttt

SEQ ID NO: 1176 - RNA, 20 nt, synthetic construct
  source 1..20: mol_type = other RNA
aggtttttggaacatagact

SEQ ID NO: 1177 - RNA, 20 nt, synthetic construct
  source 1..20: mol_type = other RNA
ccactgctctgttcttctgg

SEQ ID NO: 1178 - RNA, 20 nt, synthetic construct
  source 1..20: mol_type = other RNA
ttttaaacacaggtaccttt

SEQ ID NO: 1179 - RNA, 20 nt, synthetic construct
  source 1..20: mol_type = other RNA
cagggagctgggcttccttg

SEQ ID NO: 1180 - RNA, 20 nt, synthetic construct
  source 1..20: mol_type = other RNA
ctatgagtttctgaatggaa

SEQ ID NO: 1181 - RNA, 20 nt, synthetic construct
  source 1..20: mol_type = other RNA
actgagctctgtgctgggca

SEQ ID NO: 1182 - RNA, 20 nt, synthetic construct
  source 1..20: mol_type = other RNA
tttcttaccttgcaactgtc

SEQ ID NO: 1183 - RNA, 20 nt, synthetic construct
  source 1..20: mol_type = other RNA
agagaccaaagttagtcttg

SEQ ID NO: 1184 - RNA, 20 nt, synthetic construct
  source 1..20: mol_type = other RNA
tacttgaattcgctactttg

SEQ ID NO: 1185 - RNA, 20 nt, synthetic construct
  source 1..20: mol_type = other RNA
atggaagaccccagtctaag

SEQ ID NO: 1186 - RNA, 20 nt, synthetic construct
  source 1..20: mol_type = other RNA
agggagtttctgagcaacac

SEQ ID NO: 1187 - RNA, 20 nt, synthetic construct
  source 1..20: mol_type = other RNA
gaatatacatttgggacaga

SEQ ID NO: 1188 - RNA, 20 nt, synthetic construct
  source 1..20: mol_type = other RNA
gtcccaaatgtatattcaga

SEQ ID NO: 1189 - RNA, 20 nt, synthetic construct
  source 1..20: mol_type = other RNA
tccaaggggacttcttgggg

SEQ ID NO: 1190 - RNA, 20 nt, synthetic construct
  source 1..20: mol_type = other RNA
aaggggacttcttggggctt

SEQ ID NO: 1191 - RNA, 20 nt, synthetic construct
  source 1..20: mol_type = other RNA
ggaactcaagccccaagaag

SEQ ID NO: 1192 - RNA, 20 nt, synthetic construct
  source 1..20: mol_type = other RNA
gcagcaagggagccataagt

SEQ ID NO: 1193 - RNA, 20 nt, synthetic construct
  source 1..20: mol_type = other RNA
ccactttagtccctggccac

SEQ ID NO: 1194 - RNA, 20 nt, synthetic construct
  source 1..20: mol_type = other RNA
gagctccagtctcagatatt

SEQ ID NO: 1195 - RNA, 20 nt, synthetic construct
  source 1..20: mol_type = other RNA
gagactggagctcagatatt

SEQ ID NO: 1196 - RNA, 20 nt, synthetic construct
  source 1..20: mol_type = other RNA
gcaatatctgagctccagtc

SEQ ID NO: 1197 - RNA, 20 nt, synthetic construct
  source 1..20: mol_type = other RNA
tcagcaatatctgagctcca

SEQ ID NO: 1198 - RNA, 20 nt, synthetic construct
  source 1..20: mol_type = other RNA
gagttggcgtgtctccccaa

SEQ ID NO: 1199 - RNA, 20 nt, synthetic construct
  source 1..20: mol_type = other RNA
attggggagacacgccaact

SEQ ID NO: 1200 - RNA, 20 nt, synthetic construct
  source 1..20: mol_type = other RNA
aagccccagttgtaaatcaa

SEQ ID NO: 1201 - RNA, 20 nt, synthetic construct
  source 1..20: mol_type = other RNA
tgacacaaccactgacgtga

SEQ ID NO: 1202 - RNA, 20 nt, synthetic construct
  source 1..20: mol_type = other RNA
ctagtgtagtcacgtcagtg

SEQ ID NO: 1203 - RNA, 20 nt, synthetic construct
  source 1..20: mol_type = other RNA
tacattttcgttctcatgaa

SEQ ID NO: 1204 - RNA, 20 nt, synthetic construct
  source 1..20: mol_type = other RNA
ttccgcaaatgaattcatgg

SEQ ID NO: 1205 - RNA, 20 nt, synthetic construct
  source 1..20: mol_type = other RNA
atctttccgcaaatgaattc

SEQ ID NO: 1206 - RNA, 20 nt, synthetic construct
  source 1..20: mol_type = other RNA
cgtcagtgcacttcaaccgg

SEQ ID NO: 1207 - RNA, 20 nt, synthetic construct
  source 1..20: mol_type = other RNA
cagctactagggaggctgga

SEQ ID NO: 1208 - RNA, 20 nt, synthetic construct
  source 1..20: mol_type = other RNA
ctactaaaaatacaaaaatt

SEQ ID NO: 1209 - RNA, 20 nt, synthetic construct
  source 1..20: mol_type = other RNA
caaggtcaggagtttgagac

SEQ ID NO: 1210 - RNA, 20 nt, synthetic construct
  source 1..20: mol_type = other RNA
acctgtcttggcctcccaaa

SEQ ID NO: 1211 - RNA, 20 nt, synthetic construct
  source 1..20: mol_type = other RNA
cagcactttgggaggccaag

SEQ ID NO: 1212 - RNA, 20 nt, synthetic construct
  source 1..20: mol_type = other RNA
ttcctattctagtagttgtg

SEQ ID NO: 1213 - RNA, 20 nt, synthetic construct
  source 1..20: mol_type = other RNA
atccttcctattctagtagt

SEQ ID NO: 1214 - RNA, 20 nt, synthetic construct
  source 1..20: mol_type = other RNA
cctgtgttcaagcaattcta

SEQ ID NO: 1215 - RNA, 20 nt, synthetic construct
  source 1..20: mol_type = other RNA
cagctactaagtaggctgag

SEQ ID NO: 1216 - RNA, 20 nt, synthetic construct
  source 1..20: mol_type = other RNA
cctgaggccaggagtttgag

SEQ ID NO: 1217 - RNA, 20 nt, synthetic construct
  source 1..20: mol_type = other RNA
atctgccgtggcctcccaaa

SEQ ID NO: 1218 - RNA, 20 nt, synthetic construct
  source 1..20: mol_type = other RNA
gccgtggcctcccaaaatgc

SEQ ID NO: 1219 - RNA, 20 nt, synthetic construct
  source 1..20: mol_type = other RNA
cagcattttgggaggccacg

SEQ ID NO: 1220 - RNA, 20 nt, synthetic construct
  source 1..20: mol_type = other RNA
tataacataatttataatta

SEQ ID NO: 1221 - RNA, 20 nt, synthetic construct
  source 1..20: mol_type = other RNA
tcaaaatttatttattccta

SEQ ID NO: 1222 - RNA, 20 nt, synthetic construct
  source 1..20: mol_type = other RNA
tttattatcttcaaaattta

SEQ ID NO: 1223 - RNA, 20 nt, synthetic construct
  source 1..20: mol_type = other RNA
gctgcacccctgggtagcga

SEQ ID NO: 1224 - RNA, 20 nt, synthetic construct
  source 1..20: mol_type = other RNA
atagcctccctcaagctttc

SEQ ID NO: 1225 - RNA, 20 nt, synthetic construct
  source 1..20: mol_type = other RNA
aaaagaaagagaatgaaaga

SEQ ID NO: 1226 - RNA, 20 nt, synthetic construct
  source 1..20: mol_type = other RNA
ttaacttaatttgactatct

SEQ ID NO: 1227 - RNA, 20 nt, synthetic construct
  source 1..20: mol_type = other RNA
ggtttgtgggtgcgtttact

SEQ ID NO: 1228 - RNA, 20 nt, synthetic construct
  source 1..20: mol_type = other RNA
caggacattgttgacttaca

SEQ ID NO: 1229 - RNA, 20 nt, synthetic construct
  source 1..20: mol_type = other RNA
ggtaagacatagttttttta

SEQ ID NO: 1230 - RNA, 20 nt, synthetic construct
  source 1..20: mol_type = other RNA
aaaattaaatgaattgcaca

SEQ ID NO: 1231 - RNA, 20 nt, synthetic construct
  source 1..20: mol_type = other RNA
tatacaagattttgaactgg

SEQ ID NO: 1232 - RNA, 20 nt, synthetic construct
  source 1..20: mol_type = other RNA
tgtatatgattgaaaaattc

SEQ ID NO: 1233 - RNA, 20 nt, synthetic construct
  source 1..20: mol_type = other RNA
accattattttttctgccca

SEQ ID NO: 1234 - RNA, 20 nt, synthetic construct
  source 1..20: mol_type = other RNA
tgtaggcacactcttttaga

SEQ ID NO: 1235 - RNA, 20 nt, synthetic construct
  source 1..20: mol_type = other RNA
aaaagagtgtgcctacatga

SEQ ID NO: 1236 - RNA, 20 nt, synthetic construct
  source 1..20: mol_type = other RNA
tttgcatagttagctacaat

SEQ ID NO: 1237 - RNA, 20 nt, synthetic construct
  source 1..20: mol_type = other RNA
tctctgttcaggtgccatgc

SEQ ID NO: 1238 - RNA, 20 nt, synthetic construct
  source 1..20: mol_type = other RNA
ctgttcaggtgccatgctcc

SEQ ID NO: 1239 - RNA, 20 nt, synthetic construct
  source 1..20: mol_type = other RNA
gtatacatttgcttcttatc

SEQ ID NO: 1240 - RNA, 20 nt, synthetic construct
  source 1..20: mol_type = other RNA
ctggagaaattatacacatc

SEQ ID NO: 1241 - RNA, 20 nt, synthetic construct
  source 1..20: mol_type = other RNA
ggcaaatggatgtgtataat

SEQ ID NO: 1242 - RNA, 20 nt, synthetic construct
  source 1..20: mol_type = other RNA
tctggcaaatggatgtgtat

SEQ ID NO: 1243 - RNA, 20 nt, synthetic construct
  source 1..20: mol_type = other RNA
atttgccagatgatatacgc

SEQ ID NO: 1244 - RNA, 20 nt, synthetic construct
  source 1..20: mol_type = other RNA
ttatatgcgtatatcatctg

SEQ ID NO: 1245 - RNA, 20 nt, synthetic construct
  source 1..20: mol_type = other RNA
cacacggtgtgtatgtgtgt

SEQ ID NO: 1246 - RNA, 20 nt, synthetic construct
  source 1..20: mol_type = other RNA
ccattttataaacaaagaaa

SEQ ID NO: 1247 - RNA, 20 nt, synthetic construct
  source 1..20: mol_type = other RNA
agacttaggaaaatcatgtt

SEQ ID NO: 1248 - RNA, 20 nt, synthetic construct
  source 1..20: mol_type = other RNA
tgttatttgtctcgtgacca

SEQ ID NO: 1249 - RNA, 20 nt, synthetic construct
  source 1..20: mol_type = other RNA
aggtttctttatttccttga

SEQ ID NO: 1250 - RNA, 20 nt, synthetic construct
  source 1..20: mol_type = other RNA
aggaaataaagaaacctgga

SEQ ID NO: 1251 - RNA, 20 nt, synthetic construct
  source 1..20: mol_type = other RNA
ggcttaaatccaggtttctt

SEQ ID NO: 1252 - RNA, 20 nt, synthetic construct
  source 1..20: mol_type = other RNA
agggctcttctcactttttc

SEQ ID NO: 1253 - RNA, 20 nt, synthetic construct
  source 1..20: mol_type = other RNA
ttgttccaacatttgaaaaa

SEQ ID NO: 1254 - RNA, 20 nt, synthetic construct
  source 1..20: mol_type = other RNA
aaacacattccaatgtaact

SEQ ID NO: 1255 - RNA, 20 nt, synthetic construct
  source 1..20: mol_type = other RNA
aattaagaagagagaagtct

SEQ ID NO: 1256 - RNA, 20 nt, synthetic construct
  source 1..20: mol_type = other RNA
ctttctttataccagacttc

SEQ ID NO: 1257 - RNA, 20 nt, synthetic construct
  source 1..20: mol_type = other RNA
ttgctcgcctcctctgttgc

SEQ ID NO: 1258 - RNA, 20 nt, synthetic construct
  source 1..20: mol_type = other RNA
accaggtagttgagcagttg

SEQ ID NO: 1259 - RNA, 20 nt, synthetic construct
  source 1..20: mol_type = other RNA
ctggagggtgagagttttgt

SEQ ID NO: 1260 - RNA, 20 nt, synthetic construct
  source 1..20: mol_type = other RNA
cctgtgaactcaggagttcc

SEQ ID NO: 1261 - RNA, 20 nt, synthetic construct
  source 1..20: mol_type = other RNA
aactatgtatgtgcttcaag

SEQ ID NO: 1262 - RNA, 20 nt, synthetic construct
  source 1..20: mol_type = other RNA
tgaagcacatacatagttag

SEQ ID NO: 1263 - RNA, 20 nt, synthetic construct
  source 1..20: mol_type = other RNA
gactctccctgcagggcaag

SEQ ID NO: 1264 - RNA, 20 nt, synthetic construct
  source 1..20: mol_type = other RNA
acctccctttcatcagactc

SEQ ID NO: 1265 - RNA, 20 nt, synthetic construct
  source 1..20: mol_type = other RNA
ggtaatttatagattaaatt

SEQ ID NO: 1266 - RNA, 20 nt, synthetic construct
  source 1..20: mol_type = other RNA
ataaattaccagataaaatt

SEQ ID NO: 1267 - RNA, 20 nt, synthetic construct
  source 1..20: mol_type = other RNA
aagaaaatacagagcaggag

SEQ ID NO: 1268 - RNA, 20 nt, synthetic construct
  source 1..20: mol_type = other RNA
tctcctgctctgtattttct

SEQ ID NO: 1269 - RNA, 20 nt, synthetic construct
  source 1..20: mol_type = other RNA
cctgcactccctacacacac

SEQ ID NO: 1270 - RNA, 20 nt, synthetic construct
  source 1..20: mol_type = other RNA
ctgtgaacttattcagcagg

SEQ ID NO: 1271 - RNA, 20 nt, synthetic construct
  source 1..20: mol_type = other RNA
tgtggcagagaagtttgttc

SEQ ID NO: 1272 - RNA, 20 nt, synthetic construct
  source 1..20: mol_type = other RNA
gagaatgtgccccccaggtc

SEQ ID NO: 1273 - RNA, 20 nt, synthetic construct
  source 1..20: mol_type = other RNA
acctggggggcacattctct

SEQ ID NO: 1274 - RNA, 20 nt, synthetic construct
  source 1..20: mol_type = other RNA
acattttgcctataatataa

SEQ ID NO: 1275 - RNA, 20 nt, synthetic construct
  source 1..20: mol_type = other RNA
tttaataggaaaaatacttt

SEQ ID NO: 1276 - RNA, 20 nt, synthetic construct
  source 1..20: mol_type = other RNA
ccattgccatatgagccctg

SEQ ID NO: 1277 - RNA, 20 nt, synthetic construct
  source 1..20: mol_type = other RNA
ttttgtttctctgattcacc

SEQ ID NO: 1278 - RNA, 20 nt, synthetic construct
  source 1..20: mol_type = other RNA
gagaaacaaaaggattgtgg

SEQ ID NO: 1279 - RNA, 20 nt, synthetic construct
  source 1..20: mol_type = other RNA
tcaggttaaaaaaagaaaaa

SEQ ID NO: 1280 - RNA, 20 nt, synthetic construct
  source 1..20: mol_type = other RNA
atttttctttttttaacctg

SEQ ID NO: 1281 - RNA, 20 nt, synthetic construct
  source 1..20: mol_type = other RNA
ggttaaaaaaagaaaaattg

SEQ ID NO: 1282 - RNA, 20 nt, synthetic construct
  source 1..20: mol_type = other RNA
caaaacagaatcaatttttc

SEQ ID NO: 1283 - RNA, 20 nt, synthetic construct
  source 1..20: mol_type = other RNA
cctccccagctcatgttgct

SEQ ID NO: 1284 - RNA, 20 nt, synthetic construct
  source 1..20: mol_type = other RNA
ctgctgagatcccctcccca

SEQ ID NO: 1285 - RNA, 20 nt, synthetic construct
  source 1..20: mol_type = other RNA
cagcagtgatgctctatgaa

SEQ ID NO: 1286 - RNA, 20 nt, synthetic construct
  source 1..20: mol_type = other RNA
attgtagcctgctctgctac

SEQ ID NO: 1287 - RNA, 20 nt, synthetic construct
  source 1..20: mol_type = other RNA
atgtcttcaccccgcactgt

SEQ ID NO: 1288 - RNA, 20 nt, synthetic construct
  source 1..20: mol_type = other RNA
ttgagaaatagatattttag

SEQ ID NO: 1289 - RNA, 20 nt, synthetic construct
  source 1..20: mol_type = other RNA
aaatatcattgagaaataga

SEQ ID NO: 1290 - RNA, 20 nt, synthetic construct
  source 1..20: mol_type = other RNA
atttctcaatgatattttga

SEQ ID NO: 1291 - RNA, 20 nt, synthetic construct
  source 1..20: mol_type = other RNA
actaaaaagcacttgataga

SEQ ID NO: 1292 - RNA, 20 nt, synthetic construct
  source 1..20: mol_type = other RNA
atcaagtgctttttagtgga

SEQ ID NO: 1293 - RNA, 20 nt, synthetic construct
  source 1..20: mol_type = other RNA
agtgctttttagtggattag

SEQ ID NO: 1294 - RNA, 20 nt, synthetic construct
  source 1..20: mol_type = other RNA
gttcatctgcctttctactg

SEQ ID NO: 1295 - RNA, 20 nt, synthetic construct
  source 1..20: mol_type = other RNA
ttcagaacctcccctgaccc

SEQ ID NO: 1296 - RNA, 20 nt, synthetic construct
  source 1..20: mol_type = other RNA
tcattttattagcctctttt

SEQ ID NO: 1297 - RNA, 20 nt, synthetic construct
  source 1..20: mol_type = other RNA
ctggcacaaaatgtagtgat

SEQ ID NO: 1298 - RNA, 20 nt, synthetic construct
  source 1..20: mol_type = other RNA
ctacattttgtgccagagat

SEQ ID NO: 1299 - RNA, 20 nt, synthetic construct
  source 1..20: mol_type = other RNA
ccaggcttggaagagggctg

SEQ ID NO: 1300 - RNA, 20 nt, synthetic construct
  source 1..20: mol_type = other RNA
cctgtcctgaggctccttag

SEQ ID NO: 1301 - RNA, 20 nt, synthetic construct
  source 1..20: mol_type = other RNA
gttcaaaagctgctttctgc

SEQ ID NO: 1302 - RNA, 20 nt, synthetic construct
  source 1..20: mol_type = other RNA
gaggcaacaaatctgttcaa

SEQ ID NO: 1303 - RNA, 20 nt, synthetic construct
  source 1..20: mol_type = other RNA
aatctgaggcaacaaatctg

SEQ ID NO: 1304 - RNA, 20 nt, synthetic construct
  source 1..20: mol_type = other RNA
caaagaaaaatcgtgggcag

SEQ ID NO: 1305 - RNA, 20 nt, synthetic construct
  source 1..20: mol_type = other RNA
tgggcagtattggtcccagg

SEQ ID NO: 1306 - RNA, 20 nt, synthetic construct
  source 1..20: mol_type = other RNA
agatttcagaggaaattgta

SEQ ID NO: 1307 - RNA, 20 nt, synthetic construct
  source 1..20: mol_type = other RNA
ggatgcctatcaacaccttg

SEQ ID NO: 1308 - RNA, 20 nt, synthetic construct
  source 1..20: mol_type = other RNA
acaccttggaaaaactgaat

SEQ ID NO: 1309 - RNA, 20 nt, synthetic construct
  source 1..20: mol_type = other RNA
tccattttttttttgcttaa

SEQ ID NO: 1310 - RNA, 20 nt, synthetic construct
  source 1..20: mol_type = other RNA
tgggcaaaaattaagcaaaa

SEQ ID NO: 1311 - RNA, 20 nt, synthetic construct
  source 1..20: mol_type = other RNA
tccatgcaccaacatttttg

SEQ ID NO: 1312 - RNA, 20 nt, synthetic construct
  source 1..20: mol_type = other RNA
atgcaccaacatttttgtaa

SEQ ID NO: 1313 - RNA, 20 nt, synthetic construct
  source 1..20: mol_type = other RNA
tctgaatggtccctccttta

SEQ ID NO: 1314 - RNA, 20 nt, synthetic construct
  source 1..20: mol_type = other RNA
actgtcaaagtgacagtgtt

SEQ ID NO: 1315 - RNA, 20 nt, synthetic construct
  source 1..20: mol_type = other RNA
aacaatggcctccaaggttc

SEQ ID NO: 1316 - RNA, 20 nt, synthetic construct
  source 1..20: mol_type = other RNA
ctgtgtagaaatgaaccttg

SEQ ID NO: 1317 - RNA, 20 nt, synthetic construct
  source 1..20: mol_type = other RNA
gctaatccctgtgtagaaat

SEQ ID NO: 1318 - RNA, 20 nt, synthetic construct
  source 1..20: mol_type = other RNA
acatcaatcttggcaacaca

SEQ ID NO: 1319 - RNA, 20 nt, synthetic construct
  source 1..20: mol_type = other RNA
atcttggcaacacagttgcc

SEQ ID NO: 1320 - RNA, 20 nt, synthetic construct
  source 1..20: mol_type = other RNA
gtggcaactgtgttgccaag

SEQ ID NO: 1321 - RNA, 20 nt, synthetic construct
  source 1..20: mol_type = other RNA
tggcaacacagttgccactg

SEQ ID NO: 1322 - RNA, 20 nt, synthetic construct
  source 1..20: mol_type = other RNA
tgacatggcaatcaagagca

SEQ ID NO: 1323 - RNA, 20 nt, synthetic construct
  source 1..20: mol_type = other RNA
tgtttgctcttgattgccat

SEQ ID NO: 1324 - RNA, 20 nt, synthetic construct
  source 1..20: mol_type = other RNA
agagcaaacatgatttattc

SEQ ID NO: 1325 - RNA, 20 nt, synthetic construct
  source 1..20: mol_type = other RNA
taaataagaataaatcatgt

SEQ ID NO: 1326 - RNA, 20 nt, synthetic construct
  source 1..20: mol_type = other RNA
gcctagtctaaccataaaat

SEQ ID NO: 1327 - RNA, 20 nt, synthetic construct
  source 1..20: mol_type = other RNA
agctatctgcctagtctaac

SEQ ID NO: 1328 - RNA, 20 nt, synthetic construct
  source 1..20: mol_type = other RNA
ctggggtttcagattctcca

SEQ ID NO: 1329 - RNA, 20 nt, synthetic construct
  source 1..20: mol_type = other RNA
gaaaccccagagattaccca

SEQ ID NO: 1330 - RNA, 20 nt, synthetic construct
  source 1..20: mol_type = other RNA
taaggggcattcttttctac

SEQ ID NO: 1331 - RNA, 20 nt, synthetic construct
  source 1..20: mol_type = other RNA
agcagcattctgaaaagtta

SEQ ID NO: 1332 - RNA, 20 nt, synthetic construct
  source 1..20: mol_type = other RNA
gcatgtatctagcagcattc

SEQ ID NO: 1333 - RNA, 20 nt, synthetic construct
  source 1..20: mol_type = other RNA
cttaggaatttctcctttgc

SEQ ID NO: 1334 - RNA, 20 nt, synthetic construct
  source 1..20: mol_type = other RNA
gagtgctatacaaccttctt

SEQ ID NO: 1335 - RNA, 20 nt, synthetic construct
  source 1..20: mol_type = other RNA
aacacctgtatcacaggtgt

SEQ ID NO: 1336 - RNA, 20 nt, synthetic construct
  source 1..20: mol_type = other RNA
caggtgttaaagaaacaaga

SEQ ID NO: 1337 - RNA, 20 nt, synthetic construct
  source 1..20: mol_type = other RNA
ttattaagaatacaagaagt

SEQ ID NO: 1338 - RNA, 20 nt, synthetic construct
  source 1..20: mol_type = other RNA
tatttatagaggtttgcagt

SEQ ID NO: 1339 - RNA, 20 nt, synthetic construct
  source 1..20: mol_type = other RNA
ctgcaaacctctataaatat

SEQ ID NO: 1340 - RNA, 20 nt, synthetic construct
  source 1..20: mol_type = other RNA
tcctgggtttcattagccgt

SEQ ID NO: 1341 - RNA, 20 nt, synthetic construct
  source 1..20: mol_type = other RNA
caagagtttgagataaacag

SEQ ID NO: 1342 - RNA, 20 nt, synthetic construct
  source 1..20: mol_type = other RNA
caaactcttgagattaaagt

SEQ ID NO: 1343 - RNA, 20 nt, synthetic construct
  source 1..20: mol_type = other RNA
aagagacaacccacagcccc

SEQ ID NO: 1344 - RNA, 20 nt, synthetic construct
  source 1..20: mol_type = other RNA
tttttccttccctagtccaa

SEQ ID NO: 1345 - RNA, 20 nt, synthetic construct
  source 1..20: mol_type = other RNA
tgagtgctttactcacaccc

SEQ ID NO: 1346 - RNA, 20 nt, synthetic construct
  source 1..20: mol_type = other RNA
ctgcaagcaccctgaggccc

SEQ ID NO: 1347 - RNA, 20 nt, synthetic construct
  source 1..20: mol_type = other RNA
agcacaggagaaagatgtag

SEQ ID NO: 1348 - RNA, 20 nt, synthetic construct
  source 1..20: mol_type = other RNA
ttctcctgtgctggatcctt

SEQ ID NO: 1349 - RNA, 20 nt, synthetic construct
  source 1..20: mol_type = other RNA
ttcctgctcttgaacatcgg

SEQ ID NO: 1350 - RNA, 20 nt, synthetic construct
  source 1..20: mol_type = other RNA
gactccaagttcttcagctg

SEQ ID NO: 1351 - RNA, 20 nt, synthetic construct
  source 1..20: mol_type = other RNA
gaggagcaaggaagacagtc

SEQ ID NO: 1352 - RNA, 20 nt, synthetic construct
  source 1..20: mol_type = other RNA
tgtgagttaataccacttaa

SEQ ID NO: 1353 - RNA, 20 nt, synthetic construct
  source 1..20: mol_type = other RNA
atagatatagatatactcac

SEQ ID NO: 1354 - RNA, 20 nt, synthetic construct
  source 1..20: mol_type = other RNA
atctatagatatagatatac

SEQ ID NO: 1355 - RNA, 20 nt, synthetic construct
  source 1..20: mol_type = other RNA
atatctatagatagatatag

SEQ ID NO: 1356 - RNA, 20 nt, synthetic construct
  source 1..20: mol_type = other RNA
atagatagatataggtatac

SEQ ID NO: 1357 - RNA, 20 nt, synthetic construct
  source 1..20: mol_type = other RNA
cctattagttctgtccctct

SEQ ID NO: 1358 - RNA, 20 nt, synthetic construct
  source 1..20: mol_type = other RNA
gtattagtcggggttctcta

SEQ ID NO: 1359 - RNA, 20 nt, synthetic construct
  source 1..20: mol_type = other RNA
ttaatattctgttcctcaag

SEQ ID NO: 1360 - RNA, 20 nt, synthetic construct
  source 1..20: mol_type = other RNA
gccaacaccagaagtcccaa

SEQ ID NO: 1361 - RNA, 20 nt, synthetic construct
  source 1..20: mol_type = other RNA
tattaatcagccaacaccag

SEQ ID NO: 1362 - RNA, 20 nt, synthetic construct
  source 1..20: mol_type = other RNA
gtgttctccatactattaga

SEQ ID NO: 1363 - RNA, 20 nt, synthetic construct
  source 1..20: mol_type = other RNA
gtagtgtcaaatgcatttat

SEQ ID NO: 1364 - RNA, 20 nt, synthetic construct
  source 1..20: mol_type = other RNA
cttatgagaggcaaggagtt

SEQ ID NO: 1365 - RNA, 20 nt, synthetic construct
  source 1..20: mol_type = other RNA
accaacttcattatgttcct

SEQ ID NO: 1366 - RNA, 20 nt, synthetic construct
  source 1..20: mol_type = other RNA
ctttctccagagaacttagg

SEQ ID NO: 1367 - RNA, 20 nt, synthetic construct
  source 1..20: mol_type = other RNA
ttttctttcatctctttctc

SEQ ID NO: 1368 - RNA, 20 nt, synthetic construct
  source 1..20: mol_type = other RNA
tcattttctttcatctcttt

SEQ ID NO: 1369 - RNA, 20 nt, synthetic construct
  source 1..20: mol_type = other RNA
cctgagatcatcattttctt

SEQ ID NO: 1370 - RNA, 20 nt, synthetic construct
  source 1..20: mol_type = other RNA
caggggatctgtctcccacc

SEQ ID NO: 1371 - RNA, 20 nt, synthetic construct
  source 1..20: mol_type = other RNA
gcttctgaaggtgggagaca

SEQ ID NO: 1372 - RNA, 20 nt, synthetic construct
  source 1..20: mol_type = other RNA
gtctcccaccttcagaagca

SEQ ID NO: 1373 - RNA, 20 nt, synthetic construct
  source 1..20: mol_type = other RNA
tagcagatttgtggctcagt

SEQ ID NO: 1374 - RNA, 20 nt, synthetic construct
  source 1..20: mol_type = other RNA
gctaagattgccctgaatga

SEQ ID NO: 1375 - RNA, 20 nt, synthetic construct
  source 1..20: mol_type = other RNA
gctactcgcatgataacagc

SEQ ID NO: 1376 - RNA, 20 nt, synthetic construct
  source 1..20: mol_type = other RNA
tgcgagtagctgatctgcaa

SEQ ID NO: 1377 - RNA, 20 nt, synthetic construct
  source 1..20: mol_type = other RNA
gcaacaagaggtgcatgcac

SEQ ID NO: 1378 - RNA, 20 nt, synthetic construct
  source 1..20: mol_type = other RNA
ccactccaagttccagggtc

SEQ ID NO: 1379 - RNA, 20 nt, synthetic construct
  source 1..20: mol_type = other RNA
gggttctcccacacatcccc

SEQ ID NO: 1380 - RNA, 20 nt, synthetic construct
  source 1..20: mol_type = other RNA
gagttcacaaactcagtgtc

SEQ ID NO: 1381 - RNA, 20 nt, synthetic construct
  source 1..20: mol_type = other RNA
ccagtagtggtaacatcccc

SEQ ID NO: 1382 - RNA, 20 nt, synthetic construct
  source 1..20: mol_type = other RNA
cctccctgacccgtgctgcc

SEQ ID NO: 1383 - RNA, 20 nt, synthetic construct
  source 1..20: mol_type = other RNA
tcagacaaaggtggaaaggc

SEQ ID NO: 1384 - RNA, 20 nt, synthetic construct
  source 1..20: mol_type = other RNA
ctgttgcctcaagcagtgca

SEQ ID NO: 1385 - RNA, 20 nt, synthetic construct
  source 1..20: mol_type = other RNA
tgcctggcagctgcctcagg

SEQ ID NO: 1386 - RNA, 20 nt, synthetic construct
  source 1..20: mol_type = other RNA
acattatcttgcctggcagc

SEQ ID NO: 1387 - RNA, 20 nt, synthetic construct
  source 1..20: mol_type = other RNA
attcccatgcctgttctcca

SEQ ID NO: 1388 - RNA, 20 nt, synthetic construct
  source 1..20: mol_type = other RNA
ggagaacaggcatgggaatg

SEQ ID NO: 1389 - RNA, 20 nt, synthetic construct
  source 1..20: mol_type = other RNA
cttacccttaatatccattc

SEQ ID NO: 1390 - RNA, 20 nt, synthetic construct
  source 1..20: mol_type = other RNA
aactctatgtcccttccacc

SEQ ID NO: 1391 - RNA, 20 nt, synthetic construct
  source 1..20: mol_type = other RNA
agctgaatttattggtttgg

SEQ ID NO: 1392 - RNA, 20 nt, synthetic construct
  source 1..20: mol_type = other RNA
ctacttagtagggccaaacc

SEQ ID NO: 1393 - RNA, 20 nt, synthetic construct
  source 1..20: mol_type = other RNA
gaaccttttctaagtccccg

SEQ ID NO: 1394 - RNA, 20 nt, synthetic construct
  source 1..20: mol_type = other RNA
cagcaccttgggaggcgggg

SEQ ID NO: 1395 - RNA, 20 nt, synthetic construct
  source 1..20: mol_type = other RNA
gcccgcccccgcctcccaag

SEQ ID NO: 1396 - RNA, 20 nt, synthetic construct
  source 1..20: mol_type = other RNA
cgtgatctgcccgcccccgc

SEQ ID NO: 1397 - RNA, 20 nt, synthetic construct
  source 1..20: mol_type = other RNA
cctgatctcgtgatctgccc

SEQ ID NO: 1398 - RNA, 20 nt, synthetic construct
  source 1..20: mol_type = other RNA
cgagatcaggagattgagac

SEQ ID NO: 1399 - RNA, 20 nt, synthetic construct
  source 1..20: mol_type = other RNA
ggagattgagacaattctgg

SEQ ID NO: 1400 - RNA, 20 nt, synthetic construct
  source 1..20: mol_type = other RNA
ctgctaaaaatacaaaaatt

SEQ ID NO: 1401 - RNA, 20 nt, synthetic construct
  source 1..20: mol_type = other RNA
ccatgcccagctaatttttg

SEQ ID NO: 1402 - RNA, 20 nt, synthetic construct
  source 1..20: mol_type = other RNA
catctacttgggaggctgag

SEQ ID NO: 1403 - RNA, 20 nt, synthetic construct
  source 1..20: mol_type = other RNA
acttgggaggctgaggcaag

SEQ ID NO: 1404 - RNA, 20 nt, synthetic construct
  source 1..20: mol_type = other RNA
ctgcctcacaggttcaagca

SEQ ID NO: 1405 - RNA, 20 nt, synthetic construct
  source 1..20: mol_type = other RNA
tggctcactgcaatctctgc

SEQ ID NO: 1406 - RNA, 20 nt, synthetic construct
  source 1..20: mol_type = other RNA
ccccactgcattccagcctg

SEQ ID NO: 1407 - RNA, 20 nt, synthetic construct
  source 1..20: mol_type = other RNA
atatttcagctaaccaagca

SEQ ID NO: 1408 - RNA, 20 nt, synthetic construct
  source 1..20: mol_type = other RNA
tttaatccatatttcagcta

SEQ ID NO: 1409 - RNA, 20 nt, synthetic construct
  source 1..20: mol_type = other RNA
cttcctctacattaaaccaa

SEQ ID NO: 1410 - RNA, 20 nt, synthetic construct
  source 1..20: mol_type = other RNA
ccctaagcctttggatcact

SEQ ID NO: 1411 - RNA, 20 nt, synthetic construct
  source 1..20: mol_type = other RNA
taatctccctaagcctttgg

SEQ ID NO: 1412 - RNA, 20 nt, synthetic construct
  source 1..20: mol_type = other RNA
aaaggcttagggagattagg

SEQ ID NO: 1413 - RNA, 20 nt, synthetic construct
  source 1..20: mol_type = other RNA
actccaccatcctaatctcc

SEQ ID NO: 1414 - RNA, 20 nt, synthetic construct
  source 1..20: mol_type = other RNA
tctggaccctcccagctggg

SEQ ID NO: 1415 - RNA, 20 nt, synthetic construct
  source 1..20: mol_type = other RNA
cagctgggagggtccagaag

SEQ ID NO: 1416 - RNA, 20 nt, synthetic construct
  source 1..20: mol_type = other RNA
atttcacaaagcttcggcca

SEQ ID NO: 1417 - RNA, 20 nt, synthetic construct
  source 1..20: mol_type = other RNA
gacatacagagaagagcaat

SEQ ID NO: 1418 - RNA, 20 nt, synthetic construct
  source 1..20: mol_type = other RNA
aacagtaggaaccacagtca

SEQ ID NO: 1419 - RNA, 20 nt, synthetic construct
  source 1..20: mol_type = other RNA
aattattcccattgtattta

SEQ ID NO: 1420 - RNA, 20 nt, synthetic construct
  source 1..20: mol_type = other RNA
tgaggtggcaggggccaagt

SEQ ID NO: 1421 - RNA, 20 nt, synthetic construct
  source 1..20: mol_type = other RNA
aaggcaaggtgggcataact

SEQ ID NO: 1422 - RNA, 20 nt, synthetic construct
  source 1..20: mol_type = other RNA
gaatagtctgactcatgtag

SEQ ID NO: 1423 - RNA, 20 nt, synthetic construct
  source 1..20: mol_type = other RNA
tggtgttcctagaagtgaaa

SEQ ID NO: 1424 - RNA, 20 nt, synthetic construct
  source 1..20: mol_type = other RNA
atttcacttctaggaacacc

SEQ ID NO: 1425 - RNA, 20 nt, synthetic construct
  source 1..20: mol_type = other RNA
agtaggaatacagtaggttt

SEQ ID NO: 1426 - RNA, 20 nt, synthetic construct
  source 1..20: mol_type = other RNA
gaattataaaaacagagaat

SEQ ID NO: 1427 - RNA, 20 nt, synthetic construct
  source 1..20: mol_type = other RNA
tgggccctcaatcaatttcc

SEQ ID NO: 1428 - RNA, 20 nt, synthetic construct
  source 1..20: mol_type = other RNA
atttccagactcgaacctgt

SEQ ID NO: 1429 - RNA, 20 nt, synthetic construct
  source 1..20: mol_type = other RNA
agcctccccttcattcagtg

SEQ ID NO: 1430 - RNA, 20 nt, synthetic construct
  source 1..20: mol_type = other RNA
ccttgaggaaggacaccact

SEQ ID NO: 1431 - RNA, 20 nt, synthetic construct
  source 1..20: mol_type = other RNA
ttccctaaggagacctctgg

SEQ ID NO: 1432 - RNA, 20 nt, synthetic construct
  source 1..20: mol_type = other RNA
acgtcagctcagagccagtg

SEQ ID NO: 1433 - RNA, 20 nt, synthetic construct
  source 1..20: mol_type = other RNA
tctggtcattttcccagtgc

SEQ ID NO: 1434 - RNA, 20 nt, synthetic construct
  source 1..20: mol_type = other RNA
taccagtcagggagccaatg

SEQ ID NO: 1435 - RNA, 20 nt, synthetic construct
  source 1..20: mol_type = other RNA
aaaacaatatcccatccctg

SEQ ID NO: 1436 - RNA, 20 nt, synthetic construct
  source 1..20: mol_type = other RNA
cttcagtccctccagggatg

SEQ ID NO: 1437 - RNA, 20 nt, synthetic construct
  source 1..20: mol_type = other RNA
catccctggagggactgaag

SEQ ID NO: 1438 - RNA, 20 nt, synthetic construct
  source 1..20: mol_type = other RNA
ctggagggactgaagtgatt

SEQ ID NO: 1439 - RNA, 20 nt, synthetic construct
  source 1..20: mol_type = other RNA
aggacttgaaagacgcaggg

SEQ ID NO: 1440 - RNA, 20 nt, synthetic construct
  source 1..20: mol_type = other RNA
ccacccctgcgtctttcaag

SEQ ID NO: 1441 - RNA, 20 nt, synthetic construct
  source 1..20: mol_type = other RNA
ctgttcaactctcccatttg

SEQ ID NO: 1442 - RNA, 20 nt, synthetic construct
  source 1..20: mol_type = other RNA
gtcctctgcacaggtcaaat

SEQ ID NO: 1443 - RNA, 20 nt, synthetic construct
  source 1..20: mol_type = other RNA
atctgtcctctgcacaggtc

SEQ ID NO: 1444 - RNA, 20 nt, synthetic construct
  source 1..20: mol_type = other RNA
ttttccaagatccatctgtc

SEQ ID NO: 1445 - RNA, 20 nt, synthetic construct
  source 1..20: mol_type = other RNA
accatcattttccaagatcc

SEQ ID NO: 1446 - RNA, 20 nt, synthetic construct
  source 1..20: mol_type = other RNA
tggaaaatgatggtggatta

SEQ ID NO: 1447 - RNA, 20 nt, synthetic construct
  source 1..20: mol_type = other RNA
cctggtgcctggtatgcagc

SEQ ID NO: 1448 - RNA, 20 nt, synthetic construct
  source 1..20: mol_type = other RNA
actctccagctttgtgtcat

SEQ ID NO: 1449 - RNA, 20 nt, synthetic construct
  source 1..20: mol_type = other RNA
tatttggagagaccttgctc

SEQ ID NO: 1450 - RNA, 20 nt, synthetic construct
  source 1..20: mol_type = other RNA
cgtggaagtgaaaagcgagc

SEQ ID NO: 1451 - RNA, 20 nt, synthetic construct
  source 1..20: mol_type = other RNA
taatgtcatgaatgtaatgg

SEQ ID NO: 1452 - RNA, 20 nt, synthetic construct
  source 1..20: mol_type = other RNA
tcataatgtcatgaatgtaa

SEQ ID NO: 1453 - RNA, 20 nt, synthetic construct
  source 1..20: mol_type = other RNA
aatcatcataatgtcatgaa

SEQ ID NO: 1454 - RNA, 20 nt, synthetic construct
  source 1..20: mol_type = other RNA
tctggcatacaaatgtctca

SEQ ID NO: 1455 - RNA, 20 nt, synthetic construct
  source 1..20: mol_type = other RNA
agctaaaatttagggacttt

SEQ ID NO: 1456 - RNA, 20 nt, synthetic construct
  source 1..20: mol_type = other RNA
ccataggtctcatgccactg

SEQ ID NO: 1457 - RNA, 20 nt, synthetic construct
  source 1..20: mol_type = other RNA
aaataggcccaccaggcatt

SEQ ID NO: 1458 - RNA, 20 nt, synthetic construct
  source 1..20: mol_type = other RNA
ggcagcctttcaggtcactc

SEQ ID NO: 1459 - RNA, 20 nt, synthetic construct
  source 1..20: mol_type = other RNA
agtgacctgaaaggctgcca

SEQ ID NO: 1460 - RNA, 20 nt, synthetic construct
  source 1..20: mol_type = other RNA
gcggggtcatgtggcccaaa

SEQ ID NO: 1461 - RNA, 20 nt, synthetic construct
  source 1..20: mol_type = other RNA
aatggtgcttgaggtgtcag

SEQ ID NO: 1462 - RNA, 20 nt, synthetic construct
  source 1..20: mol_type = other RNA
gccactgacacctcaagcac

SEQ ID NO: 1463 - RNA, 20 nt, synthetic construct
  source 1..20: mol_type = other RNA
ctatctgccactgacacctc

SEQ ID NO: 1464 - RNA, 20 nt, synthetic construct
  source 1..20: mol_type = other RNA
tagaggtctccactgtgatt

SEQ ID NO: 1465 - RNA, 20 nt, synthetic construct
  source 1..20: mol_type = other RNA
cagtggagacctctaggatt

SEQ ID NO: 1466 - RNA, 20 nt, synthetic construct
  source 1..20: mol_type = other RNA
gcagaagtggcagggccttg

SEQ ID NO: 1467 - RNA, 20 nt, synthetic construct
  source 1..20: mol_type = other RNA
tgaactggttgctttctgac

SEQ ID NO: 1468 - RNA, 20 nt, synthetic construct
  source 1..20: mol_type = other RNA
agccatgaagtgggtcagca

SEQ ID NO: 1469 - RNA, 20 nt, synthetic construct
  source 1..20: mol_type = other RNA
tcaaattgaagtggtgtgta

SEQ ID NO: 1470 - RNA, 20 nt, synthetic construct
  source 1..20: mol_type = other RNA
catacacaccacttcaattt

SEQ ID NO: 1471 - RNA, 20 nt, synthetic construct
  source 1..20: mol_type = other RNA
aattgaagtggtgtgtatgt

SEQ ID NO: 1472 - RNA, 20 nt, synthetic construct
  source 1..20: mol_type = other RNA
ggcttgagcaggtcctgaag

SEQ ID NO: 1473 - RNA, 20 nt, synthetic construct
  source 1..20: mol_type = other RNA
tagggaactccccatgaggc

SEQ ID NO: 1474 - RNA, 20 nt, synthetic construct
  source 1..20: mol_type = other RNA
gttgacagaggaagggaaga

SEQ ID NO: 1475 - RNA, 20 nt, synthetic construct
  source 1..20: mol_type = other RNA
atgaaccagtccttagtctt

SEQ ID NO: 1476 - RNA, 20 nt, synthetic construct
  source 1..20: mol_type = other RNA
tgcagaaccatctatgaacc

SEQ ID NO: 1477 - RNA, 20 nt, synthetic construct
  source 1..20: mol_type = other RNA
actttctaaatgcatgtgta

SEQ ID NO: 1478 - RNA, 20 nt, synthetic construct
  source 1..20: mol_type = other RNA
ttattttatttcctttattt

SEQ ID NO: 1479 - RNA, 20 nt, synthetic construct
  source 1..20: mol_type = other RNA
aaggtcacatgataaaggaa

SEQ ID NO: 1480 - RNA, 20 nt, synthetic construct
  source 1..20: mol_type = other RNA
tgtgaccttagatttatgga

SEQ ID NO: 1481 - RNA, 20 nt, synthetic construct
  source 1..20: mol_type = other RNA
gcatttaagcatttaagtgt

SEQ ID NO: 1482 - RNA, 20 nt, synthetic construct
  source 1..20: mol_type = other RNA
gcatttaaatattgttaacc

SEQ ID NO: 1483 - RNA, 20 nt, synthetic construct
  source 1..20: mol_type = other RNA
ccaaaccaaaagttattaca

SEQ ID NO: 1484 - RNA, 20 nt, synthetic construct
  source 1..20: mol_type = other RNA
tcatacaaccagaaacgcac

SEQ ID NO: 1485 - RNA, 20 nt, synthetic construct
  source 1..20: mol_type = other RNA
tcaaataaagacaataataa

SEQ ID NO: 1486 - RNA, 20 nt, synthetic construct
  source 1..20: mol_type = other RNA
tacataatcttcaaataaag

SEQ ID NO: 1487 - RNA, 20 nt, synthetic construct
  source 1..20: mol_type = other RNA
tgaaatcatacataatcttc

SEQ ID NO: 1488 - RNA, 20 nt, synthetic construct
  source 1..20: mol_type = other RNA
caagtccaactccttgtcaa

SEQ ID NO: 1489 - RNA, 20 nt, synthetic construct
  source 1..20: mol_type = other RNA
agttgacagtattaaccatc

SEQ ID NO: 1490 - RNA, 20 nt, synthetic construct
  source 1..20: mol_type = other RNA
aatcaagttgacagtattaa

SEQ ID NO: 1491 - RNA, 20 nt, synthetic construct
  source 1..20: mol_type = other RNA
ttcaatccaatcaagttgac

SEQ ID NO: 1492 - RNA, 20 nt, synthetic construct
  source 1..20: mol_type = other RNA
cggttatgtctgtgagggtg

SEQ ID NO: 1493 - RNA, 20 nt, synthetic construct
  source 1..20: mol_type = other RNA
ccttttgccacaccctcaca

SEQ ID NO: 1494 - RNA, 20 nt, synthetic construct
  source 1..20: mol_type = other RNA
gggtacacaccatctaatca

SEQ ID NO: 1495 - RNA, 20 nt, synthetic construct
  source 1..20: mol_type = other RNA
ggccacactggaacttgatt

SEQ ID NO: 1496 - RNA, 20 nt, synthetic construct
  source 1..20: mol_type = other RNA
aatcaagttccagtgtggcc

SEQ ID NO: 1497 - RNA, 20 nt, synthetic construct
  source 1..20: mol_type = other RNA
agttccagtgtggccagatt

SEQ ID NO: 1498 - RNA, 20 nt, synthetic construct
  source 1..20: mol_type = other RNA
ttctcctgtgccaaatgctt

SEQ ID NO: 1499 - RNA, 20 nt, synthetic construct
  source 1..20: mol_type = other RNA
gactccaagttcttcagcgt

SEQ ID NO: 1500 - RNA, 20 nt, synthetic construct
  source 1..20: mol_type = other RNA
caaggttccacaacaggccc

SEQ ID NO: 1501 - RNA, 20 nt, synthetic construct
  source 1..20: mol_type = other RNA
gctgagttaatactacttaa

SEQ ID NO: 1502 - RNA, 20 nt, synthetic construct
  source 1..20: mol_type = other RNA
tattaagtagtattaactca

SEQ ID NO: 1503 - RNA, 20 nt, synthetic construct
  source 1..20: mol_type = other RNA
cctttatatacatataatat

SEQ ID NO: 1504 - RNA, 20 nt, synthetic construct
  source 1..20: mol_type = other RNA
tattagttctgtccctctag

SEQ ID NO: 1505 - RNA, 20 nt, synthetic construct
  source 1..20: mol_type = other RNA
ataaatgagattaatgacat

SEQ ID NO: 1506 - RNA, 20 nt, synthetic construct
  source 1..20: mol_type = other RNA
catttattgatttgtataca

SEQ ID NO: 1507 - RNA, 20 nt, synthetic construct
  source 1..20: mol_type = other RNA
agtaggttttattcctggga

SEQ ID NO: 1508 - RNA, 20 nt, synthetic construct
  source 1..20: mol_type = other RNA
caggaataaaacctacttga

SEQ ID NO: 1509 - RNA, 20 nt, synthetic construct
  source 1..20: mol_type = other RNA
accacaatcaagtaggtttt

SEQ ID NO: 1510 - RNA, 20 nt, synthetic construct
  source 1..20: mol_type = other RNA
aaaagctaatccaccacaat

SEQ ID NO: 1511 - RNA, 20 nt, synthetic construct
  source 1..20: mol_type = other RNA
aagagtacatcaaaaagcta

SEQ ID NO: 1512 - RNA, 20 nt, synthetic construct
  source 1..20: mol_type = other RNA
ttgatgaacacagatgcaaa

SEQ ID NO: 1513 - RNA, 20 nt, synthetic construct
  source 1..20: mol_type = other RNA
gtgttcatcaaggatattgg

SEQ ID NO: 1514 - RNA, 20 nt, synthetic construct
  source 1..20: mol_type = other RNA
aggatattggcttgaagttt

SEQ ID NO: 1515 - RNA, 20 nt, synthetic construct
  source 1..20: mol_type = other RNA
ttctgatatggaacaacaaa

SEQ ID NO: 1516 - RNA, 20 nt, synthetic construct
  source 1..20: mol_type = other RNA
gaatgatgacgacctcatag

SEQ ID NO: 1517 - RNA, 20 nt, synthetic construct
  source 1..20: mol_type = other RNA
tttggaattgtttcaggagg

SEQ ID NO: 1518 - RNA, 20 nt, synthetic construct
  source 1..20: mol_type = other RNA
agcctcctgaaacaattcca

SEQ ID NO: 1519 - RNA, 20 nt, synthetic construct
  source 1..20: mol_type = other RNA
gctcttctttatatgactgg

SEQ ID NO: 1520 - RNA, 20 nt, synthetic construct
  source 1..20: mol_type = other RNA
ctctggtccaggggtttttc

SEQ ID NO: 1521 - RNA, 20 nt, synthetic construct
  source 1..20: mol_type = other RNA
gtaattaaaaacctacacca

SEQ ID NO: 1522 - RNA, 20 nt, synthetic construct
  source 1..20: mol_type = other RNA
ttactgcttgtctttctctt

SEQ ID NO: 1523 - RNA, 20 nt, synthetic construct
  source 1..20: mol_type = other RNA
tcagtagtcaataaaaaaag

SEQ ID NO: 1524 - RNA, 20 nt, synthetic construct
  source 1..20: mol_type = other RNA
ccattaatcctcagtagtca

SEQ ID NO: 1525 - RNA, 20 nt, synthetic construct
  source 1..20: mol_type = other RNA
agagttaaagttggacacat

SEQ ID NO: 1526 - RNA, 20 nt, synthetic construct
  source 1..20: mol_type = other RNA
aaaagagaaatagactaatc

SEQ ID NO: 1527 - RNA, 20 nt, synthetic construct
  source 1..20: mol_type = other RNA
aaatacacatgcctaacaac

SEQ ID NO: 1528 - RNA, 20 nt, synthetic construct
  source 1..20: mol_type = other RNA
agaagacctaacaatccaaa

SEQ ID NO: 1529 - RNA, 20 nt, synthetic construct
  source 1..20: mol_type = other RNA
tcaagaagacctaacaatcc

SEQ ID NO: 1530 - RNA, 20 nt, synthetic construct
  source 1..20: mol_type = other RNA
ttatgtaatgtttcttctta

SEQ ID NO: 1531 - RNA, 20 nt, synthetic construct
  source 1..20: mol_type = other RNA
ctggaagtattcgttgttct

SEQ ID NO: 1532 - RNA, 20 nt, synthetic construct
  source 1..20: mol_type = other RNA
gcacaaatagacttcagaac

SEQ ID NO: 1533 - RNA, 20 nt, synthetic construct
  source 1..20: mol_type = other RNA
caatttaaaagctgagaaaa

SEQ ID NO: 1534 - RNA, 20 nt, synthetic construct
  source 1..20: mol_type = other RNA
ttttctcagcttttaaattg

SEQ ID NO: 1535 - RNA, 20 nt, synthetic construct
  source 1..20: mol_type = other RNA
tattaacaactactttaatg

SEQ ID NO: 1536 - RNA, 20 nt, synthetic construct
  source 1..20: mol_type = other RNA
accattaagttggttatttc

SEQ ID NO: 1537 - RNA, 20 nt, synthetic construct
  source 1..20: mol_type = other RNA
ccacgacttacttattaaat

SEQ ID NO: 1538 - RNA, 20 nt, synthetic construct
  source 1..20: mol_type = other RNA
aagtatatattataaacatt

SEQ ID NO: 1539 - RNA, 20 nt, synthetic construct
  source 1..20: mol_type = other RNA
agtataattctgtcatttga

SEQ ID NO: 1540 - RNA, 20 nt, synthetic construct
  source 1..20: mol_type = other RNA
tacatcattgcacttctcct

SEQ ID NO: 1541 - RNA, 20 nt, synthetic construct
  source 1..20: mol_type = other RNA
ttgcacttctccttcctccc

SEQ ID NO: 1542 - RNA, 20 nt, synthetic construct
  source 1..20: mol_type = other RNA
ctttaaaaaacaactgatta

SEQ ID NO: 1543 - RNA, 20 nt, synthetic construct
  source 1..20: mol_type = other RNA
gttgttttttaaagtgatta

SEQ ID NO: 1544 - RNA, 20 nt, synthetic construct
  source 1..20: mol_type = other RNA
actgtaaaagataaggagca

SEQ ID NO: 1545 - RNA, 20 nt, synthetic construct
  source 1..20: mol_type = other RNA
tttacagtagatcccaattt

SEQ ID NO: 1546 - RNA, 20 nt, synthetic construct
  source 1..20: mol_type = other RNA
caatttccatctggagtcac

SEQ ID NO: 1547 - RNA, 20 nt, synthetic construct
  source 1..20: mol_type = other RNA
ggagtcacattctttctgtg

SEQ ID NO: 1548 - RNA, 20 nt, synthetic construct
  source 1..20: mol_type = other RNA
cttttaaaaactgaaggcaa

SEQ ID NO: 1549 - RNA, 20 nt, synthetic construct
  source 1..20: mol_type = other RNA
atactcagcaaaatcacttt

SEQ ID NO: 1550 - RNA, 20 nt, synthetic construct
  source 1..20: mol_type = other RNA
ttgttaaaatgatacaagga

SEQ ID NO: 1551 - RNA, 20 nt, synthetic construct
  source 1..20: mol_type = other RNA
ttttaacaatgatgttccat

SEQ ID NO: 1552 - RNA, 20 nt, synthetic construct
  source 1..20: mol_type = other RNA
gatttctagtcagaaactat

SEQ ID NO: 1553 - RNA, 20 nt, synthetic construct
  source 1..20: mol_type = other RNA
gatctttgtttctttgtatt

SEQ ID NO: 1554 - RNA, 20 nt, synthetic construct
  source 1..20: mol_type = other RNA
ttgtttctttgtattcaata

SEQ ID NO: 1555 - RNA, 20 nt, synthetic construct
  source 1..20: mol_type = other RNA
taaaggcagtcagagaaaaa

SEQ ID NO: 1556 - RNA, 20 nt, synthetic construct
  source 1..20: mol_type = other RNA
ttgtttttcaacagtttgac

SEQ ID NO: 1557 - RNA, 20 nt, synthetic construct
  source 1..20: mol_type = other RNA
aaggagctcaggaaacctca

SEQ ID NO: 1558 - RNA, 20 nt, synthetic construct
  source 1..20: mol_type = other RNA
gcaaatccaaggagctcagg

SEQ ID NO: 1559 - RNA, 20 nt, synthetic construct
  source 1..20: mol_type = other RNA
acaatctgcaaatccaagga

SEQ ID NO: 1560 - RNA, 20 nt, synthetic construct
  source 1..20: mol_type = other RNA
attctactgttttgtttttt

SEQ ID NO: 1561 - RNA, 20 nt, synthetic construct
  source 1..20: mol_type = other RNA
aacatttgaatacttacagt

SEQ ID NO: 1562 - RNA, 20 nt, synthetic construct
  source 1..20: mol_type = other RNA
ttcatattgcttcataaacc

SEQ ID NO: 1563 - RNA, 20 nt, synthetic construct
  source 1..20: mol_type = other RNA
aaaccaacacagatacaaaa

SEQ ID NO: 1564 - RNA, 20 nt, synthetic construct
  source 1..20: mol_type = other RNA
gtgttggtttggataagttc

SEQ ID NO: 1565 - RNA, 20 nt, synthetic construct
  source 1..20: mol_type = other RNA
ataaacttgaacatagtcta

SEQ ID NO: 1566 - RNA, 20 nt, synthetic construct
  source 1..20: mol_type = other RNA
gagatgaagaattctctgaa

SEQ ID NO: 1567 - RNA, 20 nt, synthetic construct
  source 1..20: mol_type = other RNA
ctgatattataaatctcttc

SEQ ID NO: 1568 - RNA, 20 nt, synthetic construct
  source 1..20: mol_type = other RNA
cttcctagcattttcatgtt

SEQ ID NO: 1569 - RNA, 20 nt, synthetic construct
  source 1..20: mol_type = other RNA
ctttgctgaaattctccccc

SEQ ID NO: 1570 - RNA, 20 nt, synthetic construct
  source 1..20: mol_type = other RNA
atggatagggggagaatttc

SEQ ID NO: 1571 - RNA, 20 nt, synthetic construct
  source 1..20: mol_type = other RNA
atggatattgtccaccttta

SEQ ID NO: 1572 - RNA, 20 nt, synthetic construct
  source 1..20: mol_type = other RNA
tgtggtaaaggtggacaata

SEQ ID NO: 1573 - RNA, 20 nt, synthetic construct
  source 1..20: mol_type = other RNA
gtttgggtttgtatgatacc

SEQ ID NO: 1574 - RNA, 20 nt, synthetic construct
  source 1..20: mol_type = other RNA
tacaaacccaaactgatagt

SEQ ID NO: 1575 - RNA, 20 nt, synthetic construct
  source 1..20: mol_type = other RNA
ggaaactatcagtttgggtt

SEQ ID NO: 1576 - RNA, 20 nt, synthetic construct
  source 1..20: mol_type = other RNA
agacagacagactcagaaaa

SEQ ID NO: 1577 - RNA, 20 nt, synthetic construct
  source 1..20: mol_type = other RNA
tccctcttcagcttttggtg

SEQ ID NO: 1578 - RNA, 20 nt, synthetic construct
  source 1..20: mol_type = other RNA
aacactgggtatcataaatg

SEQ ID NO: 1579 - RNA, 20 nt, synthetic construct
  source 1..20: mol_type = other RNA
ctactgttcctccatttatg

SEQ ID NO: 1580 - RNA, 20 nt, synthetic construct
  source 1..20: mol_type = other RNA
taaatggaggaacagtagag

SEQ ID NO: 1581 - RNA, 20 nt, synthetic construct
  source 1..20: mol_type = other RNA
tctgttgaaaatatgttttg

SEQ ID NO: 1582 - RNA, 20 nt, synthetic construct
  source 1..20: mol_type = other RNA
taaatgcaccacaggtttaa

SEQ ID NO: 1583 - RNA, 20 nt, synthetic construct
  source 1..20: mol_type = other RNA
ctggaggaatttaaacctgt

SEQ ID NO: 1584 - RNA, 20 nt, synthetic construct
  source 1..20: mol_type = other RNA
tttgcttagagtggggcctg

SEQ ID NO: 1585 - RNA, 20 nt, synthetic construct
  source 1..20: mol_type = other RNA
aataatagataggaacactg

SEQ ID NO: 1586 - RNA, 20 nt, synthetic construct
  source 1..20: mol_type = other RNA
attattagattttagcagtc

SEQ ID NO: 1587 - RNA, 20 nt, synthetic construct
  source 1..20: mol_type = other RNA
cctctgtagtgcaggcatgc

SEQ ID NO: 1588 - RNA, 20 nt, synthetic construct
  source 1..20: mol_type = other RNA
tcatacacataatctaaccc

SEQ ID NO: 1589 - RNA, 20 nt, synthetic construct
  source 1..20: mol_type = other RNA
aaccccattgaaactgctgt

SEQ ID NO: 1590 - RNA, 20 nt, synthetic construct
  source 1..20: mol_type = other RNA
ttggtggaaataaacaaatg

SEQ ID NO: 1591 - RNA, 20 nt, synthetic construct
  source 1..20: mol_type = other RNA
cctggagccacttcagtctt

SEQ ID NO: 1592 - RNA, 20 nt, synthetic construct
  source 1..20: mol_type = other RNA
aaataaggcacaagaatact

SEQ ID NO: 1593 - RNA, 20 nt, synthetic construct
  source 1..20: mol_type = other RNA
tgcattgcaacatagcagac

SEQ ID NO: 1594 - RNA, 20 nt, synthetic construct
  source 1..20: mol_type = other RNA
tatttccttggaggagagac

SEQ ID NO: 1595 - RNA, 20 nt, synthetic construct
  source 1..20: mol_type = other RNA
aatcttatttccttggagga

SEQ ID NO: 1596 - RNA, 20 nt, synthetic construct
  source 1..20: mol_type = other RNA
tctacctatccctgagaagt

SEQ ID NO: 1597 - RNA, 20 nt, synthetic construct
  source 1..20: mol_type = other RNA
acctatccctgagaagtgaa

SEQ ID NO: 1598 - RNA, 20 nt, synthetic construct
  source 1..20: mol_type = other RNA
ctgagaagtgaagggctttg

SEQ ID NO: 1599 - RNA, 20 nt, synthetic construct
  source 1..20: mol_type = other RNA
agcaccgcaggcaaagccct

SEQ ID NO: 1600 - RNA, 20 nt, synthetic construct
  source 1..20: mol_type = other RNA
ccacctacagcttgcagtgc

SEQ ID NO: 1601 - RNA, 20 nt, synthetic construct
  source 1..20: mol_type = other RNA
gagggagatacatttggcac

SEQ ID NO: 1602 - RNA, 20 nt, synthetic construct
  source 1..20: mol_type = other RNA
ccctctgatctctcctgtcc

SEQ ID NO: 1603 - RNA, 20 nt, synthetic construct
  source 1..20: mol_type = other RNA
ctcctgtcctgtggtcctca

SEQ ID NO: 1604 - RNA, 20 nt, synthetic construct
  source 1..20: mol_type = other RNA
cttcttaatgttcatgagga

SEQ ID NO: 1605 - RNA, 20 nt, synthetic construct
  source 1..20: mol_type = other RNA
gaattcttctcaccagaaac

SEQ ID NO: 1606 - RNA, 20 nt, synthetic construct
  source 1..20: mol_type = other RNA
ttctagaactttatttaatt

SEQ ID NO: 1607 - RNA, 20 nt, synthetic construct
  source 1..20: mol_type = other RNA
attcctttggttttttgcac

SEQ ID NO: 1608 - RNA, 20 nt, synthetic construct
  source 1..20: mol_type = other RNA
agagaagagaatggtcgtaa

SEQ ID NO: 1609 - RNA, 20 nt, synthetic construct
  source 1..20: mol_type = other RNA
agctgaatagttcttagaac

SEQ ID NO: 1610 - RNA, 20 nt, synthetic construct
  source 1..20: mol_type = other RNA
ccatggtagcaatcctggac

SEQ ID NO: 1611 - RNA, 20 nt, synthetic construct
  source 1..20: mol_type = other RNA
aggcacgtactccaccactg

SEQ ID NO: 1612 - RNA, 20 nt, synthetic construct
  source 1..20: mol_type = other RNA
tacagtaagcaaaacaaggt

SEQ ID NO: 1613 - RNA, 20 nt, synthetic construct
  source 1..20: mol_type = other RNA
taagaagttagcttgacgca

SEQ ID NO: 1614 - RNA, 20 nt, synthetic construct
  source 1..20: mol_type = other RNA
tactctttgctcaaagtaat

SEQ ID NO: 1615 - RNA, 20 nt, synthetic construct
  source 1..20: mol_type = other RNA
aactctcaggaaagagagcc

SEQ ID NO: 1616 - RNA, 20 nt, synthetic construct
  source 1..20: mol_type = other RNA
ggagaatatctggcggtggt

SEQ ID NO: 1617 - RNA, 20 nt, synthetic construct
  source 1..20: mol_type = other RNA
ggcggtggtgaggccacaat

SEQ ID NO: 1618 - RNA, 20 nt, synthetic construct
  source 1..20: mol_type = other RNA
gaatgtttagacagagtcag

SEQ ID NO: 1619 - RNA, 20 nt, synthetic construct
  source 1..20: mol_type = other RNA
cattgacctttagtgagtgt

SEQ ID NO: 1620 - RNA, 20 nt, synthetic construct
  source 1..20: mol_type = other RNA
ttaccccttgaaattctata

SEQ ID NO: 1621 - RNA, 20 nt, synthetic construct
  source 1..20: mol_type = other RNA
ccaattcctgaagtgaaggt

SEQ ID NO: 1622 - RNA, 20 nt, synthetic construct
  source 1..20: mol_type = other RNA
tttacttgtgagccaagaca

SEQ ID NO: 1623 - RNA, 20 nt, synthetic construct
  source 1..20: mol_type = other RNA
atggaaaggcgaatctatct

SEQ ID NO: 1624 - RNA, 20 nt, synthetic construct
  source 1..20: mol_type = other RNA
atctttttctatatctatgt

SEQ ID NO: 1625 - RNA, 20 nt, synthetic construct
  source 1..20: mol_type = other RNA
ttttctatatctatgtctat

SEQ ID NO: 1626 - RNA, 20 nt, synthetic construct
  source 1..20: mol_type = other RNA
atgtctattccaacgggtag

SEQ ID NO: 1627 - RNA, 20 nt, synthetic construct
  source 1..20: mol_type = other RNA
gccttcctgcctttgcttct

SEQ ID NO: 1628 - RNA, 20 nt, synthetic construct
  source 1..20: mol_type = other RNA
gtctcatttcttactttcat

SEQ ID NO: 1629 - RNA, 20 nt, synthetic construct
  source 1..20: mol_type = other RNA
tcccgcactttttattgttt

SEQ ID NO: 1630 - RNA, 20 nt, synthetic construct
  source 1..20: mol_type = other RNA
ttttttcttgtctttggtag

SEQ ID NO: 1631 - RNA, 20 nt, synthetic construct
  source 1..20: mol_type = other RNA
attgtccaacaagcggaaat

SEQ ID NO: 1632 - RNA, 20 nt, synthetic construct
  source 1..20: mol_type = other RNA
cattgttctctctctcgcaa

SEQ ID NO: 1633 - RNA, 20 nt, synthetic construct
  source 1..20: mol_type = other RNA
gttgagttgatctcattgtt

SEQ ID NO: 1634 - RNA, 20 nt, synthetic construct
  source 1..20: mol_type = other RNA
actcaacagatgcactggtt

SEQ ID NO: 1635 - RNA, 20 nt, synthetic construct
  source 1..20: mol_type = other RNA
cctgcccttcagtgcaggaa

SEQ ID NO: 1636 - RNA, 20 nt, synthetic construct
  source 1..20: mol_type = other RNA
tgctgaacagaggagggaca

SEQ ID NO: 1637 - RNA, 20 nt, synthetic construct
  source 1..20: mol_type = other RNA
caaactccaatgtccctcct

SEQ ID NO: 1638 - RNA, 20 nt, synthetic construct
  source 1..20: mol_type = other RNA
tagccacctgaataatccca

SEQ ID NO: 1639 - RNA, 20 nt, synthetic construct
  source 1..20: mol_type = other RNA
gttctcattgttagcaggcc

SEQ ID NO: 1640 - RNA, 20 nt, synthetic construct
  source 1..20: mol_type = other RNA
cctcgagtcattggctaaac

SEQ ID NO: 1641 - RNA, 20 nt, synthetic construct
  source 1..20: mol_type = other RNA
attttctgtgtacatgcagc

SEQ ID NO: 1642 - RNA, 20 nt, synthetic construct
  source 1..20: mol_type = other RNA
acaagaaagtagggcaaaga

SEQ ID NO: 1643 - RNA, 20 nt, synthetic construct
  source 1..20: mol_type = other RNA
acggaagagcagcaactaca

SEQ ID NO: 1644 - RNA, 20 nt, synthetic construct
  source 1..20: mol_type = other RNA
cttagtgctatttgagctct

SEQ ID NO: 1645 - RNA, 20 nt, synthetic construct
  source 1..20: mol_type = other RNA
tgggcattcagtagagaccc

SEQ ID NO: 1646 - RNA, 20 nt, synthetic construct
  source 1..20: mol_type = other RNA
ttctgatgcttggagacttc

SEQ ID NO: 1647 - RNA, 20 nt, synthetic construct
  source 1..20: mol_type = other RNA
gaatgatgtccaagtcaatg

SEQ ID NO: 1648 - RNA, 20 nt, synthetic construct
  source 1..20: mol_type = other RNA
ttagaggtaaacatcaaagt

SEQ ID NO: 1649 - RNA, 20 nt, synthetic construct
  source 1..20: mol_type = other RNA
aagtcaagtggctcagctat

SEQ ID NO: 1650 - RNA, 20 nt, synthetic construct
  source 1..20: mol_type = other RNA
acagtgtgaggcctaaatat

SEQ ID NO: 1651 - RNA, 20 nt, synthetic construct
  source 1..20: mol_type = other RNA
gccaatacaaacagacccag

SEQ ID NO: 1652 - RNA, 20 nt, synthetic construct
  source 1..20: mol_type = other RNA
tttctgtctcttctgggtct

SEQ ID NO: 1653 - RNA, 20 nt, synthetic construct
  source 1..20: mol_type = other RNA
ctatataataattgagttct

SEQ ID NO: 1654 - RNA, 20 nt, synthetic construct
  source 1..20: mol_type = other RNA
tagaactcaattattatata

SEQ ID NO: 1655 - RNA, 20 nt, synthetic construct
  source 1..20: mol_type = other RNA
agagacagtaagagtataaa

SEQ ID NO: 1656 - RNA, 20 nt, synthetic construct
  source 1..20: mol_type = other RNA
cttagtagttcttcgatttg

SEQ ID NO: 1657 - RNA, 20 nt, synthetic construct
  source 1..20: mol_type = other RNA
aagaactactaagagatatg

SEQ ID NO: 1658 - RNA, 20 nt, synthetic construct
  source 1..20: mol_type = other RNA
agtaattttttcatttaaga

SEQ ID NO: 1659 - RNA, 20 nt, synthetic construct
  source 1..20: mol_type = other RNA
agttagacatttcagaagaa

SEQ ID NO: 1660 - RNA, 20 nt, synthetic construct
  source 1..20: mol_type = other RNA
ggttctgtaggttctatgca

SEQ ID NO: 1661 - RNA, 20 nt, synthetic construct
  source 1..20: mol_type = other RNA
acaaatgctgaaaaatgaaa

SEQ ID NO: 1662 - RNA, 20 nt, synthetic construct
  source 1..20: mol_type = other RNA
accgagccacacagacataa

SEQ ID NO: 1663 - RNA, 20 nt, synthetic construct
  source 1..20: mol_type = other RNA
ttttatgttttcctttatgt

SEQ ID NO: 1664 - RNA, 20 nt, synthetic construct
  source 1..20: mol_type = other RNA
ccttccccctttctgtgact

SEQ ID NO: 1665 - RNA, 20 nt, synthetic construct
  source 1..20: mol_type = other RNA
ttgctttcagtatatatttc

SEQ ID NO: 1666 - RNA, 20 nt, synthetic construct
  source 1..20: mol_type = other RNA
tctttatatttggaaaattt

SEQ ID NO: 1667 - RNA, 20 nt, synthetic construct
  source 1..20: mol_type = other RNA
attgagcttcttgagtccgt

SEQ ID NO: 1668 - RNA, 20 nt, synthetic construct
  source 1..20: mol_type = other RNA
cggactcaagaagctcaatg

SEQ ID NO: 1669 - RNA, 20 nt, synthetic construct
  source 1..20: mol_type = other RNA
gaaaaataatttctaaaatg

SEQ ID NO: 1670 - RNA, 20 nt, synthetic construct
  source 1..20: mol_type = other RNA
tataattgtcattttagaaa

SEQ ID NO: 1671 - RNA, 20 nt, synthetic construct
  source 1..20: mol_type = other RNA
cgtaaggaacgggaaaaaca

SEQ ID NO: 1672 - RNA, 20 nt, synthetic construct
  source 1..20: mol_type = other RNA
ctgttcctctagcaagacac

SEQ ID NO: 1673 - RNA, 20 nt, synthetic construct
  source 1..20: mol_type = other RNA
gaaacactgcaacctggaca

SEQ ID NO: 1674 - RNA, 20 nt, synthetic construct
  source 1..20: mol_type = other RNA
agcaataaaatgccttgaag

SEQ ID NO: 1675 - RNA, 20 nt, synthetic construct
  source 1..20: mol_type = other RNA
atgttggaggaatgcacatt

SEQ ID NO: 1676 - RNA, 20 nt, synthetic construct
  source 1..20: mol_type = other RNA
gcaggcttatgtaacaaaag

SEQ ID NO: 1677 - RNA, 20 nt, synthetic construct
  source 1..20: mol_type = other RNA
acatttgccaattgctaggt

SEQ ID NO: 1678 - RNA, 20 nt, synthetic construct
  source 1..20: mol_type = other RNA
agaaaacatgtagcattttc

SEQ ID NO: 1679 - RNA, 20 nt, synthetic construct
  source 1..20: mol_type = other RNA
aacgtttatatctttttaaa

SEQ ID NO: 1680 - RNA, 20 nt, synthetic construct
  source 1..20: mol_type = other RNA
ttttaaatgagagttgacga

SEQ ID NO: 1681 - RNA, 20 nt, synthetic construct
  source 1..20: mol_type = other RNA
ttttgcttcaactcgtcaac

SEQ ID NO: 1682 - RNA, 20 nt, synthetic construct
  source 1..20: mol_type = other RNA
ctacatgatttatgctacat

SEQ ID NO: 1683 - RNA, 20 nt, synthetic construct
  source 1..20: mol_type = other RNA
tgtagggattaattggaagt

SEQ ID NO: 1684 - RNA, 20 nt, synthetic construct
  source 1..20: mol_type = other RNA
tgcatgaggtaagaaactta

SEQ ID NO: 1685 - RNA, 20 nt, synthetic construct
  source 1..20: mol_type = other RNA
ctttgaacccacacattaac

SEQ ID NO: 1686 - RNA, 20 nt, synthetic construct
  source 1..20: mol_type = other RNA
tagagcaatcacaaagtttt

SEQ ID NO: 1687 - RNA, 20 nt, synthetic construct
  source 1..20: mol_type = other RNA
caaagtttttaactctgagg

SEQ ID NO: 1688 - RNA, 20 nt, synthetic construct
  source 1..20: mol_type = other RNA
agttgctcattgaatgagct

SEQ ID NO: 1689 - RNA, 20 nt, synthetic construct
  source 1..20: mol_type = other RNA
aacattgtgtctctagtggc

SEQ ID NO: 1690 - RNA, 20 nt, synthetic construct
  source 1..20: mol_type = other RNA
ccatggcccataatacattt

SEQ ID NO: 1691 - RNA, 20 nt, synthetic construct
  source 1..20: mol_type = other RNA
tcacattcatgacctgtggc

SEQ ID NO: 1692 - RNA, 20 nt, synthetic construct
  source 1..20: mol_type = other RNA
tgaagcattcgctcttcctt

SEQ ID NO: 1693 - RNA, 20 nt, synthetic construct
  source 1..20: mol_type = other RNA
ccgcagcccaaactcctcag

SEQ ID NO: 1694 - RNA, 20 nt, synthetic construct
  source 1..20: mol_type = other RNA
gaagaggtcggacagctatg

SEQ ID NO: 1695 - RNA, 20 nt, synthetic construct
  source 1..20: mol_type = other RNA
cttagtcttcctgccatctt

SEQ ID NO: 1696 - RNA, 20 nt, synthetic construct
  source 1..20: mol_type = other RNA
tcctttatgccatgggaccc

SEQ ID NO: 1697 - RNA, 20 nt, synthetic construct
  source 1..20: mol_type = other RNA
cccagttctggagtggctgt

SEQ ID NO: 1698 - RNA, 20 nt, synthetic construct
  source 1..20: mol_type = other RNA
tctgctgtccacagccactc

SEQ ID NO: 1699 - RNA, 20 nt, synthetic construct
  source 1..20: mol_type = other RNA
ctagaatgggttcctgggca

SEQ ID NO: 1700 - RNA, 20 nt, synthetic construct
  source 1..20: mol_type = other RNA
tgtcggtcaagtaggtttgt

SEQ ID NO: 1701 - RNA, 20 nt, synthetic construct
  source 1..20: mol_type = other RNA
aggaggataacctttccagg

SEQ ID NO: 1702 - RNA, 20 nt, synthetic construct
  source 1..20: mol_type = other RNA
tccttgatgccatgttttct

SEQ ID NO: 1703 - RNA, 20 nt, synthetic construct
  source 1..20: mol_type = other RNA
ctctcggtaggacttcatat

SEQ ID NO: 1704 - RNA, 20 nt, synthetic construct
  source 1..20: mol_type = other RNA
gtctagtctccgtatctctc

SEQ ID NO: 1705 - RNA, 20 nt, synthetic construct
  source 1..20: mol_type = other RNA
gtatctgtctagtctccgta

SEQ ID NO: 1706 - RNA, 20 nt, synthetic construct
  source 1..20: mol_type = other RNA
cacaatacagacgtcaaaac

SEQ ID NO: 1707 - RNA, 20 nt, synthetic construct
  source 1..20: mol_type = other RNA
ctctggaataactggtatgg

SEQ ID NO: 1708 - RNA, 20 nt, synthetic construct
  source 1..20: mol_type = other RNA
atctctctggaataactggt

SEQ ID NO: 1709 - RNA, 20 nt, synthetic construct
  source 1..20: mol_type = other RNA
gagtattctccttctgcctt

SEQ ID NO: 1710 - RNA, 20 nt, synthetic construct
  source 1..20: mol_type = other RNA
tttttcggccacgtgtgtgt

SEQ ID NO: 1711 - RNA, 20 nt, synthetic construct
  source 1..20: mol_type = other RNA
cagtgtttctaagaagcgtt

SEQ ID NO: 1712 - RNA, 20 nt, synthetic construct
  source 1..20: mol_type = other RNA
aaagtagcaaacgcttctta

SEQ ID NO: 1713 - RNA, 20 nt, synthetic construct
  source 1..20: mol_type = other RNA
ctcatacttaatagattatt

SEQ ID NO: 1714 - RNA, 20 nt, synthetic construct
  source 1..20: mol_type = other RNA
attaagtatgagagatgtgc

SEQ ID NO: 1715 - RNA, 20 nt, synthetic construct
  source 1..20: mol_type = other RNA
tctctgcacatctctcatac

SEQ ID NO: 1716 - RNA, 20 nt, synthetic construct
  source 1..20: mol_type = other RNA
ctaatcctctctgcacatct

SEQ ID NO: 1717 - RNA, 20 nt, synthetic construct
  source 1..20: mol_type = other RNA
agagccatttttgctggtgg

SEQ ID NO: 1718 - RNA, 20 nt, synthetic construct
  source 1..20: mol_type = other RNA
tatggtacttttaatgggaa

SEQ ID NO: 1719 - RNA, 20 nt, synthetic construct
  source 1..20: mol_type = other RNA
agccactggaaattccaaaa

SEQ ID NO: 1720 - RNA, 20 nt, synthetic construct
  source 1..20: mol_type = other RNA
ttttggaatttccagtggct

SEQ ID NO: 1721 - RNA, 20 nt, synthetic construct
  source 1..20: mol_type = other RNA
ggattcctgcagtagttcat

SEQ ID NO: 1722 - RNA, 20 nt, synthetic construct
  source 1..20: mol_type = other RNA
tgaactactgcaggaatcca

SEQ ID NO: 1723 - RNA, 20 nt, synthetic construct
  source 1..20: mol_type = other RNA
agatgctgtggcagctcctt

SEQ ID NO: 1724 - RNA, 20 nt, synthetic construct
  source 1..20: mol_type = other RNA
ctcgtataacaataaggagc

SEQ ID NO: 1725 - RNA, 20 nt, synthetic construct
  source 1..20: mol_type = other RNA
cggtgtcaggtgggagtact

SEQ ID NO: 1726 - RNA, 20 nt, synthetic construct
  source 1..20: mol_type = other RNA
aagcgtgtagatgtctggcc

SEQ ID NO: 1727 - RNA, 20 nt, synthetic construct
  source 1..20: mol_type = other RNA
cagcatcgaagcgtgtagat

SEQ ID NO: 1728 - RNA, 20 nt, synthetic construct
  source 1..20: mol_type = other RNA
acacgcttcgatgctgggat

SEQ ID NO: 1729 - RNA, 20 nt, synthetic construct
  source 1..20: mol_type = other RNA
gtgggaatttccatggcttt

SEQ ID NO: 1730 - RNA, 20 nt, synthetic construct
  source 1..20: mol_type = other RNA
gtttaccattgaaggcggct

SEQ ID NO: 1731 - RNA, 20 nt, synthetic construct
  source 1..20: mol_type = other RNA
ctccgctggctcccccagag

SEQ ID NO: 1732 - RNA, 20 nt, synthetic construct
  source 1..20: mol_type = other RNA
taaagacaaagcccaaccac

SEQ ID NO: 1733 - RNA, 20 nt, synthetic construct
  source 1..20: mol_type = other RNA
ccctggagggtttgtgccca

SEQ ID NO: 1734 - RNA, 20 nt, synthetic construct
  source 1..20: mol_type = other RNA
acttcaaaattcaccttgtt

SEQ ID NO: 1735 - RNA, 20 nt, synthetic construct
  source 1..20: mol_type = other RNA
ccggaaaagcttactggctt

SEQ ID NO: 1736 - RNA, 20 nt, synthetic construct
  source 1..20: mol_type = other RNA
gcaatgctgaagattgctct

SEQ ID NO: 1737 - RNA, 20 nt, synthetic construct
  source 1..20: mol_type = other RNA
tcagcattgcagattctgag

SEQ ID NO: 1738 - RNA, 20 nt, synthetic construct
  source 1..20: mol_type = other RNA
atgcagccctcttaggtttc

SEQ ID NO: 1739 - RNA, 20 nt, synthetic construct
  source 1..20: mol_type = other RNA
ctcccttcaaagcctagggc

SEQ ID NO: 1740 - RNA, 20 nt, synthetic construct
  source 1..20: mol_type = other RNA
gaaagaggtttaagaatact

SEQ ID NO: 1741 - RNA, 20 nt, synthetic construct
  source 1..20: mol_type = other RNA
tgaattgtagtaaagtagga

SEQ ID NO: 1742 - RNA, 20 nt, synthetic construct
  source 1..20: mol_type = other RNA
tctcatgccctgcatcctga

SEQ ID NO: 1743 - RNA, 20 nt, synthetic construct
  source 1..20: mol_type = other RNA
ctgagaagcaaagtgtcttt

SEQ ID NO: 1744 - RNA, 20 nt, synthetic construct
  source 1..20: mol_type = other RNA
gactgaagacaaagacactt

SEQ ID NO: 1745 - RNA, 20 nt, synthetic construct
  source 1..20: mol_type = other RNA
tgaaagccaaggcctttggc

SEQ ID NO: 1746 - RNA, 20 nt, synthetic construct
  source 1..20: mol_type = other RNA
acggtctagggaaacatgca

SEQ ID NO: 1747 - RNA, 20 nt, synthetic construct
  source 1..20: mol_type = other RNA
tcatgcaaacggcaccgcat

SEQ ID NO: 1748 - RNA, 20 nt, synthetic construct
  source 1..20: mol_type = other RNA
gattcctcattggaaagtga

SEQ ID NO: 1749 - RNA, 20 nt, synthetic construct
  source 1..20: mol_type = other RNA
gatctgttgtgtttctctaa

SEQ ID NO: 1750 - RNA, 20 nt, synthetic construct
  source 1..20: mol_type = other RNA
gttgtgtttctctaaggtgt

SEQ ID NO: 1751 - RNA, 20 nt, synthetic construct
  source 1..20: mol_type = other RNA
gttgctttggtgtttgtttg

SEQ ID NO: 1752 - RNA, 20 nt, synthetic construct
  source 1..20: mol_type = other RNA
ataggcagatggatgtgaga

SEQ ID NO: 1753 - RNA, 20 nt, synthetic construct
  source 1..20: mol_type = other RNA
atctgcctatggataaggaa

SEQ ID NO: 1754 - RNA, 20 nt, synthetic construct
  source 1..20: mol_type = other RNA
gcctatggataaggaaaaga

SEQ ID NO: 1755 - RNA, 20 nt, synthetic construct
  source 1..20: mol_type = other RNA
ctgagcatagagaaacatgt

SEQ ID NO: 1756 - RNA, 20 nt, synthetic construct
  source 1..20: mol_type = other RNA
agctgagtatctctgagcat

SEQ ID NO: 1757 - RNA, 20 nt, synthetic construct
  source 1..20: mol_type = other RNA
aggcacatactccaccactg

SEQ ID NO: 1758 - RNA, 20 nt, synthetic construct
  source 1..20: mol_type = other RNA
atgacaccacactcgcatag

SEQ ID NO: 1759 - RNA, 20 nt, synthetic construct
  source 1..20: mol_type = other RNA
cttgtaacagaaacttcact

SEQ ID NO: 1760 - RNA, 20 nt, synthetic construct
  source 1..20: mol_type = other RNA
gtcacaagttgagttcggag

SEQ ID NO: 1761 - RNA, 20 nt, synthetic construct
  source 1..20: mol_type = other RNA
gcatctgtcacaagttgagt

SEQ ID NO: 1762 - RNA, 20 nt, synthetic construct
  source 1..20: mol_type = other RNA
tgagacattttgctacgcca

SEQ ID NO: 1763 - RNA, 20 nt, synthetic construct
  source 1..20: mol_type = other RNA
tcctgagacattttgctacg

SEQ ID NO: 1764 - RNA, 20 nt, synthetic construct
  source 1..20: mol_type = other RNA
cctcacctccagatttccct

SEQ ID NO: 1765 - RNA, 20 nt, synthetic construct
  source 1..20: mol_type = other RNA
ggaggtgaggagatcacatt

SEQ ID NO: 1766 - RNA, 20 nt, synthetic construct
  source 1..20: mol_type = other RNA
cattatgaagaaagtcagaa

SEQ ID NO: 1767 - RNA, 20 nt, synthetic construct
  source 1..20: mol_type = other RNA
aagtgtctggtcctttgtca

SEQ ID NO: 1768 - RNA, 20 nt, synthetic construct
  source 1..20: mol_type = other RNA
attcacctgtccataaataa

SEQ ID NO: 1769 - RNA, 20 nt, synthetic construct
  source 1..20: mol_type = other RNA
gtttctatatctacgtatat

SEQ ID NO: 1770 - RNA, 20 nt, synthetic construct
  source 1..20: mol_type = other RNA
gaatatacgtagatatagaa

SEQ ID NO: 1771 - RNA, 20 nt, synthetic construct
  source 1..20: mol_type = other RNA
acgtatattccgattgtcag

SEQ ID NO: 1772 - RNA, 20 nt, synthetic construct
  source 1..20: mol_type = other RNA
cttcaggccactggtactta

SEQ ID NO: 1773 - RNA, 20 nt, synthetic construct
  source 1..20: mol_type = other RNA
tctcttgctgggaacctgta

SEQ ID NO: 1774 - RNA, 20 nt, synthetic construct
  source 1..20: mol_type = other RNA
gccttccttccttggatctt

SEQ ID NO: 1775 - RNA, 20 nt, synthetic construct
  source 1..20: mol_type = other RNA
aaggaaggaaggcagatgag

SEQ ID NO: 1776 - RNA, 20 nt, synthetic construct
  source 1..20: mol_type = other RNA
ctctctgtgctgactctcat

SEQ ID NO: 1777 - RNA, 20 nt, synthetic construct
  source 1..20: mol_type = other RNA
cttttacttttcagcatccc

SEQ ID NO: 1778 - RNA, 20 nt, synthetic construct
  source 1..20: mol_type = other RNA
acccatcccttttacttttc

SEQ ID NO: 1779 - RNA, 20 nt, synthetic construct
  source 1..20: mol_type = other RNA
gttgtcccacatgtagaaac

SEQ ID NO: 1780 - RNA, 20 nt, synthetic construct
  source 1..20: mol_type = other RNA
ttgcccctctctcaattctc

SEQ ID NO: 1781 - RNA, 20 nt, synthetic construct
  source 1..20: mol_type = other RNA
gcggagtggagcccatcatt

SEQ ID NO: 1782 - RNA, 20 nt, synthetic construct
  source 1..20: mol_type = other RNA
aggaagaaagccaaggcatc

SEQ ID NO: 1783 - RNA, 20 nt, synthetic construct
  source 1..20: mol_type = other RNA
ccttgctattcagtgcagga

SEQ ID NO: 1784 - RNA, 20 nt, synthetic construct
  source 1..20: mol_type = other RNA
ctctcctccattcagcaaga

SEQ ID NO: 1785 - RNA, 20 nt, synthetic construct
  source 1..20: mol_type = other RNA
tgctgaatggaggagaggga

SEQ ID NO: 1786 - RNA, 20 nt, synthetic construct
  source 1..20: mol_type = other RNA
caaactccaatccctctcct

SEQ ID NO: 1787 - RNA, 20 nt, synthetic construct
  source 1..20: mol_type = other RNA
ctctcttctttattgagctt

SEQ ID NO: 1788 - RNA, 20 nt, synthetic construct
  source 1..20: mol_type = other RNA
cagagtgctatgtgatctct

SEQ ID NO: 1789 - RNA, 20 nt, synthetic construct
  source 1..20: mol_type = other RNA
catagcactctgggatactg

SEQ ID NO: 1790 - RNA, 20 nt, synthetic construct
  source 1..20: mol_type = other RNA
aatcggtttccaatcaatga

SEQ ID NO: 1791 - RNA, 20 nt, synthetic construct
  source 1..20: mol_type = other RNA
gtttccaatcaatgaagtgc

SEQ ID NO: 1792 - RNA, 20 nt, synthetic construct
  source 1..20: mol_type = other RNA
atgaagtgcctgtgagagga

SEQ ID NO: 1793 - RNA, 20 nt, synthetic construct
  source 1..20: mol_type = other RNA
caactctctttagaagtaaa

SEQ ID NO: 1794 - RNA, 20 nt, synthetic construct
  source 1..20: mol_type = other RNA
actttgttgtttacttctaa

SEQ ID NO: 1795 - RNA, 20 nt, synthetic construct
  source 1..20: mol_type = other RNA
gcagagtgagtcctaaattt

SEQ ID NO: 1796 - RNA, 20 nt, synthetic construct
  source 1..20: mol_type = other RNA
gactacatgtagaaaagcgt

SEQ ID NO: 1797 - RNA, 20 nt, synthetic construct
  source 1..20: mol_type = other RNA
ggtaatacaaacaggctcag

SEQ ID NO: 1798 - RNA, 20 nt, synthetic construct
  source 1..20: mol_type = other RNA
tttctctcattcctgagcct

SEQ ID NO: 1799 - RNA, 20 nt, synthetic construct
  source 1..20: mol_type = other RNA
tactgatatgtcaaattttc

SEQ ID NO: 1800 - RNA, 20 nt, synthetic construct
  source 1..20: mol_type = other RNA
gttatcatactgatatgtca

SEQ ID NO: 1801 - RNA, 20 nt, synthetic construct
  source 1..20: mol_type = other RNA
gtatgataactgatttcaaa

SEQ ID NO: 1802 - RNA, 20 nt, synthetic construct
  source 1..20: mol_type = other RNA
gctttcttgcatgttgtttt

SEQ ID NO: 1803 - RNA, 20 nt, synthetic construct
  source 1..20: mol_type = other RNA
tatcaagagaaattaacagt

SEQ ID NO: 1804 - RNA, 20 nt, synthetic construct
  source 1..20: mol_type = other RNA
agagaaattaacagtacaga

SEQ ID NO: 1805 - RNA, 20 nt, synthetic construct
  source 1..20: mol_type = other RNA
gccggccatacagtaatttt

SEQ ID NO: 1806 - RNA, 20 nt, synthetic construct
  source 1..20: mol_type = other RNA
atttagacgtttcagaggaa

SEQ ID NO: 1807 - RNA, 20 nt, synthetic construct
  source 1..20: mol_type = other RNA
tttcatattttcctacatgt

SEQ ID NO: 1808 - RNA, 20 nt, synthetic construct
  source 1..20: mol_type = other RNA
ttgattctggtatttgtttc

SEQ ID NO: 1809 - RNA, 20 nt, synthetic construct
  source 1..20: mol_type = other RNA
gccatccttgattctggtat

SEQ ID NO: 1810 - RNA, 20 nt, synthetic construct
  source 1..20: mol_type = other RNA
aggatggctgataacttttc

SEQ ID NO: 1811 - RNA, 20 nt, synthetic construct
  source 1..20: mol_type = other RNA
cttgagtttcacgattctgt

SEQ ID NO: 1812 - RNA, 20 nt, synthetic construct
  source 1..20: mol_type = other RNA
cagaatcgtgaaactcaagg

SEQ ID NO: 1813 - RNA, 20 nt, synthetic construct
  source 1..20: mol_type = other RNA
tgaaactcaagggatcatat

SEQ ID NO: 1814 - RNA, 20 nt, synthetic construct
  source 1..20: mol_type = other RNA
tatagggaatttcggaaaaa

SEQ ID NO: 1815 - RNA, 20 nt, synthetic construct
  source 1..20: mol_type = other RNA
tacaggttgggttttttttc

SEQ ID NO: 1816 - RNA, 20 nt, synthetic construct
  source 1..20: mol_type = other RNA
cagttcgaaggtaacaaggc

SEQ ID NO: 1817 - RNA, 20 nt, synthetic construct
  source 1..20: mol_type = other RNA
ttgccttgttaccttcgaac

SEQ ID NO: 1818 - RNA, 20 nt, synthetic construct
  source 1..20: mol_type = other RNA
gtgtacttgtaggaagacac

SEQ ID NO: 1819 - RNA, 20 nt, synthetic construct
  source 1..20: mol_type = other RNA
ggcttccagtgtttctgagg

SEQ ID NO: 1820 - RNA, 20 nt, synthetic construct
  source 1..20: mol_type = other RNA
ttttaacaatattccctggt

SEQ ID NO: 1821 - RNA, 20 nt, synthetic construct
  source 1..20: mol_type = other RNA
ctttttgttcctgattatca

SEQ ID NO: 1822 - RNA, 20 nt, synthetic construct
  source 1..20: mol_type = other RNA
ggaacaaaaagagatcaacc

SEQ ID NO: 1823 - RNA, 20 nt, synthetic construct
  source 1..20: mol_type = other RNA
accgggaatgctgaatccag

SEQ ID NO: 1824 - RNA, 20 nt, synthetic construct
  source 1..20: mol_type = other RNA
agcaataaaatgccttgaag

SEQ ID NO: 1825 - RNA, 20 nt, synthetic construct
  source 1..20: mol_type = other RNA
gacatggatgaccttcaagg

SEQ ID NO: 1826 - RNA, 20 nt, synthetic construct
  source 1..20: mol_type = other RNA
atgtcggataaatgcatatt

SEQ ID NO: 1827 - RNA, 20 nt, synthetic construct
  source 1..20: mol_type = other RNA
gcaggcttatgtaacaagag

SEQ ID NO: 1828 - RNA, 20 nt, synthetic construct
  source 1..20: mol_type = other RNA
acatttgccaattgctggat

SEQ ID NO: 1829 - RNA, 20 nt, synthetic construct
  source 1..20: mol_type = other RNA
atctacatttgccaattgct

SEQ ID NO: 1830 - RNA, 20 nt, synthetic construct
  source 1..20: mol_type = other RNA
agcaattggcaaatgtagat

SEQ ID NO: 1831 - RNA, 20 nt, synthetic construct
  source 1..20: mol_type = other RNA
agaaaatattttgcatttac

SEQ ID NO: 1832 - RNA, 20 nt, synthetic construct
  source 1..20: mol_type = other RNA
aatttctatatctttgtaaa

SEQ ID NO: 1833 - RNA, 20 nt, synthetic construct
  source 1..20: mol_type = other RNA
ttgtaaatgagagttgacta

SEQ ID NO: 1834 - RNA, 20 nt, synthetic construct
  source 1..20: mol_type = other RNA
ttttgtttcaagtagtcaac

SEQ ID NO: 1835 - RNA, 20 nt, synthetic construct
  source 1..20: mol_type = other RNA
tgctatcattttgtttcaag

SEQ ID NO: 1836 - RNA, 20 nt, synthetic construct
  source 1..20: mol_type = other RNA
cttcgtgatttatgctacca

SEQ ID NO: 1837 - RNA, 20 nt, synthetic construct
  source 1..20: mol_type = other RNA
cgaagggattaattcgaagt

SEQ ID NO: 1838 - RNA, 20 nt, synthetic construct
  source 1..20: mol_type = other RNA
tgcatgaggtaaagaaactt

SEQ ID NO: 1839 - RNA, 20 nt, synthetic construct
  source 1..20: mol_type = other RNA
cttcgaacccgcacagtacc

SEQ ID NO: 1840 - RNA, 20 nt, synthetic construct
  source 1..20: mol_type = other RNA
tagagcaatcacaaaggttt

SEQ ID NO: 1841 - RNA, 20 nt, synthetic construct
  source 1..20: mol_type = other RNA
caaaggtttgaactctgagg

SEQ ID NO: 1842 - RNA, 20 nt, synthetic construct
  source 1..20: mol_type = other RNA
agttgctcattgaaccagct

SEQ ID NO: 1843 - RNA, 20 nt, synthetic construct
  source 1..20: mol_type = other RNA
tcacattcatgacctctggc

SEQ ID NO: 1844 - RNA, 20 nt, synthetic construct
  source 1..20: mol_type = other RNA
tgaagcattcgctcttcctt

SEQ ID NO: 1845 - RNA, 20 nt, synthetic construct
  source 1..20: mol_type = other RNA
ccgcagcccaaactactcgc

SEQ ID NO: 1846 - RNA, 20 nt, synthetic construct
  source 1..20: mol_type = other RNA
gaagaggtcggacagctacg

SEQ ID NO: 1847 - RNA, 20 nt, synthetic construct
  source 1..20: mol_type = other RNA
cttagtccaccctgccgtct

SEQ ID NO: 1848 - RNA, 20 nt, synthetic construct
  source 1..20: mol_type = other RNA
ccctttccctcagtcccgga

SEQ ID NO: 1849 - RNA, 20 nt, synthetic construct
  source 1..20: mol_type = other RNA
ctagaaggggttcctaggca

SEQ ID NO: 1850 - RNA, 20 nt, synthetic construct
  source 1..20: mol_type = other RNA
tgcctgggagcaagttttcc

SEQ ID NO: 1851 - RNA, 20 nt, synthetic construct
  source 1..20: mol_type = other RNA
aggaggatagccgttccagg

SEQ ID NO: 1852 - RNA, 20 nt, synthetic construct
  source 1..20: mol_type = other RNA
tcctggatgacgtgtgtttt

SEQ ID NO: 1853 - RNA, 20 nt, synthetic construct
  source 1..20: mol_type = other RNA
ctctcggtaggacttcatat

SEQ ID NO: 1854 - RNA, 20 nt, synthetic construct
  source 1..20: mol_type = other RNA
gtctagtctccgtatctctc

SEQ ID NO: 1855 - RNA, 20 nt, synthetic construct
  source 1..20: mol_type = other RNA
gtatctgtctagtctccgta

SEQ ID NO: 1856 - RNA, 20 nt, synthetic construct
  source 1..20: mol_type = other RNA
cacaatacagacgtcaaaac

SEQ ID NO: 1857 - RNA, 20 nt, synthetic construct
  source 1..20: mol_type = other RNA
ctctggaataactggtatgg

SEQ ID NO: 1858 - RNA, 20 nt, synthetic construct
  source 1..20: mol_type = other RNA
atctctctggaataactggt

SEQ ID NO: 1859 - RNA, 20 nt, synthetic construct
  source 1..20: mol_type = other RNA
gagtattctccttctgcctt

SEQ ID NO: 1860 - RNA, 20 nt, synthetic construct
  source 1..20: mol_type = other RNA
tttttcggccacgtgtgtgt

SEQ ID NO: 1861 - RNA, 20 nt, synthetic construct
  source 1..20: mol_type = other RNA
cagtgtttctaagaagcgtt

SEQ ID NO: 1862 - RNA, 20 nt, synthetic construct
  source 1..20: mol_type = other RNA
aaagtagcaaacgcttctta

SEQ ID NO: 1863 - RNA, 20 nt, synthetic construct
  source 1..20: mol_type = other RNA
ctcatacttaatagattatt

SEQ ID NO: 1864 - RNA, 20 nt, synthetic construct
  source 1..20: mol_type = other RNA
attaagtatgagagatgtgc

SEQ ID NO: 1865 - RNA, 20 nt, synthetic construct
  source 1..20: mol_type = other RNA
tctctgcacatctctcatac

SEQ ID NO: 1866 - RNA, 20 nt, synthetic construct
  source 1..20: mol_type = other RNA
ctaatcctctctgcacatct

SEQ ID NO: 1867 - RNA, 20 nt, synthetic construct
  source 1..20: mol_type = other RNA
agagccatttttgctggtgg

SEQ ID NO: 1868 - RNA, 20 nt, synthetic construct
  source 1..20: mol_type = other RNA
tatggtacttttaatgggaa

SEQ ID NO: 1869 - RNA, 20 nt, synthetic construct
  source 1..20: mol_type = other RNA
agccactggaaattccaaaa

SEQ ID NO: 1870 - RNA, 20 nt, synthetic construct
  source 1..20: mol_type = other RNA
ttttggaatttccagtggct

SEQ ID NO: 1871 - RNA, 20 nt, synthetic construct
  source 1..20: mol_type = other RNA
ggattcctgcagtagttcat

SEQ ID NO: 1872 - RNA, 20 nt, synthetic construct
  source 1..20: mol_type = other RNA
tgaactactgcaggaatcca

SEQ ID NO: 1873 - RNA, 20 nt, synthetic construct
  source 1..20: mol_type = other RNA
agatgctgtggcagctcctt

SEQ ID NO: 1874 - RNA, 20 nt, synthetic construct
  source 1..20: mol_type = other RNA
ctcgtataacaataaggagc

SEQ ID NO: 1875 - RNA, 20 nt, synthetic construct
  source 1..20: mol_type = other RNA
cggtgtcaggtgggagtact

SEQ ID NO: 1876 - RNA, 20 nt, synthetic construct
  source 1..20: mol_type = other RNA
aagcgtgtagatgtctggcc

SEQ ID NO: 1877 - RNA, 20 nt, synthetic construct
  source 1..20: mol_type = other RNA
cagcatcgaagcgtgtagat

SEQ ID NO: 1878 - RNA, 20 nt, synthetic construct
  source 1..20: mol_type = other RNA
acacgcttcgatgctgggat

SEQ ID NO: 1879 - RNA, 20 nt, synthetic construct
  source 1..20: mol_type = other RNA
gtgggaatttccatggcttt

SEQ ID NO: 1880 - RNA, 20 nt, synthetic construct
  source 1..20: mol_type = other RNA
gtttaccattgaaggcggct

SEQ ID NO: 1881 - RNA, 20 nt, synthetic construct
  source 1..20: mol_type = other RNA
ctccgctggctcccccagag

SEQ ID NO: 1882 - RNA, 20 nt, synthetic construct
  source 1..20: mol_type = other RNA
taaagacaaagcccaaccac

SEQ ID NO: 1883 - RNA, 20 nt, synthetic construct
  source 1..20: mol_type = other RNA
ccctggagggtttgtgccca

SEQ ID NO: 1884 - RNA, 20 nt, synthetic construct
  source 1..20: mol_type = other RNA
acttcaaaattcaccttgtt

SEQ ID NO: 1885 - RNA, 20 nt, synthetic construct
  source 1..20: mol_type = other RNA
ccggaaaagcttactggctt

SEQ ID NO: 1886 - RNA, 20 nt, synthetic construct
  source 1..20: mol_type = other RNA
gcaatgctgaagattgctct

SEQ ID NO: 1887 - RNA, 20 nt, synthetic construct
  source 1..20: mol_type = other RNA
tcagcattgcagattctgag

SEQ ID NO: 1888 - RNA, 20 nt, synthetic construct
  source 1..20: mol_type = other RNA
atgcagccctcttaggtttc

SEQ ID NO: 1889 - RNA, 20 nt, synthetic construct
  source 1..20: mol_type = other RNA
ctcccttcaaagcctagggc

SEQ ID NO: 1890 - RNA, 20 nt, synthetic construct
  source 1..20: mol_type = other RNA
gaaagaggtttaagaatact

SEQ ID NO: 1891 - RNA, 20 nt, synthetic construct
  source 1..20: mol_type = other RNA
tgaattgtagtaaagtagga

SEQ ID NO: 1892 - RNA, 20 nt, synthetic construct
  source 1..20: mol_type = other RNA
tctcatgccctgcatcctga

SEQ ID NO: 1893 - RNA, 20 nt, synthetic construct
  source 1..20: mol_type = other RNA
ctgagaagcaaagtgtcttt

SEQ ID NO: 1894 - RNA, 20 nt, synthetic construct
  source 1..20: mol_type = other RNA
gactgaagacaaagacactt

SEQ ID NO: 1895 - RNA, 20 nt, synthetic construct
  source 1..20: mol_type = other RNA
tgaaagccaaggcctttggc

SEQ ID NO: 1896 - RNA, 20 nt, synthetic construct
  source 1..20: mol_type = other RNA
acggtctagggaaacatgca

SEQ ID NO: 1897 - RNA, 20 nt, synthetic construct
  source 1..20: mol_type = other RNA
tcatgcaaacggcaccgcat

SEQ ID NO: 1898 - RNA, 20 nt, synthetic construct
  source 1..20: mol_type = other RNA
gattcctcattggaaagtga

SEQ ID NO: 1899 - RNA, 20 nt, synthetic construct
  source 1..20: mol_type = other RNA
gatctgttgtgtttctctaa

SEQ ID NO: 1900 - RNA, 20 nt, synthetic construct
  source 1..20: mol_type = other RNA
gttgtgtttctctaaggtgt

SEQ ID NO: 1901 - RNA, 20 nt, synthetic construct
  source 1..20: mol_type = other RNA
gttgctttggtgtttgtttg

SEQ ID NO: 1902 - RNA, 20 nt, synthetic construct
  source 1..20: mol_type = other RNA
ataggcagatggatgtgaga

SEQ ID NO: 1903 - RNA, 20 nt, synthetic construct
  source 1..20: mol_type = other RNA
atctgcctatggataaggaa

SEQ ID NO: 1904 - RNA, 20 nt, synthetic construct
  source 1..20: mol_type = other RNA
gcctatggataaggaaaaga

SEQ ID NO: 1905 - RNA, 20 nt, synthetic construct
  source 1..20: mol_type = other RNA
ctgagcatagagaaacatgt

SEQ ID NO: 1906 - RNA, 20 nt, synthetic construct
  source 1..20: mol_type = other RNA
agctgagtatctctgagcat

SEQ ID NO: 1907 - RNA, 20 nt, synthetic construct
  source 1..20: mol_type = other RNA
aggcacatactccaccactg

SEQ ID NO: 1908 - RNA, 20 nt, synthetic construct
  source 1..20: mol_type = other RNA
atgacaccacactcgcatag

SEQ ID NO: 1909 - RNA, 20 nt, synthetic construct
  source 1..20: mol_type = other RNA
cttgtaacagaaacttcact

SEQ ID NO: 1910 - RNA, 20 nt, synthetic construct
  source 1..20: mol_type = other RNA
gtcacaagttgagttcggag

SEQ ID NO: 1911 - RNA, 20 nt, synthetic construct
  source 1..20: mol_type = other RNA
gcatctgtcacaagttgagt

SEQ ID NO: 1912 - RNA, 20 nt, synthetic construct
  source 1..20: mol_type = other RNA
tgagacattttgctacgcca

SEQ ID NO: 1913 - RNA, 20 nt, synthetic construct
  source 1..20: mol_type = other RNA
tcctgagacattttgctacg

SEQ ID NO: 1914 - RNA, 20 nt, synthetic construct
  source 1..20: mol_type = other RNA
cctcacctccagatttccct

SEQ ID NO: 1915 - RNA, 20 nt, synthetic construct
  source 1..20: mol_type = other RNA
ggaggtgaggagatcacatt

SEQ ID NO: 1916 - RNA, 20 nt, synthetic construct
  source 1..20: mol_type = other RNA
cattatgaagaaagtcagaa

SEQ ID NO: 1917 - RNA, 20 nt, synthetic construct
  source 1..20: mol_type = other RNA
aagtgtctggtcctttgtca

SEQ ID NO: 1918 - RNA, 20 nt, synthetic construct
  source 1..20: mol_type = other RNA
attcacctgtccataaataa

SEQ ID NO: 1919 - RNA, 20 nt, synthetic construct
  source 1..20: mol_type = other RNA
gtttctatatctacgtatat

SEQ ID NO: 1920 - RNA, 20 nt, synthetic construct
  source 1..20: mol_type = other RNA
gaatatacgtagatatagaa

SEQ ID NO: 1921 - RNA, 20 nt, synthetic construct
  source 1..20: mol_type = other RNA
acgtatattccgattgtcag

SEQ ID NO: 1922 - RNA, 20 nt, synthetic construct
  source 1..20: mol_type = other RNA
cttcaggccactggtactta

SEQ ID NO: 1923 - RNA, 20 nt, synthetic construct
  source 1..20: mol_type = other RNA
tctcttgctgggaacctgta

SEQ ID NO: 1924 - RNA, 20 nt, synthetic construct
  source 1..20: mol_type = other RNA
gccttccttccttggatctt

SEQ ID NO: 1925 - RNA, 20 nt, synthetic construct
  source 1..20: mol_type = other RNA
aaggaaggaaggcagatgag

SEQ ID NO: 1926 - RNA, 20 nt, synthetic construct
  source 1..20: mol_type = other RNA
ctctctgtgctgactctcat

SEQ ID NO: 1927 - RNA, 20 nt, synthetic construct
  source 1..20: mol_type = other RNA
cttttacttttcagcatccc

SEQ ID NO: 1928 - RNA, 20 nt, synthetic construct
  source 1..20: mol_type = other RNA
acccatcccttttacttttc

SEQ ID NO: 1929 - RNA, 20 nt, synthetic construct
  source 1..20: mol_type = other RNA
gttgtcccacatgtagaaac

SEQ ID NO: 1930 - RNA, 20 nt, synthetic construct
  source 1..20: mol_type = other RNA
ttgcccctctctcaattctc

SEQ ID NO: 1931 - RNA, 20 nt, synthetic construct
  source 1..20: mol_type = other RNA
gcggagtggagcccatcatt

SEQ ID NO: 1932 - RNA, 20 nt, synthetic construct
  source 1..20: mol_type = other RNA
aggaagaaagccaaggcatc

SEQ ID NO: 1933 - RNA, 20 nt, synthetic construct
  source 1..20: mol_type = other RNA
ccttgctattcagtgcagga

SEQ ID NO: 1934 - RNA, 20 nt, synthetic construct
  source 1..20: mol_type = other RNA
ctctcctccattcagcaaga

SEQ ID NO: 1935 - RNA, 20 nt, synthetic construct
  source 1..20: mol_type = other RNA
tgctgaatggaggagaggga

SEQ ID NO: 1936 - RNA, 20 nt, synthetic construct
  source 1..20: mol_type = other RNA
caaactccaatccctctcct

SEQ ID NO: 1937 - RNA, 20 nt, synthetic construct
  source 1..20: mol_type = other RNA
ctctcttctttattgagctt

SEQ ID NO: 1938 - RNA, 20 nt, synthetic construct
  source 1..20: mol_type = other RNA
cagagtgctatgtgatctct

SEQ ID NO: 1939 - RNA, 20 nt, synthetic construct
  source 1..20: mol_type = other RNA
catagcactctgggatactg

SEQ ID NO: 1940 - RNA, 20 nt, synthetic construct
  source 1..20: mol_type = other RNA
aatcggtttccaatcaatga

SEQ ID NO: 1941 - RNA, 20 nt, synthetic construct
  source 1..20: mol_type = other RNA
gtttccaatcaatgaagtgc

SEQ ID NO: 1942 - RNA, 20 nt, synthetic construct
  source 1..20: mol_type = other RNA
atgaagtgcctgtgagagga

SEQ ID NO: 1943 - RNA, 20 nt, synthetic construct
  source 1..20: mol_type = other RNA
caactctctttagaagtaaa

SEQ ID NO: 1944 - RNA, 20 nt, synthetic construct
  source 1..20: mol_type = other RNA
actttgttgtttacttctaa

SEQ ID NO: 1945 - RNA, 20 nt, synthetic construct
  source 1..20: mol_type = other RNA
gcagagtgagtcctaaattt

SEQ ID NO: 1946 - RNA, 20 nt, synthetic construct
  source 1..20: mol_type = other RNA
gactacatgtagaaaagcgt

SEQ ID NO: 1947 - RNA, 20 nt, synthetic construct
  source 1..20: mol_type = other RNA
ggtaatacaaacaggctcag

SEQ ID NO: 1948 - RNA, 20 nt, synthetic construct
  source 1..20: mol_type = other RNA
tttctctcattcctgagcct

SEQ ID NO: 1949 - RNA, 20 nt, synthetic construct
  source 1..20: mol_type = other RNA
tactgatatgtcaaattttc

SEQ ID NO: 1950 - RNA, 20 nt, synthetic construct
  source 1..20: mol_type = other RNA
gttatcatactgatatgtca

SEQ ID NO: 1951 - RNA, 20 nt, synthetic construct
  source 1..20: mol_type = other RNA
gtatgataactgatttcaaa

SEQ ID NO: 1952 - RNA, 20 nt, synthetic construct
  source 1..20: mol_type = other RNA
gctttcttgcatgttgtttt

SEQ ID NO: 1953 - RNA, 20 nt, synthetic construct
  source 1..20: mol_type = other RNA
tatcaagagaaattaacagt

SEQ ID NO: 1954 - RNA, 20 nt, synthetic construct
  source 1..20: mol_type = other RNA
agagaaattaacagtacaga

SEQ ID NO: 1955 - RNA, 20 nt, synthetic construct
  source 1..20: mol_type = other RNA
gccggccatacagtaatttt

SEQ ID NO: 1956 - RNA, 20 nt, synthetic construct
  source 1..20: mol_type = other RNA
atttagacgtttcagaggaa

SEQ ID NO: 1957 - RNA, 20 nt, synthetic construct
  source 1..20: mol_type = other RNA
tttcatattttcctacatgt

SEQ ID NO: 1958 - RNA, 20 nt, synthetic construct
  source 1..20: mol_type = other RNA
ttgattccggtatttgtttc

SEQ ID NO: 1959 - RNA, 20 nt, synthetic construct
  source 1..20: mol_type = other RNA
gccatccttgattccggtat

SEQ ID NO: 1960 - RNA, 20 nt, synthetic construct
  source 1..20: mol_type = other RNA
aggatggctgataacttttc

SEQ ID NO: 1961 - RNA, 20 nt, synthetic construct
  source 1..20: mol_type = other RNA
cttgagtttcacgattctgt

SEQ ID NO: 1962 - RNA, 20 nt, synthetic construct
  source 1..20: mol_type = other RNA
cagaatcgtgaaactcaagg

SEQ ID NO: 1963 - RNA, 20 nt, synthetic construct
  source 1..20: mol_type = other RNA
tgaaactcaagggatcacat

SEQ ID NO: 1964 - RNA, 20 nt, synthetic construct
  source 1..20: mol_type = other RNA
catagggaatttcggaaaaa

SEQ ID NO: 1965 - RNA, 20 nt, synthetic construct
  source 1..20: mol_type = other RNA
tacaggttgggttttttttc

SEQ ID NO: 1966 - RNA, 20 nt, synthetic construct
  source 1..20: mol_type = other RNA
cagttcgaaggtaacaaggc

SEQ ID NO: 1967 - RNA, 20 nt, synthetic construct
  source 1..20: mol_type = other RNA
ttgccttgttaccttcgaac

SEQ ID NO: 1968 - RNA, 20 nt, synthetic construct
  source 1..20: mol_type = other RNA
gtgtacttgtaggaagacac

SEQ ID NO: 1969 - RNA, 20 nt, synthetic construct
  source 1..20: mol_type = other RNA
ggcttccagtgtttctgagg

SEQ ID NO: 1970 - RNA, 20 nt, synthetic construct
  source 1..20: mol_type = other RNA
ttttaacaatattccctggt

SEQ ID NO: 1971 - RNA, 20 nt, synthetic construct
  source 1..20: mol_type = other RNA
ctttttgttcctgattatca

SEQ ID NO: 1972 - RNA, 20 nt, synthetic construct
  source 1..20: mol_type = other RNA
ggaacaaaaagagatcaacc

SEQ ID NO: 1973 - RNA, 20 nt, synthetic construct
  source 1..20: mol_type = other RNA
accgggaatgctgaatccag

SEQ ID NO: 1974 - RNA, 20 nt, synthetic construct
  source 1..20: mol_type = other RNA
tcaaggcattttattgctgg

SEQ ID NO: 1975 - RNA, 20 nt, synthetic construct
  source 1..20: mol_type = other RNA
agcaataaaatgccttgaag

SEQ ID NO: 1976 - RNA, 20 nt, synthetic construct
  source 1..20: mol_type = other RNA
gacatggatgatcttcaagg

SEQ ID NO: 1977 - RNA, 20 nt, synthetic construct
  source 1..20: mol_type = other RNA
tccatgtcggataaatgcat

SEQ ID NO: 1978 - RNA, 20 nt, synthetic construct
  source 1..20: mol_type = other RNA
atgtcggataaatgcatatt

SEQ ID NO: 1979 - RNA, 20 nt, synthetic construct
  source 1..20: mol_type = other RNA
gcaggcttatgtaacaagag

SEQ ID NO: 1980 - RNA, 20 nt, synthetic construct
  source 1..20: mol_type = other RNA
acatttgccaattgctggat

SEQ ID NO: 1981 - RNA, 20 nt, synthetic construct
  source 1..20: mol_type = other RNA
atctacatttgccaattgct

SEQ ID NO: 1982 - RNA, 20 nt, synthetic construct
  source 1..20: mol_type = other RNA
agcaattggcaaatgtagat

SEQ ID NO: 1983 - RNA, 20 nt, synthetic construct
  source 1..20: mol_type = other RNA
agaaaatattttgcatttac

SEQ ID NO: 1984 - RNA, 20 nt, synthetic construct
  source 1..20: mol_type = other RNA
aatttctatatctttgtaaa

SEQ ID NO: 1985 - RNA, 20 nt, synthetic construct
  source 1..20: mol_type = other RNA
ttgtaaatgagagttgacta

SEQ ID NO: 1986 - RNA, 20 nt, synthetic construct
  source 1..20: mol_type = other RNA
ttttgtttcaagtagtcaac

SEQ ID NO: 1987 - RNA, 20 nt, synthetic construct
  source 1..20: mol_type = other RNA
tgctatcattttgtttcaag

SEQ ID NO: 1988 - RNA, 20 nt, synthetic construct
  source 1..20: mol_type = other RNA
cttcgtgatttatgctacca

SEQ ID NO: 1989 - RNA, 20 nt, synthetic construct
  source 1..20: mol_type = other RNA
cgaagggattaattcgaagt

SEQ ID NO: 1990 - RNA, 20 nt, synthetic construct
  source 1..20: mol_type = other RNA
tgcatgaggtaaagaaactt

SEQ ID NO: 1991 - RNA, 20 nt, synthetic construct
  source 1..20: mol_type = other RNA
cttcgaacccgcacagtacc

SEQ ID NO: 1992 - RNA, 20 nt, synthetic construct
  source 1..20: mol_type = other RNA
tagagcaatcacaaaggttt

SEQ ID NO: 1993 - RNA, 20 nt, synthetic construct
  source 1..20: mol_type = other RNA
caaaggtttgaactctgagg

SEQ ID NO: 1994 - RNA, 20 nt, synthetic construct
  source 1..20: mol_type = other RNA
agttgctcattgaaccagct

SEQ ID NO: 1995 - RNA, 20 nt, synthetic construct
  source 1..20: mol_type = other RNA
tcacattcatgacctctggc

SEQ ID NO: 1996 - RNA, 20 nt, synthetic construct
  source 1..20: mol_type = other RNA
tgaagcattcgctcttcctt

SEQ ID NO: 1997 - RNA, 20 nt, synthetic construct
  source 1..20: mol_type = other RNA
ccgcagcccaaactactcgc

SEQ ID NO: 1998 - RNA, 20 nt, synthetic construct
  source 1..20: mol_type = other RNA
gaagaggtcggacagctacg

SEQ ID NO: 1999 - RNA, 20 nt, synthetic construct
  source 1..20: mol_type = other RNA
cttagtccaccctgccgtct

SEQ ID NO: 2000 - RNA, 20 nt, synthetic construct
  source 1..20: mol_type = other RNA
ccctttccctcagtcccgga

SEQ ID NO: 2001 - RNA, 20 nt, synthetic construct
  source 1..20: mol_type = other RNA
ctagaaggggttcctaggca

SEQ ID NO: 2002 - RNA, 20 nt, synthetic construct
  source 1..20: mol_type = other RNA
tgcctgggagcaagttttcc

SEQ ID NO: 2003 - RNA, 20 nt, synthetic construct
  source 1..20: mol_type = other RNA
aggaggatagccgttccagg

SEQ ID NO: 2004 - RNA, 20 nt, synthetic construct
  source 1..20: mol_type = other RNA
tcctggatgacgtgtgtttt

SEQ ID NO: 2005 - RNA, 20 nt, synthetic construct
  source 1..20: mol_type = other RNA
ctctcggtaggacttcatat

SEQ ID NO: 2006 - RNA, 20 nt, synthetic construct
  source 1..20: mol_type = other RNA
gtctagtctccgtatctctc

SEQ ID NO: 2007 - RNA, 20 nt, synthetic construct
  source 1..20: mol_type = other RNA
gtatctgtctagtctccgta

SEQ ID NO: 2008 - RNA, 20 nt, synthetic construct
  source 1..20: mol_type = other RNA
cacaatacagacgtcaaaac

SEQ ID NO: 2009 - RNA, 20 nt, synthetic construct
  source 1..20: mol_type = other RNA
ctctggaataactggtatgg

SEQ ID NO: 2010 - RNA, 20 nt, synthetic construct
  source 1..20: mol_type = other RNA
atctctctggaataactggt

SEQ ID NO: 2011 - RNA, 20 nt, synthetic construct
  source 1..20: mol_type = other RNA
gagtattctccttctgcctc

SEQ ID NO: 2012 - RNA, 20 nt, synthetic construct
  source 1..20: mol_type = other RNA
tttttcggccacgtgtgtgt

SEQ ID NO: 2013 - RNA, 20 nt, synthetic construct
  source 1..20: mol_type = other RNA
cagtgtttctaagaagcgtt

SEQ ID NO: 2014 - RNA, 20 nt, synthetic construct
  source 1..20: mol_type = other RNA
aaagtagcaaacgcttctta

SEQ ID NO: 2015 - RNA, 20 nt, synthetic construct
  source 1..20: mol_type = other RNA
ctcatacttaatagattatt

SEQ ID NO: 2016 - RNA, 20 nt, synthetic construct
  source 1..20: mol_type = other RNA
attaagtatgagagatgtgc

SEQ ID NO: 2017 - RNA, 20 nt, synthetic construct
  source 1..20: mol_type = other RNA
tctctgcacatctctcatac

SEQ ID NO: 2018 - RNA, 20 nt, synthetic construct
  source 1..20: mol_type = other RNA
ctaatcctctctgcacatct

SEQ ID NO: 2019 - RNA, 20 nt, synthetic construct
  source 1..20: mol_type = other RNA
agagccatttttgctggtgg

SEQ ID NO: 2020 - RNA, 20 nt, synthetic construct
  source 1..20: mol_type = other RNA
tatggtacttttaatgggaa

SEQ ID NO: 2021 - RNA, 20 nt, synthetic construct
  source 1..20: mol_type = other RNA
agccactggaaattccaaaa

SEQ ID NO: 2022 - RNA, 20 nt, synthetic construct
  source 1..20: mol_type = other RNA
ttttggaatttccagtggct

SEQ ID NO: 2023 - RNA, 20 nt, synthetic construct
  source 1..20: mol_type = other RNA
ggattcctgcagtagttcat

SEQ ID NO: 2024 - RNA, 20 nt, synthetic construct
  source 1..20: mol_type = other RNA
tgaactactgcaggaatcca

SEQ ID NO: 2025 - RNA, 20 nt, synthetic construct
  source 1..20: mol_type = other RNA
agatgctgtggcagctcctt

SEQ ID NO: 2026 - RNA, 20 nt, synthetic construct
  source 1..20: mol_type = other RNA
ctcgtataacaataaggagc

SEQ ID NO: 2027 - RNA, 20 nt, synthetic construct
  source 1..20: mol_type = other RNA
cggtgtcaggtgggagtact

SEQ ID NO: 2028 - RNA, 20 nt, synthetic construct
  source 1..20: mol_type = other RNA
aagcgtgtagatgtctggcc

SEQ ID NO: 2029 - RNA, 20 nt, synthetic construct
  source 1..20: mol_type = other RNA
cagcatcgaagcgtgtagat

SEQ ID NO: 2030 - RNA, 20 nt, synthetic construct
  source 1..20: mol_type = other RNA
acacgcttcgatgctgggat

SEQ ID NO: 2031 - RNA, 20 nt, synthetic construct
  source 1..20: mol_type = other RNA
gtgggaatttccatggcttt

SEQ ID NO: 2032 - RNA, 20 nt, synthetic construct
  source 1..20: mol_type = other RNA
gtttaccattgaaggcggct

SEQ ID NO: 2033 - RNA, 20 nt, synthetic construct
  source 1..20: mol_type = other RNA
ctccgctggctcccccagag

SEQ ID NO: 2034 - RNA, 20 nt, synthetic construct
  source 1..20: mol_type = other RNA
ccctggaaggtttgtgccca

SEQ ID NO: 2035 - RNA, 20 nt, synthetic construct
  source 1..20: mol_type = other RNA
cagtgtcttagccaaaattt

SEQ ID NO: 2036 - RNA, 20 nt, synthetic construct
  source 1..20: mol_type = other RNA
cacacctgacagcacgttac

SEQ ID NO: 2037 - RNA, 20 nt, synthetic construct
  source 1..20: mol_type = other RNA
ccagaaaagcttactgcgac

SEQ ID NO: 2038 - RNA, 20 nt, synthetic construct
  source 1..20: mol_type = other RNA
gcaatgctgaagattgcact

SEQ ID NO: 2039 - RNA, 20 nt, synthetic construct
  source 1..20: mol_type = other RNA
tcagcattgcagatttcaaa

SEQ ID NO: 2040 - RNA, 20 nt, synthetic construct
  source 1..20: mol_type = other RNA
tcgagaaacctaacagggct

SEQ ID NO: 2041 - RNA, 20 nt, synthetic construct
  source 1..20: mol_type = other RNA
ctcccttcaaagcctaggac

SEQ ID NO: 2042 - RNA, 20 nt, synthetic construct
  source 1..20: mol_type = other RNA
gaaagaggtttaagaacact

SEQ ID NO: 2043 - RNA, 20 nt, synthetic construct
  source 1..20: mol_type = other RNA
tgaattgcagtaaaggagaa

SEQ ID NO: 2044 - RNA, 20 nt, synthetic construct
  source 1..20: mol_type = other RNA
tctcatgccctgcatcctga

SEQ ID NO: 2045 - RNA, 20 nt, synthetic construct
  source 1..20: mol_type = other RNA
ttgagaagcaaagtgtcttt

SEQ ID NO: 2046 - RNA, 20 nt, synthetic construct
  source 1..20: mol_type = other RNA
gactgaaggcaaagacactt

SEQ ID NO: 2047 - RNA, 20 nt, synthetic construct
  source 1..20: mol_type = other RNA
tatatatctgactgaaggca

SEQ ID NO: 2048 - RNA, 20 nt, synthetic construct
  source 1..20: mol_type = other RNA
ttttctgccccatggcctgg

SEQ ID NO: 2049 - RNA, 20 nt, synthetic construct
  source 1..20: mol_type = other RNA
tgaaagccaaggcctctggc

SEQ ID NO: 2050 - RNA, 20 nt, synthetic construct
  source 1..20: mol_type = other RNA
ttgatcatgaaagccaaggc

SEQ ID NO: 2051 - RNA, 20 nt, synthetic construct
  source 1..20: mol_type = other RNA
acgatctagggaaacatgca

SEQ ID NO: 2052 - RNA, 20 nt, synthetic construct
  source 1..20: mol_type = other RNA
agggaaacatgcaaaatttc

SEQ ID NO: 2053 - RNA, 20 nt, synthetic construct
  source 1..20: mol_type = other RNA
tgcattgccaaatgcagtgc

SEQ ID NO: 2054 - RNA, 20 nt, synthetic construct
  source 1..20: mol_type = other RNA
ttagaaaaacagaacagaac

SEQ ID NO: 2055 - RNA, 20 nt, synthetic construct
  source 1..20: mol_type = other RNA
agaactgtagtaagttctag

SEQ ID NO: 2056 - RNA, 20 nt, synthetic construct
  source 1..20: mol_type = other RNA
gtaggtttgctgtatgtttt

SEQ ID NO: 2057 - RNA, 20 nt, synthetic construct
  source 1..20: mol_type = other RNA
atctgcctacaggtaaggga

SEQ ID NO: 2058 - RNA, 20 nt, synthetic construct
  source 1..20: mol_type = other RNA
ttcccttacctgtaggcaga

SEQ ID NO: 2059 - RNA, 20 nt, synthetic construct
  source 1..20: mol_type = other RNA
gcctacaggtaagggaaaga

SEQ ID NO: 2060 - RNA, 20 nt, synthetic construct
  source 1..20: mol_type = other RNA
ctgagaataacgaaatatgt

SEQ ID NO: 2061 - RNA, 20 nt, synthetic construct
  source 1..20: mol_type = other RNA
aggcacatactccaccactg

SEQ ID NO: 2062 - RNA, 20 nt, synthetic construct
  source 1..20: mol_type = other RNA
atgacaccacactcgcatag

SEQ ID NO: 2063 - RNA, 20 nt, synthetic construct
  source 1..20: mol_type = other RNA
cttgtaacagaaacttcact

SEQ ID NO: 2064 - RNA, 20 nt, synthetic construct
  source 1..20: mol_type = other RNA
gtcacaagttgagttcggag

SEQ ID NO: 2065 - RNA, 20 nt, synthetic construct
  source 1..20: mol_type = other RNA
gcatctgtcacaagttgagt

SEQ ID NO: 2066 - RNA, 20 nt, synthetic construct
  source 1..20: mol_type = other RNA
tgagacattttgctacgcca

SEQ ID NO: 2067 - RNA, 20 nt, synthetic construct
  source 1..20: mol_type = other RNA
tcctgagacattttgctacg

SEQ ID NO: 2068 - RNA, 20 nt, synthetic construct
  source 1..20: mol_type = other RNA
cctcacctccagatttccct

SEQ ID NO: 2069 - RNA, 20 nt, synthetic construct
  source 1..20: mol_type = other RNA
ggaggtgaggagatcacatt

SEQ ID NO: 2070 - RNA, 20 nt, synthetic construct
  source 1..20: mol_type = other RNA
cattatgaagaaagtcagaa

SEQ ID NO: 2071 - RNA, 20 nt, synthetic construct
  source 1..20: mol_type = other RNA
aagtgtctggtcctttgtca

SEQ ID NO: 2072 - RNA, 20 nt, synthetic construct
  source 1..20: mol_type = other RNA
attcacctgtccataaataa

SEQ ID NO: 2073 - RNA, 20 nt, synthetic construct
  source 1..20: mol_type = other RNA
gtttctatatctacgtatat

SEQ ID NO: 2074 - RNA, 20 nt, synthetic construct
  source 1..20: mol_type = other RNA
gaatatacgtagatatagaa

SEQ ID NO: 2075 - RNA, 20 nt, synthetic construct
  source 1..20: mol_type = other RNA
acgtatattccgattgtcag

SEQ ID NO: 2076 - RNA, 20 nt, synthetic construct
  source 1..20: mol_type = other RNA
cttcaggccactggtactta

SEQ ID NO: 2077 - RNA, 20 nt, synthetic construct
  source 1..20: mol_type = other RNA
tctcttgctgggaacctgta

SEQ ID NO: 2078 - RNA, 20 nt, synthetic construct
  source 1..20: mol_type = other RNA
gccttccttccttggatctt

SEQ ID NO: 2079 - RNA, 20 nt, synthetic construct
  source 1..20: mol_type = other RNA
aaggaaggaaggcagatgag

SEQ ID NO: 2080 - RNA, 20 nt, synthetic construct
  source 1..20: mol_type = other RNA
ctctctgtgctggctctcat

SEQ ID NO: 2081 - RNA, 20 nt, synthetic construct
  source 1..20: mol_type = other RNA
cttttacttttcagcatccc

SEQ ID NO: 2082 - RNA, 20 nt, synthetic construct
  source 1..20: mol_type = other RNA
acccatcccttttacttttc

SEQ ID NO: 2083 - RNA, 20 nt, synthetic construct
  source 1..20: mol_type = other RNA
gttgtcccacatgtagaaac

SEQ ID NO: 2084 - RNA, 20 nt, synthetic construct
  source 1..20: mol_type = other RNA
ttgcccctctctcaattctc

SEQ ID NO: 2085 - RNA, 20 nt, synthetic construct
  source 1..20: mol_type = other RNA
gcggagtggagcccatcatt

SEQ ID NO: 2086 - RNA, 20 nt, synthetic construct
  source 1..20: mol_type = other RNA
aggaagaaagccaaggcatc

SEQ ID NO: 2087 - RNA, 20 nt, synthetic construct
  source 1..20: mol_type = other RNA
ccttgctattcagtgcagga

SEQ ID NO: 2088 - RNA, 20 nt, synthetic construct
  source 1..20: mol_type = other RNA
ctctcctccattcagcaaga

SEQ ID NO: 2089 - RNA, 20 nt, synthetic construct
  source 1..20: mol_type = other RNA
tgctgaatggaggagaggga

SEQ ID NO: 2090 - RNA, 20 nt, synthetic construct
  source 1..20: mol_type = other RNA
caaactccaatccctctcct

SEQ ID NO: 2091 - RNA, 20 nt, synthetic construct
  source 1..20: mol_type = other RNA
ctctcttctttattgagctt

SEQ ID NO: 2092 - RNA, 20 nt, synthetic construct
  source 1..20: mol_type = other RNA
cagagtgctatgtgatctct

SEQ ID NO: 2093 - RNA, 20 nt, synthetic construct
  source 1..20: mol_type = other RNA
catagcactctgggatactg

SEQ ID NO: 2094 - RNA, 20 nt, synthetic construct
  source 1..20: mol_type = other RNA
aatcggtttccaatcaatga

SEQ ID NO: 2095 - RNA, 20 nt, synthetic construct
  source 1..20: mol_type = other RNA
gtttccaatcaatgaagtgc

SEQ ID NO: 2096 - RNA, 20 nt, synthetic construct
  source 1..20: mol_type = other RNA
atgaagtgcctgtgggagga

SEQ ID NO: 2097 - RNA, 20 nt, synthetic construct
  source 1..20: mol_type = other RNA
caactctctttagaagtaaa

SEQ ID NO: 2098 - RNA, 20 nt, synthetic construct
  source 1..20: mol_type = other RNA
actttgttgtttacttctaa

SEQ ID NO: 2099 - RNA, 20 nt, synthetic construct
  source 1..20: mol_type = other RNA
gcagagtgagtcctaaattt

SEQ ID NO: 2100 - RNA, 20 nt, synthetic construct
  source 1..20: mol_type = other RNA
gactacatgtagaaaagcgt

SEQ ID NO: 2101 - RNA, 20 nt, synthetic construct
  source 1..20: mol_type = other RNA
ggtaatacaaacaggctcag

SEQ ID NO: 2102 - RNA, 20 nt, synthetic construct
  source 1..20: mol_type = other RNA
tttctctcattcctgagcct

SEQ ID NO: 2103 - RNA, 20 nt, synthetic construct
  source 1..20: mol_type = other RNA
tactgatatgtcaaattttc

SEQ ID NO: 2104 - RNA, 20 nt, synthetic construct
  source 1..20: mol_type = other RNA
gttatcatactgatatgtca

SEQ ID NO: 2105 - RNA, 20 nt, synthetic construct
  source 1..20: mol_type = other RNA
gtatgataactgatttcaaa

SEQ ID NO: 2106 - RNA, 20 nt, synthetic construct
  source 1..20: mol_type = other RNA
gctttcttgcatgttgtttt

SEQ ID NO: 2107 - RNA, 20 nt, synthetic construct
  source 1..20: mol_type = other RNA
tatcaagagaaattaacagt

SEQ ID NO: 2108 - RNA, 20 nt, synthetic construct
  source 1..20: mol_type = other RNA
agagaaattaacagtacaga

SEQ ID NO: 2109 - RNA, 20 nt, synthetic construct
  source 1..20: mol_type = other RNA
gccggccatacagtaatttt

SEQ ID NO: 2110 - RNA, 20 nt, synthetic construct
  source 1..20: mol_type = other RNA
aattagacgtttcagaggaa

SEQ ID NO: 2111 - RNA, 20 nt, synthetic construct
  source 1..20: mol_type = other RNA
tttcatattttcctacatgt

SEQ ID NO: 2112 - RNA, 20 nt, synthetic construct
  source 1..20: mol_type = other RNA
ttgattccggtatttgtttc

SEQ ID NO: 2113 - RNA, 20 nt, synthetic construct
  source 1..20: mol_type = other RNA
gccatccttgattccggtat

SEQ ID NO: 2114 - RNA, 20 nt, synthetic construct
  source 1..20: mol_type = other RNA
aggatggctgataacttttc

SEQ ID NO: 2115 - RNA, 20 nt, synthetic construct
  source 1..20: mol_type = other RNA
cttgagtttcacgattctgt

SEQ ID NO: 2116 - RNA, 20 nt, synthetic construct
  source 1..20: mol_type = other RNA
cagaatcgtgaaactcaagg

SEQ ID NO: 2117 - RNA, 20 nt, synthetic construct
  source 1..20: mol_type = other RNA
tgaaactcaagggatcatat

SEQ ID NO: 2118 - RNA, 20 nt, synthetic construct
  source 1..20: mol_type = other RNA
tatagggaatttcggaaaaa

SEQ ID NO: 2119 - RNA, 20 nt, synthetic construct
  source 1..20: mol_type = other RNA
tacaggttgggttttttttc

SEQ ID NO: 2120 - RNA, 20 nt, synthetic construct
  source 1..20: mol_type = other RNA
cagttcgaaggtaacaaggc

SEQ ID NO: 2121 - RNA, 20 nt, synthetic construct
  source 1..20: mol_type = other RNA
ttgccttgttaccttcgaac

SEQ ID NO: 2122 - RNA, 20 nt, synthetic construct
  source 1..20: mol_type = other RNA
gtgtacttgtaggaagacac

SEQ ID NO: 2123 - RNA, 20 nt, synthetic construct
  source 1..20: mol_type = other RNA
ggcttccagtgtttctgagg

SEQ ID NO: 2124 - RNA, 20 nt, synthetic construct
  source 1..20: mol_type = other RNA
ttttaacaatattccctggt

SEQ ID NO: 2125 - RNA, 20 nt, synthetic construct
  source 1..20: mol_type = other RNA
ctttttgttcctgattatca

SEQ ID NO: 2126 - RNA, 20 nt, synthetic construct
  source 1..20: mol_type = other RNA
ggaacaaaaagagatcaacc

SEQ ID NO: 2127 - RNA, 20 nt, synthetic construct
  source 1..20: mol_type = other RNA
accgggaatgctgaatccag

SEQ ID NO: 2128 - RNA, 20 nt, synthetic construct
  source 1..20: mol_type = other RNA
tcaaggcattttattgctgg

SEQ ID NO: 2129 - RNA, 20 nt, synthetic construct
  source 1..20: mol_type = other RNA
agcaataaaatgccttgaag

SEQ ID NO: 2130 - RNA, 20 nt, synthetic construct
  source 1..20: mol_type = other RNA
gacatggatgatcttcaagg

SEQ ID NO: 2131 - RNA, 20 nt, synthetic construct
  source 1..20: mol_type = other RNA
tccatgtcggataaatgcat

SEQ ID NO: 2132 - RNA, 20 nt, synthetic construct
  source 1..20: mol_type = other RNA
atgtcggataaatgcatatt

SEQ ID NO: 2133 - RNA, 20 nt, synthetic construct
  source 1..20: mol_type = other RNA
gcaggcttatgtaacaagag

SEQ ID NO: 2134 - RNA, 20 nt, synthetic construct
  source 1..20: mol_type = other RNA
acatttgccaattgctggat

SEQ ID NO: 2135 - RNA, 20 nt, synthetic construct
  source 1..20: mol_type = other RNA
atctacatttgccaattgct

SEQ ID NO: 2136 - RNA, 20 nt, synthetic construct
  source 1..20: mol_type = other RNA
agcaattggcaaatgtagat

SEQ ID NO: 2137 - RNA, 20 nt, synthetic construct
  source 1..20: mol_type = other RNA
agaaaatattttgcatttac

SEQ ID NO: 2138 - RNA, 20 nt, synthetic construct
  source 1..20: mol_type = other RNA
aatttctatatctttgtaaa

SEQ ID NO: 2139 - RNA, 20 nt, synthetic construct
  source 1..20: mol_type = other RNA
ttgtaaatgagagttgacta

SEQ ID NO: 2140 - RNA, 20 nt, synthetic construct
  source 1..20: mol_type = other RNA
ttttgtttcaagtagtcaac

SEQ ID NO: 2141 - RNA, 20 nt, synthetic construct
  source 1..20: mol_type = other RNA
tgctatcattttgtttcaag

SEQ ID NO: 2142 - RNA, 20 nt, synthetic construct
  source 1..20: mol_type = other RNA
cttcgtgatttatgctacca

SEQ ID NO: 2143 - RNA, 20 nt, synthetic construct
  source 1..20: mol_type = other RNA
cgaagggattaattcgaagt

SEQ ID NO: 2144 - RNA, 20 nt, synthetic construct
  source 1..20: mol_type = other RNA
tgcatgaggtaaagaaactt

SEQ ID NO: 2145 - RNA, 20 nt, synthetic construct
  source 1..20: mol_type = other RNA
cttcgaacccgcacagtacc

SEQ ID NO: 2146 - RNA, 20 nt, synthetic construct
  source 1..20: mol_type = other RNA
tagagcaatcacaaaggttt

SEQ ID NO: 2147 - RNA, 20 nt, synthetic construct
  source 1..20: mol_type = other RNA
caaaggtttgaactctgagg

SEQ ID NO: 2148 - RNA, 20 nt, synthetic construct
  source 1..20: mol_type = other RNA
agttgctcattgaaccagct

SEQ ID NO: 2149 - RNA, 20 nt, synthetic construct
  source 1..20: mol_type = other RNA
tcacattcatgacctctggc

SEQ ID NO: 2150 - RNA, 20 nt, synthetic construct
  source 1..20: mol_type = other RNA
tgaagcattcgctcttcctt

SEQ ID NO: 2151 - RNA, 20 nt, synthetic construct
  source 1..20: mol_type = other RNA
ccgcagcccaaactactcgc

SEQ ID NO: 2152 - RNA, 20 nt, synthetic construct
  source 1..20: mol_type = other RNA
gaagaggtcggacagctacg

SEQ ID NO: 2153 - RNA, 20 nt, synthetic construct
  source 1..20: mol_type = other RNA
cttagtccaccctgccgtct

SEQ ID NO: 2154 - RNA, 20 nt, synthetic construct
  source 1..20: mol_type = other RNA
ccctttccctcagtcccgga

SEQ ID NO: 2155 - RNA, 20 nt, synthetic construct
  source 1..20: mol_type = other RNA
ctagaaggggttcctaggca

SEQ ID NO: 2156 - RNA, 20 nt, synthetic construct
  source 1..20: mol_type = other RNA
tgcctgggagcaagttttcc

SEQ ID NO: 2157 - RNA, 20 nt, synthetic construct
  source 1..20: mol_type = other RNA
aggaggatagccgttccagg

SEQ ID NO: 2158 - RNA, 20 nt, synthetic construct
  source 1..20: mol_type = other RNA
tcctggatgacgtgcgtttt

SEQ ID NO: 2159 - RNA, 20 nt, synthetic construct
  source 1..20: mol_type = other RNA
ctctcggtaggacttcatat

SEQ ID NO: 2160 - RNA, 20 nt, synthetic construct
  source 1..20: mol_type = other RNA
gtctagtctccgtatctctc

SEQ ID NO: 2161 - RNA, 20 nt, synthetic construct
  source 1..20: mol_type = other RNA
gtatctgtctagtctccgta

SEQ ID NO: 2162 - RNA, 20 nt, synthetic construct
  source 1..20: mol_type = other RNA
cacaatacagacgtcaaaac

SEQ ID NO: 2163 - RNA, 20 nt, synthetic construct
  source 1..20: mol_type = other RNA
ctctggaataactggtatgg

SEQ ID NO: 2164 - RNA, 20 nt, synthetic construct
  source 1..20: mol_type = other RNA
atctctctggaataactggt

SEQ ID NO: 2165 - RNA, 20 nt, synthetic construct
  source 1..20: mol_type = other RNA
gagtattctccttctgcctt

SEQ ID NO: 2166 - RNA, 20 nt, synthetic construct
  source 1..20: mol_type = other RNA
tttttcggccacgtgtgtgt

SEQ ID NO: 2167 - RNA, 20 nt, synthetic construct
  source 1..20: mol_type = other RNA
cagtgtttctaagaagcgtt

SEQ ID NO: 2168 - RNA, 20 nt, synthetic construct
  source 1..20: mol_type = other RNA
aaagtagcaaacgcttctta

SEQ ID NO: 2169 - RNA, 20 nt, synthetic construct
  source 1..20: mol_type = other RNA
ctcatacttaatagattatt

SEQ ID NO: 2170 - RNA, 20 nt, synthetic construct
  source 1..20: mol_type = other RNA
attaagtatgagagatgtgc

SEQ ID NO: 2171 - RNA, 20 nt, synthetic construct
  source 1..20: mol_type = other RNA
tctctgcacatctctcatac

SEQ ID NO: 2172 - RNA, 20 nt, synthetic construct
  source 1..20: mol_type = other RNA
ctaatcctctctgcacatct

SEQ ID NO: 2173 - RNA, 20 nt, synthetic construct
  source 1..20: mol_type = other RNA
agagccatttttgctggtgg

SEQ ID NO: 2174 - RNA, 20 nt, synthetic construct
  source 1..20: mol_type = other RNA
tatggtacttttaatgggaa

SEQ ID NO: 2175 - RNA, 20 nt, synthetic construct
  source 1..20: mol_type = other RNA
agccactggaaattccaaaa

SEQ ID NO: 2176 - RNA, 20 nt, synthetic construct
  source 1..20: mol_type = other RNA
ttttggaatttccagtggct

SEQ ID NO: 2177 - RNA, 20 nt, synthetic construct
  source 1..20: mol_type = other RNA
ggattcctgcagtagttcat

SEQ ID NO: 2178 - RNA, 20 nt, synthetic construct
  source 1..20: mol_type = other RNA
tgaactactgcaggaatcca

SEQ ID NO: 2179 - RNA, 20 nt, synthetic construct
  source 1..20: mol_type = other RNA
agatgctgtggcagctcctt

SEQ ID NO: 2180 - RNA, 20 nt, synthetic construct
  source 1..20: mol_type = other RNA
ctcgtataacaataaggagc

SEQ ID NO: 2181 - RNA, 20 nt, synthetic construct
  source 1..20: mol_type = other RNA
cggtgtcaggtgggagtact

SEQ ID NO: 2182 - RNA, 20 nt, synthetic construct
  source 1..20: mol_type = other RNA
aagcgtgtagatgtctggcc

SEQ ID NO: 2183 - RNA, 20 nt, synthetic construct
  source 1..20: mol_type = other RNA
cagcatcgaagcgtgtagat

SEQ ID NO: 2184 - RNA, 20 nt, synthetic construct
  source 1..20: mol_type = other RNA
acacgcttcgatgctgggat

SEQ ID NO: 2185 - RNA, 20 nt, synthetic construct
  source 1..20: mol_type = other RNA
gtgggaatttccatggcttt

SEQ ID NO: 2186 - RNA, 20 nt, synthetic construct
  source 1..20: mol_type = other RNA
gtttaccattgaaggcggct

SEQ ID NO: 2187 - RNA, 20 nt, synthetic construct
  source 1..20: mol_type = other RNA
ctccgctggctcccccagag

SEQ ID NO: 2188 - RNA, 20 nt, synthetic construct
  source 1..20: mol_type = other RNA
taaagacaaagcccaaccac

SEQ ID NO: 2189 - RNA, 20 nt, synthetic construct
  source 1..20: mol_type = other RNA
ccctggagggtttgtgccca

SEQ ID NO: 2190 - RNA, 20 nt, synthetic construct
  source 1..20: mol_type = other RNA
acttcaaaattcaccttgtt

SEQ ID NO: 2191 - RNA, 20 nt, synthetic construct
  source 1..20: mol_type = other RNA
ccggaaaagcttactggctt

SEQ ID NO: 2192 - RNA, 20 nt, synthetic construct
  source 1..20: mol_type = other RNA
gcaatgctgaagattgctct

SEQ ID NO: 2193 - RNA, 20 nt, synthetic construct
  source 1..20: mol_type = other RNA
tcagcattgcagattctgag

SEQ ID NO: 2194 - RNA, 20 nt, synthetic construct
  source 1..20: mol_type = other RNA
atgcagccctcttaggtttc

SEQ ID NO: 2195 - RNA, 20 nt, synthetic construct
  source 1..20: mol_type = other RNA
ctcccttcaaagcctagggc

SEQ ID NO: 2196 - RNA, 20 nt, synthetic construct
  source 1..20: mol_type = other RNA
gaaagaggtttaagaatact

SEQ ID NO: 2197 - RNA, 20 nt, synthetic construct
  source 1..20: mol_type = other RNA
tgaattgtagtaaagtagga

SEQ ID NO: 2198 - RNA, 20 nt, synthetic construct
  source 1..20: mol_type = other RNA
tctcatgccctgcatcctga

SEQ ID NO: 2199 - RNA, 20 nt, synthetic construct
  source 1..20: mol_type = other RNA
ctgagaagcaaagtgtcttt

SEQ ID NO: 2200 - RNA, 20 nt, synthetic construct
  source 1..20: mol_type = other RNA
gactgaagacaaagacactt

SEQ ID NO: 2201 - RNA, 20 nt, synthetic construct
  source 1..20: mol_type = other RNA
tgaaagccaaggcctttggc

SEQ ID NO: 2202 - RNA, 20 nt, synthetic construct
  source 1..20: mol_type = other RNA
acggtctagggaaacatgca

SEQ ID NO: 2203 - RNA, 20 nt, synthetic construct
  source 1..20: mol_type = other RNA
tcatgcaaacggcaccgcat

SEQ ID NO: 2204 - RNA, 20 nt, synthetic construct
  source 1..20: mol_type = other RNA
gattcctcattggaaagtga

SEQ ID NO: 2205 - RNA, 20 nt, synthetic construct
  source 1..20: mol_type = other RNA
gatctgttgtgtttctctaa

SEQ ID NO: 2206 - RNA, 20 nt, synthetic construct
  source 1..20: mol_type = other RNA
gttgtgtttctctaaggtgt

SEQ ID NO: 2207 - RNA, 20 nt, synthetic construct
  source 1..20: mol_type = other RNA
gttgctttggtgtttgtttg

SEQ ID NO: 2208 - RNA, 20 nt, synthetic construct
  source 1..20: mol_type = other RNA
ataggcagatggatgtgaga

SEQ ID NO: 2209 - RNA, 20 nt, synthetic construct
  source 1..20: mol_type = other RNA
atctgcctatggataaggaa

SEQ ID NO: 2210 - RNA, 20 nt, synthetic construct
  source 1..20: mol_type = other RNA
gcctatggataaggaaaaga

SEQ ID NO: 2211 - RNA, 20 nt, synthetic construct
  source 1..20: mol_type = other RNA
ctgagcatagagaaacatgt

SEQ ID NO: 2212 - RNA, 20 nt, synthetic construct
  source 1..20: mol_type = other RNA
agctgagtatctctgagcat

SEQ ID NO: 2213 - RNA, 20 nt, synthetic construct
  source 1..20: mol_type = other RNA
aggcacatactccaccactg

SEQ ID NO: 2214 - RNA, 20 nt, synthetic construct
  source 1..20: mol_type = other RNA
atgacaccacactcgcatag

SEQ ID NO: 2215 - RNA, 20 nt, synthetic construct
  source 1..20: mol_type = other RNA
cttgtaacagaaacttcact

SEQ ID NO: 2216 - RNA, 20 nt, synthetic construct
  source 1..20: mol_type = other RNA
gtcacaagttgagttcggag

SEQ ID NO: 2217 - RNA, 20 nt, synthetic construct
  source 1..20: mol_type = other RNA
gcatctgtcacaagttgagt

SEQ ID NO: 2218 - RNA, 20 nt, synthetic construct
  source 1..20: mol_type = other RNA
tgagacattttgctacgcca

SEQ ID NO: 2219 - RNA, 20 nt, synthetic construct
  source 1..20: mol_type = other RNA
tcctgagacattttgctacg

SEQ ID NO: 2220 - RNA, 20 nt, synthetic construct
  source 1..20: mol_type = other RNA
cctcacctccagatttccct

SEQ ID NO: 2221 - RNA, 20 nt, synthetic construct
  source 1..20: mol_type = other RNA
ggaggtgaggagatcacatt

SEQ ID NO: 2222 - RNA, 20 nt, synthetic construct
  source 1..20: mol_type = other RNA
cattatgaagaaagtcagaa

SEQ ID NO: 2223 - RNA, 20 nt, synthetic construct
  source 1..20: mol_type = other RNA
aagtgtctggtcctttgtca

SEQ ID NO: 2224 - RNA, 20 nt, synthetic construct
  source 1..20: mol_type = other RNA
attcacctgtccataaataa

SEQ ID NO: 2225 - RNA, 20 nt, synthetic construct
  source 1..20: mol_type = other RNA
gtttctatatctacgtatat

SEQ ID NO: 2226 - RNA, 20 nt, synthetic construct
  source 1..20: mol_type = other RNA
gaatatacgtagatatagaa

SEQ ID NO: 2227 - RNA, 20 nt, synthetic construct
  source 1..20: mol_type = other RNA
acgtatattccgattgtcag

SEQ ID NO: 2228 - RNA, 20 nt, synthetic construct
  source 1..20: mol_type = other RNA
cttcaggccactggtactta

SEQ ID NO: 2229 - RNA, 20 nt, synthetic construct
  source 1..20: mol_type = other RNA
tctcttgctgggaacctgta

SEQ ID NO: 2230 - RNA, 20 nt, synthetic construct
  source 1..20: mol_type = other RNA
gccttccttccttggatctt

SEQ ID NO: 2231 - RNA, 20 nt, synthetic construct
  source 1..20: mol_type = other RNA
aaggaaggaaggcagatgag

SEQ ID NO: 2232 - RNA, 20 nt, synthetic construct
  source 1..20: mol_type = other RNA
ctctctgtgctgactctcat

SEQ ID NO: 2233 - RNA, 20 nt, synthetic construct
  source 1..20: mol_type = other RNA
cttttacttttcagcatccc

SEQ ID NO: 2234 - RNA, 20 nt, synthetic construct
  source 1..20: mol_type = other RNA
acccatcccttttacttttc

SEQ ID NO: 2235 - RNA, 20 nt, synthetic construct
  source 1..20: mol_type = other RNA
gttgtcccacatgtagaaac

SEQ ID NO: 2236 - RNA, 20 nt, synthetic construct
  source 1..20: mol_type = other RNA
ttgcccctctctcaattctc

SEQ ID NO: 2237 - RNA, 20 nt, synthetic construct
  source 1..20: mol_type = other RNA
gcggagtggagcccatcatt

SEQ ID NO: 2238 - RNA, 20 nt, synthetic construct
  source 1..20: mol_type = other RNA
aggaagaaagccaaggcatc

SEQ ID NO: 2239 - RNA, 20 nt, synthetic construct
  source 1..20: mol_type = other RNA
ccttgctattcagtgcagga

SEQ ID NO: 2240 - RNA, 20 nt, synthetic construct
  source 1..20: mol_type = other RNA
ctctcctccattcagcaaga

SEQ ID NO: 2241 - RNA, 20 nt, synthetic construct
  source 1..20: mol_type = other RNA
tgctgaatggaggagaggga

SEQ ID NO: 2242 - RNA, 20 nt, synthetic construct
  source 1..20: mol_type = other RNA
caaactccaatccctctcct

SEQ ID NO: 2243 - RNA, 20 nt, synthetic construct
  source 1..20: mol_type = other RNA
ctctcttctttattgagctt

SEQ ID NO: 2244 - RNA, 20 nt, synthetic construct
  source 1..20: mol_type = other RNA
cagagtgctatgtgatctct

SEQ ID NO: 2245 - RNA, 20 nt, synthetic construct
  source 1..20: mol_type = other RNA
catagcactctgggatactg

SEQ ID NO: 2246 - RNA, 20 nt, synthetic construct
  source 1..20: mol_type = other RNA
aatcggtttccaatcaatga

SEQ ID NO: 2247 - RNA, 20 nt, synthetic construct
  source 1..20: mol_type = other RNA
gtttccaatcaatgaagtgc

SEQ ID NO: 2248 - RNA, 20 nt, synthetic construct
  source 1..20: mol_type = other RNA
atgaagtgcctgtgagagga

SEQ ID NO: 2249 - RNA, 20 nt, synthetic construct
  source 1..20: mol_type = other RNA
caactctctttagaagtaaa

SEQ ID NO: 2250 - RNA, 20 nt, synthetic construct
  source 1..20: mol_type = other RNA
actttgttgtttacttctaa

SEQ ID NO: 2251 - RNA, 20 nt, synthetic construct
  source 1..20: mol_type = other RNA
gcagagtgagtcctaaattt

SEQ ID NO: 2252 - RNA, 20 nt, synthetic construct
  source 1..20: mol_type = other RNA
gactacatgtagaaaagcgt

SEQ ID NO: 2253 - RNA, 20 nt, synthetic construct
  source 1..20: mol_type = other RNA
ggtaatacaaacaggctcag

SEQ ID NO: 2254 - RNA, 20 nt, synthetic construct
  source 1..20: mol_type = other RNA
tttctctcattcctgagcct

SEQ ID NO: 2255 - RNA, 20 nt, synthetic construct
  source 1..20: mol_type = other RNA
tactgatatttcaaattttc

SEQ ID NO: 2256 - RNA, 20 nt, synthetic construct
  source 1..20: mol_type = other RNA
gttatcatactgatatttca

SEQ ID NO: 2257 - RNA, 20 nt, synthetic construct
  source 1..20: mol_type = other RNA
gtatgataactgatttcaaa

SEQ ID NO: 2258 - RNA, 20 nt, synthetic construct
  source 1..20: mol_type = other RNA
gctttcttgcatgttgtttt

SEQ ID NO: 2259 - RNA, 20 nt, synthetic construct
  source 1..20: mol_type = other RNA
tatcaagagaaattaacagt

SEQ ID NO: 2260 - RNA, 20 nt, synthetic construct
  source 1..20: mol_type = other RNA
agagaaattaacagtacaga

SEQ ID NO: 2261 - RNA, 20 nt, synthetic construct
  source 1..20: mol_type = other RNA
gccggccatacagtaatttt

SEQ ID NO: 2262 - RNA, 20 nt, synthetic construct
  source 1..20: mol_type = other RNA
atttagacgtttcagaggaa

SEQ ID NO: 2263 - RNA, 20 nt, synthetic construct
  source 1..20: mol_type = other RNA
tttcatattttcctacatgt

SEQ ID NO: 2264 - RNA, 20 nt, synthetic construct
  source 1..20: mol_type = other RNA
ttgattctggtatttgtttc

SEQ ID NO: 2265 - RNA, 20 nt, synthetic construct
  source 1..20: mol_type = other RNA
gccatccttgattctggtat

SEQ ID NO: 2266 - RNA, 20 nt, synthetic construct
  source 1..20: mol_type = other RNA
aggatggctgataacttttc

SEQ ID NO: 2267 - RNA, 20 nt, synthetic construct
  source 1..20: mol_type = other RNA
cttgagtttcacgattctgt

SEQ ID NO: 2268 - RNA, 20 nt, synthetic construct
  source 1..20: mol_type = other RNA
cagaatcgtgaaactcaagg

SEQ ID NO: 2269 - RNA, 20 nt, synthetic construct
  source 1..20: mol_type = other RNA
tgaaactcaagggatcacat

SEQ ID NO: 2270 - RNA, 20 nt, synthetic construct
  source 1..20: mol_type = other RNA
catagggaatttcggaaaaa

SEQ ID NO: 2271 - RNA, 20 nt, synthetic construct
  source 1..20: mol_type = other RNA
tacaggttgggttttttttc

SEQ ID NO: 2272 - RNA, 20 nt, synthetic construct
  source 1..20: mol_type = other RNA
cagttcgaaggtaacaaggc

SEQ ID NO: 2273 - RNA, 20 nt, synthetic construct
  source 1..20: mol_type = other RNA
ttgccttgttaccttcgaac

SEQ ID NO: 2274 - RNA, 20 nt, synthetic construct
  source 1..20: mol_type = other RNA
gtgtacttgtaggaagacac

SEQ ID NO: 2275 - RNA, 20 nt, synthetic construct
  source 1..20: mol_type = other RNA
ggcttccagtgtttctgagg

SEQ ID NO: 2276 - RNA, 20 nt, synthetic construct
  source 1..20: mol_type = other RNA
ttttaacaatattccctggt

SEQ ID NO: 2277 - RNA, 20 nt, synthetic construct
  source 1..20: mol_type = other RNA
ctttttgttcctgattatca

SEQ ID NO: 2278 - RNA, 20 nt, synthetic construct
  source 1..20: mol_type = other RNA
ggaacaaaaagagatcaacc

SEQ ID NO: 2279 - RNA, 20 nt, synthetic construct
  source 1..20: mol_type = other RNA
accgggaatgctgaatccag

SEQ ID NO: 2280 - RNA, 20 nt, synthetic construct
  source 1..20: mol_type = other RNA
tcaaggcattttattgctgg

SEQ ID NO: 2281 - RNA, 20 nt, synthetic construct
  source 1..20: mol_type = other RNA
agcaataaaatgccttgaag

SEQ ID NO: 2282 - RNA, 20 nt, synthetic construct
  source 1..20: mol_type = other RNA
gacatggatgatcttcaagg

SEQ ID NO: 2283 - RNA, 20 nt, synthetic construct
  source 1..20: mol_type = other RNA
tccatgtcggataaatgcat

SEQ ID NO: 2284 - RNA, 20 nt, synthetic construct
  source 1..20: mol_type = other RNA
atgtcggataaatgcatatt

SEQ ID NO: 2285 - RNA, 20 nt, synthetic construct
  source 1..20: mol_type = other RNA
gcaggcttatgtaacaagag

SEQ ID NO: 2286 - RNA, 20 nt, synthetic construct
  source 1..20: mol_type = other RNA
acatttgccaattgctggat

SEQ ID NO: 2287 - RNA, 20 nt, synthetic construct
  source 1..20: mol_type = other RNA
atctacatttgccaattgct

SEQ ID NO: 2288 - RNA, 20 nt, synthetic construct
  source 1..20: mol_type = other RNA
agcaattggcaaatgtagat

SEQ ID NO: 2289 - RNA, 20 nt, synthetic construct
  source 1..20: mol_type = other RNA
agaaaatattttgcatttac

SEQ ID NO: 2290 - RNA, 20 nt, synthetic construct
  source 1..20: mol_type = other RNA
aatttctatatctttgtaaa

SEQ ID NO: 2291 - RNA, 20 nt, synthetic construct
  source 1..20: mol_type = other RNA
ttgtaaatgagagttgacta

SEQ ID NO: 2292 - RNA, 20 nt, synthetic construct
  source 1..20: mol_type = other RNA
ttttgtttcaagtagtcaac

SEQ ID NO: 2293 - RNA, 20 nt, synthetic construct
  source 1..20: mol_type = other RNA
tgctatcattttgtttcaag

SEQ ID NO: 2294 - RNA, 20 nt, synthetic construct
  source 1..20: mol_type = other RNA
cttcgtgatttatgctacca

SEQ ID NO: 2295 - RNA, 20 nt, synthetic construct
  source 1..20: mol_type = other RNA
cgaagggattaattcgaagt

SEQ ID NO: 2296 - RNA, 20 nt, synthetic construct
  source 1..20: mol_type = other RNA
tgcatgaggtaaagaaactt

SEQ ID NO: 2297 - RNA, 20 nt, synthetic construct
  source 1..20: mol_type = other RNA
cttcgaacccgcacagtacc

SEQ ID NO: 2298 - RNA, 20 nt, synthetic construct
  source 1..20: mol_type = other RNA
tagagcaatcacaaaggttt

SEQ ID NO: 2299 - RNA, 20 nt, synthetic construct
  source 1..20: mol_type = other RNA
caaaggtttgaactctgagg

SEQ ID NO: 2300 - RNA, 20 nt, synthetic construct
  source 1..20: mol_type = other RNA
agttgctcattgaaccagct

SEQ ID NO: 2301 - RNA, 20 nt, synthetic construct
  source 1..20: mol_type = other RNA
tcacattcatgacctctggc

SEQ ID NO: 2302 - RNA, 20 nt, synthetic construct
  source 1..20: mol_type = other RNA
tgaagcattcgctcttcctt

SEQ ID NO: 2303 - RNA, 20 nt, synthetic construct
  source 1..20: mol_type = other RNA
ccgcagcccaaactactcgc

SEQ ID NO: 2304 - RNA, 20 nt, synthetic construct
  source 1..20: mol_type = other RNA
gaagaggtcggacagctacg

SEQ ID NO: 2305 - RNA, 20 nt, synthetic construct
  source 1..20: mol_type = other RNA
cttagtccaccctgccgtct

SEQ ID NO: 2306 - RNA, 20 nt, synthetic construct
  source 1..20: mol_type = other RNA
ccctttccctcagtcccgga

SEQ ID NO: 2307 - RNA, 20 nt, synthetic construct
  source 1..20: mol_type = other RNA
ctagaaggggttcctaggca

SEQ ID NO: 2308 - RNA, 20 nt, synthetic construct
  source 1..20: mol_type = other RNA
tgcctgggagcaagttttcc

SEQ ID NO: 2309 - RNA, 20 nt, synthetic construct
  source 1..20: mol_type = other RNA
aggaggatagccgttccagg

SEQ ID NO: 2310 - RNA, 20 nt, synthetic construct
  source 1..20: mol_type = other RNA
tcctggatgacgtgtgtttt

SEQ ID NO: 2311 - RNA, 20 nt, synthetic construct
  source 1..20: mol_type = other RNA
ctctcggtaggacttcatat

SEQ ID NO: 2312 - RNA, 20 nt, synthetic construct
  source 1..20: mol_type = other RNA
gtctagtctccgtatctctc

SEQ ID NO: 2313 - RNA, 20 nt, synthetic construct
  source 1..20: mol_type = other RNA
gtatctgtctagtctccgta

SEQ ID NO: 2314 - RNA, 20 nt, synthetic construct
  source 1..20: mol_type = other RNA
cacaatacagacgtcaaaac

SEQ ID NO: 2315 - RNA, 20 nt, synthetic construct
  source 1..20: mol_type = other RNA
ctctggaataactggtatgg

SEQ ID NO: 2316 - RNA, 20 nt, synthetic construct
  source 1..20: mol_type = other RNA
atctctctggaataactggt

SEQ ID NO: 2317 - RNA, 20 nt, synthetic construct
  source 1..20: mol_type = other RNA
gagtattctccttctgcctt

SEQ ID NO: 2318 - RNA, 20 nt, synthetic construct
  source 1..20: mol_type = other RNA
tttttcggccacgtgtgtgt

SEQ ID NO: 2319 - RNA, 20 nt, synthetic construct
  source 1..20: mol_type = other RNA
cagtgtttctaagaagcgtt

SEQ ID NO: 2320 - RNA, 20 nt, synthetic construct
  source 1..20: mol_type = other RNA
aaagtagcaaacgcttctta

SEQ ID NO: 2321 - RNA, 20 nt, synthetic construct
  source 1..20: mol_type = other RNA
ctcatacttaatagattatt

SEQ ID NO: 2322 - RNA, 20 nt, synthetic construct
  source 1..20: mol_type = other RNA
attaagtatgagagatgtgc

SEQ ID NO: 2323 - RNA, 20 nt, synthetic construct
  source 1..20: mol_type = other RNA
tctctgcacatctctcatac

SEQ ID NO: 2324 - RNA, 20 nt, synthetic construct
  source 1..20: mol_type = other RNA
ctaatcctctctgcacatct

SEQ ID NO: 2325 - RNA, 20 nt, synthetic construct
  source 1..20: mol_type = other RNA
agagccatttttgctggtgg

SEQ ID NO: 2326 - RNA, 20 nt, synthetic construct
  source 1..20: mol_type = other RNA
tatggtacttttaatgggaa

SEQ ID NO: 2327 - RNA, 20 nt, synthetic construct
  source 1..20: mol_type = other RNA
agccactggaaattccaaaa

SEQ ID NO: 2328 - RNA, 20 nt, synthetic construct
  source 1..20: mol_type = other RNA
ttttggaatttccagtggct

SEQ ID NO: 2329 - RNA, 20 nt, synthetic construct
  source 1..20: mol_type = other RNA
ggattcctgcagtagttcat

SEQ ID NO: 2330 - RNA, 20 nt, synthetic construct
  source 1..20: mol_type = other RNA
tgaactactgcaggaatcca

SEQ ID NO: 2331 - RNA, 20 nt, synthetic construct
  source 1..20: mol_type = other RNA
agatgctgtggcagctcctt

SEQ ID NO: 2332 - RNA, 20 nt, synthetic construct
  source 1..20: mol_type = other RNA
ctcgtataacaataaggagc

SEQ ID NO: 2333 - RNA, 20 nt, synthetic construct
  source 1..20: mol_type = other RNA
cggtgtcaggtgggagtact

SEQ ID NO: 2334 - RNA, 20 nt, synthetic construct
  source 1..20: mol_type = other RNA
aagcgtgtagatgtctggcc

SEQ ID NO: 2335 - RNA, 20 nt, synthetic construct
  source 1..20: mol_type = other RNA
cagcatcgaagcgtgtagat

SEQ ID NO: 2336 - RNA, 20 nt, synthetic construct
  source 1..20: mol_type = other RNA
acacgcttcgatgctgggat

SEQ ID NO: 2337 - RNA, 20 nt, synthetic construct
  source 1..20: mol_type = other RNA
gtgggaatttccatggcttt

SEQ ID NO: 2338 - RNA, 20 nt, synthetic construct
  source 1..20: mol_type = other RNA
gtttaccattgaaggcggct

SEQ ID NO: 2339 - RNA, 20 nt, synthetic construct
  source 1..20: mol_type = other RNA
ctccgctggctcccccagag

SEQ ID NO: 2340 - RNA, 20 nt, synthetic construct
  source 1..20: mol_type = other RNA
taaagacaaagcccaaccac

SEQ ID NO: 2341 - RNA, 20 nt, synthetic construct
  source 1..20: mol_type = other RNA
ccctggagggtttgtgccca

SEQ ID NO: 2342 - RNA, 20 nt, synthetic construct
  source 1..20: mol_type = other RNA
acttcaaaattcaccttgtt

SEQ ID NO: 2343 - RNA, 20 nt, synthetic construct
  source 1..20: mol_type = other RNA
ccggaaaagcttactggctt

SEQ ID NO: 2344 - RNA, 20 nt, synthetic construct
  source 1..20: mol_type = other RNA
gcaatgctgaagattgctct

SEQ ID NO: 2345 - RNA, 20 nt, synthetic construct
  source 1..20: mol_type = other RNA
tcagcattgcagattctgag

SEQ ID NO: 2346 - RNA, 20 nt, synthetic construct
  source 1..20: mol_type = other RNA
atgcagccctcttaggtttc

SEQ ID NO: 2347 - RNA, 20 nt, synthetic construct
  source 1..20: mol_type = other RNA
ctcccttcaaagcctagggc

SEQ ID NO: 2348 - RNA, 20 nt, synthetic construct
  source 1..20: mol_type = other RNA
gaaagaggtttaagaatact

SEQ ID NO: 2349 - RNA, 20 nt, synthetic construct
  source 1..20: mol_type = other RNA
tgaattgtagtaaagtagga

SEQ ID NO: 2350 - RNA, 20 nt, synthetic construct
  source 1..20: mol_type = other RNA
tctcatgccctgcatcctga

SEQ ID NO: 2351 - RNA, 20 nt, synthetic construct
  source 1..20: mol_type = other RNA
ctgagaagcaaagtgtcttt

SEQ ID NO: 2352 - RNA, 20 nt, synthetic construct
  source 1..20: mol_type = other RNA
gactgaagacaaagacactt

SEQ ID NO: 2353 - RNA, 20 nt, synthetic construct
  source 1..20: mol_type = other RNA
tgaaagccaaggcctttggc

SEQ ID NO: 2354 - RNA, 20 nt, synthetic construct
  source 1..20: mol_type = other RNA
acggtctagggaaacatgca

SEQ ID NO: 2355 - RNA, 20 nt, synthetic construct
  source 1..20: mol_type = other RNA
tcatgcaaacggcaccgcat

SEQ ID NO: 2356 - RNA, 20 nt, synthetic construct
  source 1..20: mol_type = other RNA
gattcctcattggaaagtga

SEQ ID NO: 2357 - RNA, 20 nt, synthetic construct
  source 1..20: mol_type = other RNA
gatctgttgtgtttctctaa

SEQ ID NO: 2358 - RNA, 20 nt, synthetic construct
  source 1..20: mol_type = other RNA
gttgtgtttctctaaggtgt

SEQ ID NO: 2359 - RNA, 20 nt, synthetic construct
  source 1..20: mol_type = other RNA
gttgctttggtgtttgtttg

SEQ ID NO: 2360 - RNA, 20 nt, synthetic construct
  source 1..20: mol_type = other RNA
ataggcagatggatgtgaga

SEQ ID NO: 2361 - RNA, 20 nt, synthetic construct
  source 1..20: mol_type = other RNA
atctgcctatggataaggaa

SEQ ID NO: 2362 - RNA, 20 nt, synthetic construct
  source 1..20: mol_type = other RNA
gcctatggataaggaaaaga

SEQ ID NO: 2363 - RNA, 20 nt, synthetic construct
  source 1..20: mol_type = other RNA
ctgagcatagagaaacatgt

SEQ ID NO: 2364 - RNA, 20 nt, synthetic construct
  source 1..20: mol_type = other RNA
agctgagtatctctgagcat

SEQ ID NO: 2365 - RNA, 20 nt, synthetic construct
  source 1..20: mol_type = other RNA
aggcacatactccaccactg

SEQ ID NO: 2366 - RNA, 20 nt, synthetic construct
  source 1..20: mol_type = other RNA
atgacaccacactcgcatag

SEQ ID NO: 2367 - RNA, 20 nt, synthetic construct
  source 1..20: mol_type = other RNA
cttgtaacagaaacttcact

SEQ ID NO: 2368 - RNA, 20 nt, synthetic construct
  source 1..20: mol_type = other RNA
gtcacaagttgagttcggag

SEQ ID NO: 2369 - RNA, 20 nt, synthetic construct
  source 1..20: mol_type = other RNA
gcatctgtcacaagttgagt

SEQ ID NO: 2370 - RNA, 20 nt, synthetic construct
  source 1..20: mol_type = other RNA
tgagacattttgctacgcca

SEQ ID NO: 2371 - RNA, 20 nt, synthetic construct
  source 1..20: mol_type = other RNA
tcctgagacattttgctacg

SEQ ID NO: 2372 - RNA, 20 nt, synthetic construct
  source 1..20: mol_type = other RNA
tctcacctccagatttccct

SEQ ID NO: 2373 - RNA, 20 nt, synthetic construct
  source 1..20: mol_type = other RNA
ggaggtgagaagatcacatt

SEQ ID NO: 2374 - RNA, 20 nt, synthetic construct
  source 1..20: mol_type = other RNA
cattatgaagaaagtcagaa

SEQ ID NO: 2375 - RNA, 20 nt, synthetic construct
  source 1..20: mol_type = other RNA
aagtgtctggtcctttgtca

SEQ ID NO: 2376 - RNA, 20 nt, synthetic construct
  source 1..20: mol_type = other RNA
attcacctgtccataaataa

SEQ ID NO: 2377 - RNA, 20 nt, synthetic construct
  source 1..20: mol_type = other RNA
gtttctatatctacgtatat

SEQ ID NO: 2378 - RNA, 20 nt, synthetic construct
  source 1..20: mol_type = other RNA
gaatatacgtagatatagaa

SEQ ID NO: 2379 - RNA, 20 nt, synthetic construct
  source 1..20: mol_type = other RNA
acgtatattccgattgtcag

SEQ ID NO: 2380 - RNA, 20 nt, synthetic construct
  source 1..20: mol_type = other RNA
cttcaggccactggtactta

SEQ ID NO: 2381 - RNA, 20 nt, synthetic construct
  source 1..20: mol_type = other RNA
tctcttgctgggaacctgta

SEQ ID NO: 2382 - RNA, 20 nt, synthetic construct
  source 1..20: mol_type = other RNA
gccttccttccttggatctt

SEQ ID NO: 2383 - RNA, 20 nt, synthetic construct
  source 1..20: mol_type = other RNA
aaggaaggaaggcagatgag

SEQ ID NO: 2384 - RNA, 20 nt, synthetic construct
  source 1..20: mol_type = other RNA
ctctctgtgctgactctcat

SEQ ID NO: 2385 - RNA, 20 nt, synthetic construct
  source 1..20: mol_type = other RNA
cttttacttttcagcatccc

SEQ ID NO: 2386 - RNA, 20 nt, synthetic construct
  source 1..20: mol_type = other RNA
acccatcccttttacttttc

SEQ ID NO: 2387 - RNA, 20 nt, synthetic construct
  source 1..20: mol_type = other RNA
gttgtcccacatgtagaaac

SEQ ID NO: 2388 - RNA, 20 nt, synthetic construct
  source 1..20: mol_type = other RNA
ttgcccctctctcaattctc

SEQ ID NO: 2389 - RNA, 20 nt, synthetic construct
  source 1..20: mol_type = other RNA
gcggagtggagcccatcatt

SEQ ID NO: 2390 - RNA, 20 nt, synthetic construct
  source 1..20: mol_type = other RNA
aggaagaaagccaaggcatc

SEQ ID NO: 2391 - RNA, 20 nt, synthetic construct
  source 1..20: mol_type = other RNA
ccttgctattcagtgcagga

SEQ ID NO: 2392 - RNA, 20 nt, synthetic construct
  source 1..20: mol_type = other RNA
ctctcctccattcagcaaga

SEQ ID NO: 2393 - RNA, 20 nt, synthetic construct
  source 1..20: mol_type = other RNA
tgctgaatggaggagaggga

SEQ ID NO: 2394 - RNA, 20 nt, synthetic construct
  source 1..20: mol_type = other RNA
caaactccaatccctctcct

SEQ ID NO: 2395 - RNA, 20 nt, synthetic construct
  source 1..20: mol_type = other RNA
ctctcttctttattgagctt

SEQ ID NO: 2396 - RNA, 20 nt, synthetic construct
  source 1..20: mol_type = other RNA
cagagtgctatgtgatctct

SEQ ID NO: 2397 - RNA, 20 nt, synthetic construct
  source 1..20: mol_type = other RNA
catagcactctgggatactg

SEQ ID NO: 2398 - RNA, 20 nt, synthetic construct
  source 1..20: mol_type = other RNA
aatcggtttccaatcaatga

SEQ ID NO: 2399 - RNA, 20 nt, synthetic construct
  source 1..20: mol_type = other RNA
gtttccaatcaatgaagtgc

SEQ ID NO: 2400 - RNA, 20 nt, synthetic construct
  source 1..20: mol_type = other RNA
atgaagtgcctgtgagagga

SEQ ID NO: 2401 - RNA, 20 nt, synthetic construct
  source 1..20: mol_type = other RNA
caactctctttagaagtaaa

SEQ ID NO: 2402 - RNA, 20 nt, synthetic construct
  source 1..20: mol_type = other RNA
actttgttgtttacttctaa

SEQ ID NO: 2403 - RNA, 20 nt, synthetic construct
  source 1..20: mol_type = other RNA
gcagagtgagtcctaaattt

SEQ ID NO: 2404 - RNA, 20 nt, synthetic construct
  source 1..20: mol_type = other RNA
gactacatgtagaaaagcgt

SEQ ID NO: 2405 - RNA, 20 nt, synthetic construct
  source 1..20: mol_type = other RNA
ggtaatacaaacaggctcag

SEQ ID NO: 2406 - RNA, 20 nt, synthetic construct
  source 1..20: mol_type = other RNA
tttctctcattcctgagcct

SEQ ID NO: 2407 - RNA, 20 nt, synthetic construct
  source 1..20: mol_type = other RNA
tactgatatgtcaaattttc

SEQ ID NO: 2408 - RNA, 20 nt, synthetic construct
  source 1..20: mol_type = other RNA
gttatcatactgatatgtca

SEQ ID NO: 2409 - RNA, 20 nt, synthetic construct
  source 1..20: mol_type = other RNA
gtatgataactgatttcaaa

SEQ ID NO: 2410 - RNA, 20 nt, synthetic construct
  source 1..20: mol_type = other RNA
gctttcttgcatgttgtttt

SEQ ID NO: 2411 - RNA, 20 nt, synthetic construct
  source 1..20: mol_type = other RNA
tatcaagagaaattaacagt

SEQ ID NO: 2412 - RNA, 20 nt, synthetic construct
  source 1..20: mol_type = other RNA
agagaaattaacagtacaga

SEQ ID NO: 2413 - RNA, 20 nt, synthetic construct
  source 1..20: mol_type = other RNA
gccggccatacagtaatttt

SEQ ID NO: 2414 - RNA, 20 nt, synthetic construct
  source 1..20: mol_type = other RNA
atttagacgtttcagaggaa

SEQ ID NO: 2415 - RNA, 20 nt, synthetic construct
  source 1..20: mol_type = other RNA
tttcatattttcctacatgt

SEQ ID NO: 2416 - RNA, 20 nt, synthetic construct
  source 1..20: mol_type = other RNA
ttgattccggtatttgtttc

SEQ ID NO: 2417 - RNA, 20 nt, synthetic construct
  source 1..20: mol_type = other RNA
gccatccttgattccggtat

SEQ ID NO: 2418 - RNA, 20 nt, synthetic construct
  source 1..20: mol_type = other RNA
aggatggctgataacttttc

SEQ ID NO: 2419 - RNA, 20 nt, synthetic construct
  source 1..20: mol_type = other RNA
cttgagtttcacgattctgt

SEQ ID NO: 2420 - RNA, 20 nt, synthetic construct
  source 1..20: mol_type = other RNA
cagaatcgtgaaactcaagg

SEQ ID NO: 2421 - RNA, 20 nt, synthetic construct
  source 1..20: mol_type = other RNA
tgaaactcaagggatcacat

SEQ ID NO: 2422 - RNA, 20 nt, synthetic construct
  source 1..20: mol_type = other RNA
catagggaatttcggaaaaa

SEQ ID NO: 2423 - RNA, 20 nt, synthetic construct
  source 1..20: mol_type = other RNA
tacaggttgggttttttttc

SEQ ID NO: 2424 - RNA, 20 nt, synthetic construct
  source 1..20: mol_type = other RNA
cagttcgaaggtaacaaggc

SEQ ID NO: 2425 - RNA, 20 nt, synthetic construct
  source 1..20: mol_type = other RNA
ttgccttgttaccttcgaac

SEQ ID NO: 2426 - RNA, 20 nt, synthetic construct
  source 1..20: mol_type = other RNA
gtgtacttgtaggaagacac

SEQ ID NO: 2427 - RNA, 20 nt, synthetic construct
  source 1..20: mol_type = other RNA
ggcttccagtgtttctgagg

SEQ ID NO: 2428 - RNA, 20 nt, synthetic construct
  source 1..20: mol_type = other RNA
ttttaacaatattccctggt

SEQ ID NO: 2429 - RNA, 20 nt, synthetic construct
  source 1..20: mol_type = other RNA
ctttttgttcctgattatca

SEQ ID NO: 2430 - RNA, 20 nt, synthetic construct
  source 1..20: mol_type = other RNA
ggaacaaaaagagatcaacc

SEQ ID NO: 2431 - RNA, 20 nt, synthetic construct
  source 1..20: mol_type = other RNA
accgggaatgctgaatccag

SEQ ID NO: 2432 - RNA, 20 nt, synthetic construct
  source 1..20: mol_type = other RNA
agcaataaaatgccttgaag

SEQ ID NO: 2433 - RNA, 20 nt, synthetic construct
  source 1..20: mol_type = other RNA
gacatggatgaccttcaagg

SEQ ID NO: 2434 - RNA, 20 nt, synthetic construct
  source 1..20: mol_type = other RNA
atgtcggataaatgcatatt

SEQ ID NO: 2435 - RNA, 20 nt, synthetic construct
  source 1..20: mol_type = other RNA
gcaggcttatgtaacaagag

SEQ ID NO: 2436 - RNA, 20 nt, synthetic construct
  source 1..20: mol_type = other RNA
acatttgccaattgctggat

SEQ ID NO: 2437 - RNA, 20 nt, synthetic construct
  source 1..20: mol_type = other RNA
atctacatttgccaattgct

SEQ ID NO: 2438 - RNA, 20 nt, synthetic construct
  source 1..20: mol_type = other RNA
agcaattggcaaatgtagat

SEQ ID NO: 2439 - RNA, 20 nt, synthetic construct
  source 1..20: mol_type = other RNA
agaaaatattttgcatttac

SEQ ID NO: 2440 - RNA, 20 nt, synthetic construct
  source 1..20: mol_type = other RNA
aatttctatatctttgtaaa

SEQ ID NO: 2441 - RNA, 20 nt, synthetic construct
  source 1..20: mol_type = other RNA
ttgtaaatgagagttgacta

SEQ ID NO: 2442 - RNA, 20 nt, synthetic construct
  source 1..20: mol_type = other RNA
ttttgtttcaagtagtcaac

SEQ ID NO: 2443 - RNA, 20 nt, synthetic construct
  source 1..20: mol_type = other RNA
tgctatcattttgtttcaag

SEQ ID NO: 2444 - RNA, 20 nt, synthetic construct
  source 1..20: mol_type = other RNA
cttcgtgatttatgctacca

SEQ ID NO: 2445 - RNA, 20 nt, synthetic construct
  source 1..20: mol_type = other RNA
cgaagggattaattcgaagt

SEQ ID NO: 2446 - RNA, 20 nt, synthetic construct
  source 1..20: mol_type = other RNA
tgcatgaggtaaagaaactt

SEQ ID NO: 2447 - RNA, 20 nt, synthetic construct
  source 1..20: mol_type = other RNA
cttcgaacccgcacagtacc

SEQ ID NO: 2448 - RNA, 20 nt, synthetic construct
  source 1..20: mol_type = other RNA
tagagcaatcacaaaggttt

SEQ ID NO: 2449 - RNA, 20 nt, synthetic construct
  source 1..20: mol_type = other RNA
caaaggtttgaactctgagg

SEQ ID NO: 2450 - RNA, 20 nt, synthetic construct
  source 1..20: mol_type = other RNA
agttgctcattgaaccagct

SEQ ID NO: 2451 - RNA, 20 nt, synthetic construct
  source 1..20: mol_type = other RNA
tcacattcatgacctctggc

SEQ ID NO: 2452 - RNA, 20 nt, synthetic construct
  source 1..20: mol_type = other RNA
tgaagcattcgctcttcctt

SEQ ID NO: 2453 - RNA, 20 nt, synthetic construct
  source 1..20: mol_type = other RNA
ccgcagcccaaactactcgc

SEQ ID NO: 2454 - RNA, 20 nt, synthetic construct
  source 1..20: mol_type = other RNA
gaagaggtcggacagctacg

SEQ ID NO: 2455 - RNA, 20 nt, synthetic construct
  source 1..20: mol_type = other RNA
cttagtccaccctgccgtct

SEQ ID NO: 2456 - RNA, 20 nt, synthetic construct
  source 1..20: mol_type = other RNA
ccctttccctcagtcccgga

SEQ ID NO: 2457 - RNA, 20 nt, synthetic construct
  source 1..20: mol_type = other RNA
ctagaaggggttcctaggca

SEQ ID NO: 2458 - RNA, 20 nt, synthetic construct
  source 1..20: mol_type = other RNA
tgcctgggagcaagttttcc

SEQ ID NO: 2459 - RNA, 20 nt, synthetic construct
  source 1..20: mol_type = other RNA
aggaggatagccgttccagg

SEQ ID NO: 2460 - RNA, 20 nt, synthetic construct
  source 1..20: mol_type = other RNA
tcctggatgacgtgcgtttt

SEQ ID NO: 2461 - RNA, 20 nt, synthetic construct
  source 1..20: mol_type = other RNA
ctctcggtaggacttcatat

SEQ ID NO: 2462 - RNA, 20 nt, synthetic construct
  source 1..20: mol_type = other RNA
gtctagtctccgtatctctc

SEQ ID NO: 2463 - RNA, 20 nt, synthetic construct
  source 1..20: mol_type = other RNA
gtatctgtctagtctccgta

SEQ ID NO: 2464 - RNA, 20 nt, synthetic construct
  source 1..20: mol_type = other RNA
cacaatacagacgtcaaaac

SEQ ID NO: 2465 - RNA, 20 nt, synthetic construct
  source 1..20: mol_type = other RNA
ctctggaataactggtatgg

SEQ ID NO: 2466 - RNA, 20 nt, synthetic construct
  source 1..20: mol_type = other RNA
atctctctggaataactggt

SEQ ID NO: 2467 - RNA, 20 nt, synthetic construct
  source 1..20: mol_type = other RNA
gagtattctccttctgcctt

SEQ ID NO: 2468 - RNA, 20 nt, synthetic construct
  source 1..20: mol_type = other RNA
tttttcggccacgtgtgtgt

SEQ ID NO: 2469 - RNA, 20 nt, synthetic construct
  source 1..20: mol_type = other RNA
cagtgtttctaagaagcgtt

SEQ ID NO: 2470 - RNA, 20 nt, synthetic construct
  source 1..20: mol_type = other RNA
aaagtagcaaacgcttctta

SEQ ID NO: 2471 - RNA, 20 nt, synthetic construct
  source 1..20: mol_type = other RNA
ctcatacttaatagattatt

SEQ ID NO: 2472 - RNA, 20 nt, synthetic construct
  source 1..20: mol_type = other RNA
attaagtatgagagatgtgc

SEQ ID NO: 2473 - RNA, 20 nt, synthetic construct
  source 1..20: mol_type = other RNA
tctctgcacatctctcatac

SEQ ID NO: 2474 - RNA, 20 nt, synthetic construct
  source 1..20: mol_type = other RNA
ctaatcctctctgcacatct

SEQ ID NO: 2475 - RNA, 20 nt, synthetic construct
  source 1..20: mol_type = other RNA
agagccatttttgctggtgg

SEQ ID NO: 2476 - RNA, 20 nt, synthetic construct
  source 1..20: mol_type = other RNA
tatggtacttttaatgggaa

SEQ ID NO: 2477 - RNA, 20 nt, synthetic construct
  source 1..20: mol_type = other RNA
agccactggaaattccaaaa

SEQ ID NO: 2478 - RNA, 20 nt, synthetic construct
  source 1..20: mol_type = other RNA
ttttggaatttccagtggct

SEQ ID NO: 2479 - RNA, 20 nt, synthetic construct
  source 1..20: mol_type = other RNA
ggattcctgcagtagttcat

SEQ ID NO: 2480 - RNA, 20 nt, synthetic construct
  source 1..20: mol_type = other RNA
tgaactactgcaggaatcca

SEQ ID NO: 2481 - RNA, 20 nt, synthetic construct
  source 1..20: mol_type = other RNA
agatgctgtggcagctcctt

SEQ ID NO: 2482 - RNA, 20 nt, synthetic construct
  source 1..20: mol_type = other RNA
ctcgtataacaataaggagc

SEQ ID NO: 2483 - RNA, 20 nt, synthetic construct
  source 1..20: mol_type = other RNA
cggtgtcaggtgggagtact

SEQ ID NO: 2484 - RNA, 20 nt, synthetic construct
  source 1..20: mol_type = other RNA
aagcgtgtagatgtctggcc

SEQ ID NO: 2485 - RNA, 20 nt, synthetic construct
  source 1..20: mol_type = other RNA
cagcatcgaagcgtgtagat

SEQ ID NO: 2486 - RNA, 20 nt, synthetic construct
  source 1..20: mol_type = other RNA
acacgcttcgatgctgggat

SEQ ID NO: 2487 - RNA, 20 nt, synthetic construct
  source 1..20: mol_type = other RNA
gtgggaatttccatggcttt

SEQ ID NO: 2488 - RNA, 20 nt, synthetic construct
  source 1..20: mol_type = other RNA
gtttaccattgaaggcggct

SEQ ID NO: 2489 - RNA, 20 nt, synthetic construct
  source 1..20: mol_type = other RNA
ctccgctggctcccccagag

SEQ ID NO: 2490 - RNA, 20 nt, synthetic construct
  source 1..20: mol_type = other RNA
taaagacaaagcccaaccac

SEQ ID NO: 2491 - RNA, 20 nt, synthetic construct
  source 1..20: mol_type = other RNA
ccctggagggtttgtgccca

SEQ ID NO: 2492 - RNA, 20 nt, synthetic construct
  source 1..20: mol_type = other RNA
acttcaaaattcaccttgtt

SEQ ID NO: 2493 - RNA, 20 nt, synthetic construct
  source 1..20: mol_type = other RNA
ccggaaaagcttactggctt

SEQ ID NO: 2494 - RNA, 20 nt, synthetic construct
  source 1..20: mol_type = other RNA
gcaatgctgaagattgctct

SEQ ID NO: 2495 - RNA, 20 nt, synthetic construct
  source 1..20: mol_type = other RNA
tcagcattgcagattctgag

SEQ ID NO: 2496 - RNA, 20 nt, synthetic construct
  source 1..20: mol_type = other RNA
atgcagccctcttaggtttc

SEQ ID NO: 2497 - RNA, 20 nt, synthetic construct
  source 1..20: mol_type = other RNA
ctcccttcaaagcctagggc

SEQ ID NO: 2498 - RNA, 20 nt, synthetic construct
  source 1..20: mol_type = other RNA
gaaagaggtttaagaatact

SEQ ID NO: 2499 - RNA, 20 nt, synthetic construct
  source 1..20: mol_type = other RNA
tgaattgtagtaaagtagga

SEQ ID NO: 2500 - RNA, 20 nt, synthetic construct
  source 1..20: mol_type = other RNA
tctcatgccctgcatcctga

SEQ ID NO: 2501 - RNA, 20 nt, synthetic construct
  source 1..20: mol_type = other RNA
ctgagaagcaaagtgtcttt

SEQ ID NO: 2502 - RNA, 20 nt, synthetic construct
  source 1..20: mol_type = other RNA
gactgaagacaaagacactt

SEQ ID NO: 2503 - RNA, 20 nt, synthetic construct
  source 1..20: mol_type = other RNA
tgaaagccaaggcctttggc

SEQ ID NO: 2504 - RNA, 20 nt, synthetic construct
  source 1..20: mol_type = other RNA
acggtctagggaaacatgca

SEQ ID NO: 2505 - RNA, 20 nt, synthetic construct
  source 1..20: mol_type = other RNA
tcatgcaaacggcaccgcat

SEQ ID NO: 2506 - RNA, 20 nt, synthetic construct
  source 1..20: mol_type = other RNA
gattcctcattggaaagtga

SEQ ID NO: 2507 - RNA, 20 nt, synthetic construct
  source 1..20: mol_type = other RNA
gatctgttgtgtttctctaa

SEQ ID NO: 2508 - RNA, 20 nt, synthetic construct
  source 1..20: mol_type = other RNA
gttgtgtttctctaaggtgt

SEQ ID NO: 2509 - RNA, 20 nt, synthetic construct
  source 1..20: mol_type = other RNA
gttgctttggtgtttgtttg

SEQ ID NO: 2510 - RNA, 20 nt, synthetic construct
  source 1..20: mol_type = other RNA
ataggcagatggatgtgaga

SEQ ID NO: 2511 - RNA, 20 nt, synthetic construct
  source 1..20: mol_type = other RNA
atctgcctatggataaggaa

SEQ ID NO: 2512 - RNA, 20 nt, synthetic construct
  source 1..20: mol_type = other RNA
gcctatggataaggaaaaga

SEQ ID NO: 2513 - RNA, 20 nt, synthetic construct
  source 1..20: mol_type = other RNA
ctgagcatagagaaacatgt

SEQ ID NO: 2514 - RNA, 20 nt, synthetic construct
  source 1..20: mol_type = other RNA
agctgagtatctctgagcat

SEQ ID NO: 2515 - RNA, 20 nt, synthetic construct
  source 1..20: mol_type = other RNA
aggcacatactccaccactg

SEQ ID NO: 2516 - RNA, 20 nt, synthetic construct
  source 1..20: mol_type = other RNA
atgacaccacactcgcatag

SEQ ID NO: 2517 - RNA, 20 nt, synthetic construct
  source 1..20: mol_type = other RNA
cttgtaacagaaacttcact

SEQ ID NO: 2518 - RNA, 20 nt, synthetic construct
  source 1..20: mol_type = other RNA
gtcacaagttgagttcggag

SEQ ID NO: 2519 - RNA, 20 nt, synthetic construct
  source 1..20: mol_type = other RNA
gcatctgtcacaagttgagt

SEQ ID NO: 2520 - RNA, 20 nt, synthetic construct
  source 1..20: mol_type = other RNA
tgagacattttgctacgcca

SEQ ID NO: 2521 - RNA, 20 nt, synthetic construct
  source 1..20: mol_type = other RNA
tcctgagacattttgctacg

SEQ ID NO: 2522 - RNA, 20 nt, synthetic construct
  source 1..20: mol_type = other RNA
cctcacctccagatttccct

SEQ ID NO: 2523 - RNA, 20 nt, synthetic construct
  source 1..20: mol_type = other RNA
ggaggtgaggagatcacatt

SEQ ID NO: 2524 - RNA, 20 nt, synthetic construct
  source 1..20: mol_type = other RNA
cattatgaagaaagtcagaa

SEQ ID NO: 2525 - RNA, 20 nt, synthetic construct
  source 1..20: mol_type = other RNA
aagtgtctggtcctttgtca

SEQ ID NO: 2526 - RNA, 20 nt, synthetic construct
  source 1..20: mol_type = other RNA
attcacctgtccataaataa

SEQ ID NO: 2527 - RNA, 20 nt, synthetic construct
  source 1..20: mol_type = other RNA
gtttctatatctacgtatat

SEQ ID NO: 2528 - RNA, 20 nt, synthetic construct
  source 1..20: mol_type = other RNA
gaatatacgtagatatagaa

SEQ ID NO: 2529 - RNA, 20 nt, synthetic construct
  source 1..20: mol_type = other RNA
acgtatattccgattgtcag

SEQ ID NO: 2530 - RNA, 20 nt, synthetic construct
  source 1..20: mol_type = other RNA
cttcaggccactggtactta

SEQ ID NO: 2531 - RNA, 20 nt, synthetic construct
  source 1..20: mol_type = other RNA
tctcttgctgggaacctgta

SEQ ID NO: 2532 - RNA, 20 nt, synthetic construct
  source 1..20: mol_type = other RNA
gccttccttccttggatctt

SEQ ID NO: 2533 - RNA, 20 nt, synthetic construct
  source 1..20: mol_type = other RNA
aaggaaggaaggcagatgag

SEQ ID NO: 2534 - RNA, 20 nt, synthetic construct
  source 1..20: mol_type = other RNA
ctctctgtgctgactctcat

SEQ ID NO: 2535 - RNA, 20 nt, synthetic construct
  source 1..20: mol_type = other RNA
cttttacttttcagcatccc

SEQ ID NO: 2536 - RNA, 20 nt, synthetic construct
  source 1..20: mol_type = other RNA
acccatcccttttacttttc

SEQ ID NO: 2537 - RNA, 20 nt, synthetic construct
  source 1..20: mol_type = other RNA
gttgtcccacatgtagaaac

SEQ ID NO: 2538 - RNA, 20 nt, synthetic construct
  source 1..20: mol_type = other RNA
ttgcccctctctcaattctc

SEQ ID NO: 2539 - RNA, 20 nt, synthetic construct
  source 1..20: mol_type = other RNA
gcggagtggagcccatcatt

SEQ ID NO: 2540 - RNA, 20 nt, synthetic construct
  source 1..20: mol_type = other RNA
aggaagaaagccaaggcatc

SEQ ID NO: 2541 - RNA, 20 nt, synthetic construct
  source 1..20: mol_type = other RNA
ccttgctattcagtgcagga

SEQ ID NO: 2542 - RNA, 20 nt, synthetic construct
  source 1..20: mol_type = other RNA
ctctcctccattcagcaaga

SEQ ID NO: 2543 - RNA, 20 nt, synthetic construct
  source 1..20: mol_type = other RNA
tgctgaatggaggagaggga

SEQ ID NO: 2544 - RNA, 20 nt, synthetic construct
  source 1..20: mol_type = other RNA
caaactccaatccctctcct

SEQ ID NO: 2545 - RNA, 20 nt, synthetic construct
  source 1..20: mol_type = other RNA
ctctcttctttattgagctt

SEQ ID NO: 2546 - RNA, 20 nt, synthetic construct
  source 1..20: mol_type = other RNA
cagagtgctatgtgatctct

SEQ ID NO: 2547 - RNA, 20 nt, synthetic construct
  source 1..20: mol_type = other RNA
catagcactctgggatactg

SEQ ID NO: 2548 - RNA, 20 nt, synthetic construct
  source 1..20: mol_type = other RNA
aatcggtttccaatcaatga

SEQ ID NO: 2549 - RNA, 20 nt, synthetic construct
  source 1..20: mol_type = other RNA
gtttccaatcaatgaagtgc

SEQ ID NO: 2550 - RNA, 20 nt, synthetic construct
  source 1..20: mol_type = other RNA
atgaagtgcctgtgagagga

SEQ ID NO: 2551 - RNA, 20 nt, synthetic construct
  source 1..20: mol_type = other RNA
caactctctttagaagtaaa

SEQ ID NO: 2552 - RNA, 20 nt, synthetic construct
  source 1..20: mol_type = other RNA
actttgttgtttacttctaa

SEQ ID NO: 2553 - RNA, 20 nt, synthetic construct
  source 1..20: mol_type = other RNA
gcagagtgagtcctaaattt

SEQ ID NO: 2554 - RNA, 20 nt, synthetic construct
  source 1..20: mol_type = other RNA
gactacatgtagaaaagcgt

SEQ ID NO: 2555 - RNA, 20 nt, synthetic construct
  source 1..20: mol_type = other RNA
ggtaatacaaacaggctcag

SEQ ID NO: 2556 - RNA, 20 nt, synthetic construct
  source 1..20: mol_type = other RNA
tttctctcattcctgagcct

SEQ ID NO: 2557 - RNA, 20 nt, synthetic construct
  source 1..20: mol_type = other RNA
tactgatatgtcaaattttc

SEQ ID NO: 2558 - RNA, 20 nt, synthetic construct
  source 1..20: mol_type = other RNA
gttatcatactgatatgtca

SEQ ID NO: 2559 - RNA, 20 nt, synthetic construct
  source 1..20: mol_type = other RNA
gtatgataactgatttcaaa

SEQ ID NO: 2560 - RNA, 20 nt, synthetic construct
  source 1..20: mol_type = other RNA
gctttcttgcatgttgtttt

SEQ ID NO: 2561 - RNA, 20 nt, synthetic construct
  source 1..20: mol_type = other RNA
tatcaagagaaattaacagt

SEQ ID NO: 2562 - RNA, 20 nt, synthetic construct
  source 1..20: mol_type = other RNA
agagaaattaacagtacaga

SEQ ID NO: 2563 - RNA, 20 nt, synthetic construct
  source 1..20: mol_type = other RNA
gccggccatacagtaatttt

SEQ ID NO: 2564 - RNA, 20 nt, synthetic construct
  source 1..20: mol_type = other RNA
aattagacgtttcagaggaa

SEQ ID NO: 2565 - RNA, 20 nt, synthetic construct
  source 1..20: mol_type = other RNA
tttcatattttcctacatgt

SEQ ID NO: 2566 - RNA, 20 nt, synthetic construct
  source 1..20: mol_type = other RNA
ttgattctggtatttgtttc

SEQ ID NO: 2567 - RNA, 20 nt, synthetic construct
  source 1..20: mol_type = other RNA
gccatccttgattctggtat

SEQ ID NO: 2568 - RNA, 20 nt, synthetic construct
  source 1..20: mol_type = other RNA
aggatggctgataacttttc

SEQ ID NO: 2569 - RNA, 20 nt, synthetic construct
  source 1..20: mol_type = other RNA
cttgagtttcacgattctgt

SEQ ID NO: 2570 - RNA, 20 nt, synthetic construct
  source 1..20: mol_type = other RNA
cagaatcgtgaaactcaagg

SEQ ID NO: 2571 - RNA, 20 nt, synthetic construct
  source 1..20: mol_type = other RNA
tgaaactcaagggatcatat

SEQ ID NO: 2572 - RNA, 20 nt, synthetic construct
  source 1..20: mol_type = other RNA
tatagggaatttcggaaaaa

SEQ ID NO: 2573 - RNA, 20 nt, synthetic construct
  source 1..20: mol_type = other RNA
tacaggttgggttttttttc

SEQ ID NO: 2574 - RNA, 20 nt, synthetic construct
  source 1..20: mol_type = other RNA
cagttcgaaggtaacaaggc

SEQ ID NO: 2575 - RNA, 20 nt, synthetic construct
  source 1..20: mol_type = other RNA
ttgccttgttaccttcgaac

SEQ ID NO: 2576 - RNA, 20 nt, synthetic construct
  source 1..20: mol_type = other RNA
gtgtacttgtaggaagacac

SEQ ID NO: 2577 - RNA, 20 nt, synthetic construct
  source 1..20: mol_type = other RNA
ggcttccagtgtttctgagg

SEQ ID NO: 2578 - RNA, 20 nt, synthetic construct
  source 1..20: mol_type = other RNA
ttttaacaatattccctggt

SEQ ID NO: 2579 - RNA, 20 nt, synthetic construct
  source 1..20: mol_type = other RNA
ctttttgttcctgattatca

SEQ ID NO: 2580 - RNA, 20 nt, synthetic construct
  source 1..20: mol_type = other RNA
ggaacaaaaagagatcaacc

SEQ ID NO: 2581 - RNA, 20 nt, synthetic construct
  source 1..20: mol_type = other RNA
accgggaatgctgaatccag

SEQ ID NO: 2582 - RNA, 20 nt, synthetic construct
  source 1..20: mol_type = other RNA
agcaataaaatgccttgaag

SEQ ID NO: 2583 - RNA, 20 nt, synthetic construct
  source 1..20: mol_type = other RNA
gacatggatgaccttcaagg

SEQ ID NO: 2584 - RNA, 20 nt, synthetic construct
  source 1..20: mol_type = other RNA
atgtcggataaatgcatatt

SEQ ID NO: 2585 - RNA, 20 nt, synthetic construct
  source 1..20: mol_type = other RNA
gcaggcttatgtaacaagag

SEQ ID NO: 2586 - RNA, 20 nt, synthetic construct
  source 1..20: mol_type = other RNA
acatttgccaattgctggat

SEQ ID NO: 2587 - RNA, 20 nt, synthetic construct
  source 1..20: mol_type = other RNA
atctacatttgccaattgct

SEQ ID NO: 2588 - RNA, 20 nt, synthetic construct
  source 1..20: mol_type = other RNA
agcaattggcaaatgtagat

SEQ ID NO: 2589 - RNA, 20 nt, synthetic construct
  source 1..20: mol_type = other RNA
agaaaatattttgcatttac

SEQ ID NO: 2590 - RNA, 20 nt, synthetic construct
  source 1..20: mol_type = other RNA
aatttctatatctttgtaaa

SEQ ID NO: 2591 - RNA, 20 nt, synthetic construct
  source 1..20: mol_type = other RNA
ttgtaaatgagagttgacta

SEQ ID NO: 2592 - RNA, 20 nt, synthetic construct
  source 1..20: mol_type = other RNA
ttttgtttcaagtagtcaac

SEQ ID NO: 2593 - RNA, 20 nt, synthetic construct
  source 1..20: mol_type = other RNA
tgctatcattttgtttcaag

SEQ ID NO: 2594 - RNA, 20 nt, synthetic construct
  source 1..20: mol_type = other RNA
cttcgtgatttatgctacca

SEQ ID NO: 2595 - RNA, 20 nt, synthetic construct
  source 1..20: mol_type = other RNA
cgaagggattaattcgaagt

SEQ ID NO: 2596 - RNA, 20 nt, synthetic construct
  source 1..20: mol_type = other RNA
tgcatgaggtaaagaaactt

SEQ ID NO: 2597 - RNA, 20 nt, synthetic construct
  source 1..20: mol_type = other RNA
cttcgaacccgcacagtacc

SEQ ID NO: 2598 - RNA, 20 nt, synthetic construct
  source 1..20: mol_type = other RNA
tagagcaatcacaaaggttt

SEQ ID NO: 2599 - RNA, 20 nt, synthetic construct
  source 1..20: mol_type = other RNA
caaaggtttgaactctgagg

SEQ ID NO: 2600 - RNA, 20 nt, synthetic construct
  source 1..20: mol_type = other RNA
agttgctcattgaaccagct

SEQ ID NO: 2601 - RNA, 20 nt, synthetic construct
  source 1..20: mol_type = other RNA
tcacattcatgacctctggc

SEQ ID NO: 2602 - RNA, 20 nt, synthetic construct
  source 1..20: mol_type = other RNA
tgaagcattcgctcttcctt

SEQ ID NO: 2603 - RNA, 20 nt, synthetic construct
  source 1..20: mol_type = other RNA
ccgcagcccaaactactcgc

SEQ ID NO: 2604 - RNA, 20 nt, synthetic construct
  source 1..20: mol_type = other RNA
gaagaggtcggacagctacg

SEQ ID NO: 2605 - RNA, 20 nt, synthetic construct
  source 1..20: mol_type = other RNA
cttagtccaccctgccgtct

SEQ ID NO: 2606 - RNA, 20 nt, synthetic construct
  source 1..20: mol_type = other RNA
ccctttccctcagtcccgga

SEQ ID NO: 2607 - RNA, 20 nt, synthetic construct
  source 1..20: mol_type = other RNA
ctagaaggggttcctaggca

SEQ ID NO: 2608 - RNA, 20 nt, synthetic construct
  source 1..20: mol_type = other RNA
tgcctgggagcaagttttcc

SEQ ID NO: 2609 - RNA, 20 nt, synthetic construct
  source 1..20: mol_type = other RNA
aggaggatagccgttccagg

SEQ ID NO: 2610 - RNA, 20 nt, synthetic construct
  source 1..20: mol_type = other RNA
tcctggatgacgtgcgtttt

SEQ ID NO: 2611 - RNA, 20 nt, synthetic construct
  source 1..20: mol_type = other RNA
ctctcggtaggacttcatat

SEQ ID NO: 2612 - RNA, 20 nt, synthetic construct
  source 1..20: mol_type = other RNA
gtctagtctccgtatctctc

SEQ ID NO: 2613 - RNA, 20 nt, synthetic construct
  source 1..20: mol_type = other RNA
gtatctgtctagtctccgta

SEQ ID NO: 2614 - RNA, 20 nt, synthetic construct
  source 1..20: mol_type = other RNA
cacaatacagacgtcaaaac

SEQ ID NO: 2615 - RNA, 20 nt, synthetic construct
  source 1..20: mol_type = other RNA
ctctggaataactggtatgg

SEQ ID NO: 2616 - RNA, 20 nt, synthetic construct
  source 1..20: mol_type = other RNA
atctctctggaataactggt

SEQ ID NO: 2617 - RNA, 20 nt, synthetic construct
  source 1..20: mol_type = other RNA
gagtattctccttctgcctt

SEQ ID NO: 2618 - RNA, 20 nt, synthetic construct
  source 1..20: mol_type = other RNA
tttttcggccacgtgtgtgt

SEQ ID NO: 2619 - RNA, 20 nt, synthetic construct
  source 1..20: mol_type = other RNA
cagtgtttctaagaagcgtt

SEQ ID NO: 2620 - RNA, 20 nt, synthetic construct
  source 1..20: mol_type = other RNA
aaagtagcaaacgcttctta

SEQ ID NO: 2621 - RNA, 20 nt, synthetic construct
  source 1..20: mol_type = other RNA
ctcatacttaatagattatt

SEQ ID NO: 2622 - RNA, 20 nt, synthetic construct
  source 1..20: mol_type = other RNA
attaagtatgagagatgtgc

SEQ ID NO: 2623 - RNA, 20 nt, synthetic construct
  source 1..20: mol_type = other RNA
tctctgcacatctctcatac

SEQ ID NO: 2624 - RNA, 20 nt, synthetic construct
  source 1..20: mol_type = other RNA
ctaatcgtctctgcacatct

SEQ ID NO: 2625 - RNA, 20 nt, synthetic construct
  source 1..20: mol_type = other RNA
agagccatttttgctggtgg

SEQ ID NO: 2626 - RNA, 20 nt, synthetic construct
  source 1..20: mol_type = other RNA
tatggtacttttaatgggaa

SEQ ID NO: 2627 - RNA, 20 nt, synthetic construct
  source 1..20: mol_type = other RNA
agccactggaaattccaaaa

SEQ ID NO: 2628 - RNA, 20 nt, synthetic construct
  source 1..20: mol_type = other RNA
ttttggaatttccagtggct

SEQ ID NO: 2629 - RNA, 20 nt, synthetic construct
  source 1..20: mol_type = other RNA
ggattcctgcagtagttcat

SEQ ID NO: 2630 - RNA, 20 nt, synthetic construct
  source 1..20: mol_type = other RNA
tgaactactgcaggaatcca

SEQ ID NO: 2631 - RNA, 20 nt, synthetic construct
  source 1..20: mol_type = other RNA
agatgctgtggcagctcctt

SEQ ID NO: 2632 - RNA, 20 nt, synthetic construct
  source 1..20: mol_type = other RNA
ctcgtataacaataaggagc

SEQ ID NO: 2633 - RNA, 20 nt, synthetic construct
  source 1..20: mol_type = other RNA
cggtgtcaggtgggagtact

SEQ ID NO: 2634 - RNA, 20 nt, synthetic construct
  source 1..20: mol_type = other RNA
aagcgtgtagatgtctggcc

SEQ ID NO: 2635 - RNA, 20 nt, synthetic construct
  source 1..20: mol_type = other RNA
cagcatcgaagcgtgtagat

SEQ ID NO: 2636 - RNA, 20 nt, synthetic construct
  source 1..20: mol_type = other RNA
acacgcttcgatgctgggat

SEQ ID NO: 2637 - RNA, 20 nt, synthetic construct
  source 1..20: mol_type = other RNA
gtgggaatttccatggcttt

SEQ ID NO: 2638 - RNA, 20 nt, synthetic construct
  source 1..20: mol_type = other RNA
gtttaccattgaaggcggct

SEQ ID NO: 2639 - RNA, 20 nt, synthetic construct
  source 1..20: mol_type = other RNA
ctccgctggctcccccagag

SEQ ID NO: 2640 - RNA, 20 nt, synthetic construct
  source 1..20: mol_type = other RNA
taaagacaaagcccaaccac

SEQ ID NO: 2641 - RNA, 20 nt, synthetic construct
  source 1..20: mol_type = other RNA
ccctggagggtttgtgccca

SEQ ID NO: 2642 - RNA, 20 nt, synthetic construct
  source 1..20: mol_type = other RNA
acttcaaaattcaccttgtt

SEQ ID NO: 2643 - RNA, 20 nt, synthetic construct
  source 1..20: mol_type = other RNA
ccggaaaagcttactggctt

SEQ ID NO: 2644 - RNA, 20 nt, synthetic construct
  source 1..20: mol_type = other RNA
gcaatgctgaagattgctct

SEQ ID NO: 2645 - RNA, 20 nt, synthetic construct
  source 1..20: mol_type = other RNA
tcagcattgcagattctgag

SEQ ID NO: 2646 - RNA, 20 nt, synthetic construct
  source 1..20: mol_type = other RNA
tcgagaaacctaacagggct

SEQ ID NO: 2647 - RNA, 20 nt, synthetic construct
  source 1..20: mol_type = other RNA
ctcccttcaaagcctaggac

SEQ ID NO: 2648 - RNA, 20 nt, synthetic construct
  source 1..20: mol_type = other RNA
gaaagaggtttaagaacact

SEQ ID NO: 2649 - RNA, 20 nt, synthetic construct
  source 1..20: mol_type = other RNA
tgaattgcagtaaaggagaa

SEQ ID NO: 2650 - RNA, 20 nt, synthetic construct
  source 1..20: mol_type = other RNA
tctcatgccctgcatcctga

SEQ ID NO: 2651 - RNA, 20 nt, synthetic construct
  source 1..20: mol_type = other RNA
ttgagaagcaaagtgtcttt

SEQ ID NO: 2652 - RNA, 20 nt, synthetic construct
  source 1..20: mol_type = other RNA
gactgaaggcaaagacactt

SEQ ID NO: 2653 - RNA, 20 nt, synthetic construct
  source 1..20: mol_type = other RNA
tatatatctgactgaaggca

SEQ ID NO: 2654 - RNA, 20 nt, synthetic construct
  source 1..20: mol_type = other RNA
ttttctgccccatggcctgg

SEQ ID NO: 2655 - RNA, 20 nt, synthetic construct
  source 1..20: mol_type = other RNA
tgaaagccaaggcctctggc

SEQ ID NO: 2656 - RNA, 20 nt, synthetic construct
  source 1..20: mol_type = other RNA
ttgatcatgaaagccaaggc

SEQ ID NO: 2657 - RNA, 20 nt, synthetic construct
  source 1..20: mol_type = other RNA
acgatctagggaaacatgca

SEQ ID NO: 2658 - RNA, 20 nt, synthetic construct
  source 1..20: mol_type = other RNA
agggaaacatgcaaaatttc

SEQ ID NO: 2659 - RNA, 20 nt, synthetic construct
  source 1..20: mol_type = other RNA
tgcattgccaaatgcagtgc

SEQ ID NO: 2660 - RNA, 20 nt, synthetic construct
  source 1..20: mol_type = other RNA
ttagaaaaacagaacagaac

SEQ ID NO: 2661 - RNA, 20 nt, synthetic construct
  source 1..20: mol_type = other RNA
agaactgtagtaagttctag

SEQ ID NO: 2662 - RNA, 20 nt, synthetic construct
  source 1..20: mol_type = other RNA
gtaggtttgctgtatgtttt

SEQ ID NO: 2663 - RNA, 20 nt, synthetic construct
  source 1..20: mol_type = other RNA
atctgcctacaggtaaggga

SEQ ID NO: 2664 - RNA, 20 nt, synthetic construct
  source 1..20: mol_type = other RNA
ttcccttacctgtaggcaga

SEQ ID NO: 2665 - RNA, 20 nt, synthetic construct
  source 1..20: mol_type = other RNA
gcctacaggtaagggaaaga

SEQ ID NO: 2666 - RNA, 20 nt, synthetic construct
  source 1..20: mol_type = other RNA
ctgagaataacgaaatatgt

SEQ ID NO: 2667 - RNA, 20 nt, synthetic construct
  source 1..20: mol_type = other RNA
aggcacatactccaccactg

SEQ ID NO: 2668 - RNA, 20 nt, synthetic construct
  source 1..20: mol_type = other RNA
atgacaccacactcgcatag

SEQ ID NO: 2669 - RNA, 20 nt, synthetic construct
  source 1..20: mol_type = other RNA
gacacaagttgagttcggag

SEQ ID NO: 2670 - RNA, 20 nt, synthetic construct
  source 1..20: mol_type = other RNA
gaatctgacacaagttgagt

SEQ ID NO: 2671 - RNA, 20 nt, synthetic construct
  source 1..20: mol_type = other RNA
tgagacattttgctacacca

SEQ ID NO: 2672 - RNA, 20 nt, synthetic construct
  source 1..20: mol_type = other RNA
tcctgagacattttgctaca

SEQ ID NO: 2673 - RNA, 20 nt, synthetic construct
  source 1..20: mol_type = other RNA
cctcgcctcctcatttccct

SEQ ID NO: 2674 - RNA, 20 nt, synthetic construct
  source 1..20: mol_type = other RNA
ccttatgaagaaagtcagaa

SEQ ID NO: 2675 - RNA, 20 nt, synthetic construct
  source 1..20: mol_type = other RNA
aagtgtttggtggttcgtca

SEQ ID NO: 2676 - RNA, 20 nt, synthetic construct
  source 1..20: mol_type = other RNA
tcccttcaggaattggaagt

SEQ ID NO: 2677 - RNA, 20 nt, synthetic construct
  source 1..20: mol_type = other RNA
attcacctgtccataagtaa

SEQ ID NO: 2678 - RNA, 20 nt, synthetic construct
  source 1..20: mol_type = other RNA
gtttctatttctacctgtat

SEQ ID NO: 2679 - RNA, 20 nt, synthetic construct
  source 1..20: mol_type = other RNA
cttggtcctaagtaccagtg

SEQ ID NO: 2680 - RNA, 20 nt, synthetic construct
  source 1..20: mol_type = other RNA
tttcaggccactggtactta

SEQ ID NO: 2681 - RNA, 20 nt, synthetic construct
  source 1..20: mol_type = other RNA
tctcttgctgggaacctcta

SEQ ID NO: 2682 - RNA, 20 nt, synthetic construct
  source 1..20: mol_type = other RNA
gccttccttccttggatctt

SEQ ID NO: 2683 - RNA, 20 nt, synthetic construct
  source 1..20: mol_type = other RNA
aaggaaggaaggcagatgag

SEQ ID NO: 2684 - RNA, 20 nt, synthetic construct
  source 1..20: mol_type = other RNA
ctctctgtgctgactctcat

SEQ ID NO: 2685 - RNA, 20 nt, synthetic construct
  source 1..20: mol_type = other RNA
cttttacttttcagcatccc

SEQ ID NO: 2686 - RNA, 20 nt, synthetic construct
  source 1..20: mol_type = other RNA
acccatcccttttacttttc

SEQ ID NO: 2687 - RNA, 20 nt, synthetic construct
  source 1..20: mol_type = other RNA
atctacccatcccttttact

SEQ ID NO: 2688 - RNA, 20 nt, synthetic construct
  source 1..20: mol_type = other RNA
tttggccataatcaacaacc

SEQ ID NO: 2689 - RNA, 20 nt, synthetic construct
  source 1..20: mol_type = other RNA
acaaccaaagacatggaaaa

SEQ ID NO: 2690 - RNA, 20 nt, synthetic construct
  source 1..20: mol_type = other RNA
gttgtcccacatgtagaaac

SEQ ID NO: 2691 - RNA, 20 nt, synthetic construct
  source 1..20: mol_type = other RNA
ttggccctctctcaattctc

SEQ ID NO: 2692 - RNA, 20 nt, synthetic construct
  source 1..20: mol_type = other RNA
atggagttgagctcatcatt

SEQ ID NO: 2693 - RNA, 20 nt, synthetic construct
  source 1..20: mol_type = other RNA
aggaagaaagccaaggcatc

SEQ ID NO: 2694 - RNA, 20 nt, synthetic construct
  source 1..20: mol_type = other RNA
ccttgctattcagtgcagga

SEQ ID NO: 2695 - RNA, 20 nt, synthetic construct
  source 1..20: mol_type = other RNA
ctctcctctgctcagctaga

SEQ ID NO: 2696 - RNA, 20 nt, synthetic construct
  source 1..20: mol_type = other RNA
agctgagcagaggagaggga

SEQ ID NO: 2697 - RNA, 20 nt, synthetic construct
  source 1..20: mol_type = other RNA
caaactccaatccctctcct

SEQ ID NO: 2698 - RNA, 20 nt, synthetic construct
  source 1..20: mol_type = other RNA
tcttaattgagcttgctgtt

SEQ ID NO: 2699 - RNA, 20 nt, synthetic construct
  source 1..20: mol_type = other RNA
ctatcttcttaattgagctt

SEQ ID NO: 2700 - RNA, 20 nt, synthetic construct
  source 1..20: mol_type = other RNA
catagcactctgtgttattg

SEQ ID NO: 2701 - RNA, 20 nt, synthetic construct
  source 1..20: mol_type = other RNA
agctggtaagaactccaata

SEQ ID NO: 2702 - RNA, 20 nt, synthetic construct
  source 1..20: mol_type = other RNA
aatgggtttccaatcaatga

SEQ ID NO: 2703 - RNA, 20 nt, synthetic construct
  source 1..20: mol_type = other RNA
atgaagtgcctgtgagagga

SEQ ID NO: 2704 - RNA, 20 nt, synthetic construct
  source 1..20: mol_type = other RNA
caactctcttcagaagtaaa

SEQ ID NO: 2705 - RNA, 20 nt, synthetic construct
  source 1..20: mol_type = other RNA
ccagagtgagtcctaaatta

SEQ ID NO: 2706 - RNA, 20 nt, synthetic construct
  source 1..20: mol_type = other RNA
cacgaaattcttttctacac

SEQ ID NO: 2707 - RNA, 20 nt, synthetic construct
  source 1..20: mol_type = other RNA
atgaccagaaaataaatcag

SEQ ID NO: 2708 - RNA, 20 nt, synthetic construct
  source 1..20: mol_type = other RNA
ggcaatacaaacaggctcag

SEQ ID NO: 2709 - RNA, 20 nt, synthetic construct
  source 1..20: mol_type = other RNA
atgtcatttctgagcctgtt

SEQ ID NO: 2710 - RNA, 20 nt, synthetic construct
  source 1..20: mol_type = other RNA
ataattagaattgcatgaaa

SEQ ID NO: 2711 - RNA, 20 nt, synthetic construct
  source 1..20: mol_type = other RNA
tactgatatgtcaaattttc

SEQ ID NO: 2712 - RNA, 20 nt, synthetic construct
  source 1..20: mol_type = other RNA
gttatcatactgatatgtca

SEQ ID NO: 2713 - RNA, 20 nt, synthetic construct
  source 1..20: mol_type = other RNA
gaaatcagttatcatactga

SEQ ID NO: 2714 - RNA, 20 nt, synthetic construct
  source 1..20: mol_type = other RNA
gtatgataactgatttcaga

SEQ ID NO: 2715 - RNA, 20 nt, synthetic construct
  source 1..20: mol_type = other RNA
tatcaagacaaattaatagt

SEQ ID NO: 2716 - RNA, 20 nt, synthetic construct
  source 1..20: mol_type = other RNA
agacaaattaatagtataga

SEQ ID NO: 2717 - RNA, 20 nt, synthetic construct
  source 1..20: mol_type = other RNA
aattaaagaactattataca

SEQ ID NO: 2718 - RNA, 20 nt, synthetic construct
  source 1..20: mol_type = other RNA
aaatttttcaggcggacata

SEQ ID NO: 2719 - RNA, 20 nt, synthetic construct
  source 1..20: mol_type = other RNA
ctaaagaaatagggaaatat

SEQ ID NO: 2720 - RNA, 20 nt, synthetic construct
  source 1..20: mol_type = other RNA
tcttatattttcctgcatgt

SEQ ID NO: 2721 - RNA, 20 nt, synthetic construct
  source 1..20: mol_type = other RNA
actccaaactcccttgctct

SEQ ID NO: 2722 - RNA, 20 nt, synthetic construct
  source 1..20: mol_type = other RNA
gtgattccggtatttgtatc

SEQ ID NO: 2723 - RNA, 20 nt, synthetic construct
  source 1..20: mol_type = other RNA
gccatccgtgattccggtat

SEQ ID NO: 2724 - RNA, 20 nt, synthetic construct
  source 1..20: mol_type = other RNA
cggatggctgataacttttc

SEQ ID NO: 2725 - RNA, 20 nt, synthetic construct
  source 1..20: mol_type = other RNA
gtgatttttctaacgttctt

SEQ ID NO: 2726 - RNA, 20 nt, synthetic construct
  source 1..20: mol_type = other RNA
ctttagtttcatgaatctgt

SEQ ID NO: 2727 - RNA, 20 nt, synthetic construct
  source 1..20: mol_type = other RNA
cagattcatgaaactaaagg

SEQ ID NO: 2728 - RNA, 20 nt, synthetic construct
  source 1..20: mol_type = other RNA
aataggaaatttcgagaaaa

SEQ ID NO: 2729 - RNA, 20 nt, synthetic construct
  source 1..20: mol_type = other RNA
tgtagttttttttctcgaaa

SEQ ID NO: 2730 - RNA, 20 nt, synthetic construct
  source 1..20: mol_type = other RNA
cagttcaaaggtaacaaggc

SEQ ID NO: 2731 - RNA, 20 nt, synthetic construct
  source 1..20: mol_type = other RNA
ttgccttgttacctttgaac

SEQ ID NO: 2732 - RNA, 20 nt, synthetic construct
  source 1..20: mol_type = other RNA
cacgagaaactggagaaaaa

SEQ ID NO: 2733 - RNA, 20 nt, synthetic construct
  source 1..20: mol_type = other RNA
ctgtactctaggaagacaca

SEQ ID NO: 2734 - RNA, 20 nt, synthetic construct
  source 1..20: mol_type = other RNA
ggcttccagtgtttctgagg

SEQ ID NO: 2735 - RNA, 20 nt, synthetic construct
  source 1..20: mol_type = other RNA
ttttaataatattccctggt

SEQ ID NO: 2736 - RNA, 20 nt, synthetic construct
  source 1..20: mol_type = other RNA
cttcttgttcctcattatca

SEQ ID NO: 2737 - RNA, 20 nt, synthetic construct
  source 1..20: mol_type = other RNA
accgagaatgctgaatccag

SEQ ID NO: 2738 - RNA, 20 nt, synthetic construct
  source 1..20: mol_type = other RNA
tcaaggcattttattgctgg

SEQ ID NO: 2739 - RNA, 20 nt, synthetic construct
  source 1..20: mol_type = other RNA
agcaataaaatgccttgaag

SEQ ID NO: 2740 - RNA, 20 nt, synthetic construct
  source 1..20: mol_type = other RNA
aacatggatgatcttcaagg

SEQ ID NO: 2741 - RNA, 20 nt, synthetic construct
  source 1..20: mol_type = other RNA
tccatgttggataaatgcat

SEQ ID NO: 2742 - RNA, 20 nt, synthetic construct
  source 1..20: mol_type = other RNA
atgttggataaatgcatatt

SEQ ID NO: 2743 - RNA, 20 nt, synthetic construct
  source 1..20: mol_type = other RNA
gcaggcttatgtagcaacag

SEQ ID NO: 2744 - RNA, 20 nt, synthetic construct
  source 1..20: mol_type = other RNA
tagtcatatgtcaaattttc

SEQ ID NO: 2745 - RNA, 20 nt, synthetic construct
  source 1..20: mol_type = other RNA
ttttttaaatatttgaaata

SEQ ID NO: 2746 - RNA, 20 nt, synthetic construct
  source 1..20: mol_type = other RNA
gttttattacatattcatct

SEQ ID NO: 2747 - RNA, 20 nt, synthetic construct
  source 1..20: mol_type = other RNA
aaagaaagtaacagtattga

SEQ ID NO: 2748 - RNA, 20 nt, synthetic construct
  source 1..20: mol_type = other RNA
aattaaagacttagtgtaaa

SEQ ID NO: 2749 - RNA, 20 nt, synthetic construct
  source 1..20: mol_type = other RNA
agtaattttttcttttaaga

SEQ ID NO: 2750 - RNA, 20 nt, synthetic construct
  source 1..20: mol_type = other RNA
ggcagccatccagtaatttt

SEQ ID NO: 2751 - RNA, 20 nt, synthetic construct
  source 1..20: mol_type = other RNA
atttagacatttctgaatag

SEQ ID NO: 2752 - RNA, 20 nt, synthetic construct
  source 1..20: mol_type = other RNA
attctacagaaccaactaca

SEQ ID NO: 2753 - RNA, 20 nt, synthetic construct
  source 1..20: mol_type = other RNA
tttcctattttgcaacatgt

SEQ ID NO: 2754 - RNA, 20 nt, synthetic construct
  source 1..20: mol_type = other RNA
cccgttctcttttctgtgac

SEQ ID NO: 2755 - RNA, 20 nt, synthetic construct
  source 1..20: mol_type = other RNA
ttgattccggtatttgtttc

SEQ ID NO: 2756 - RNA, 20 nt, synthetic construct
  source 1..20: mol_type = other RNA
aggatggccgaaaacttttc

SEQ ID NO: 2757 - RNA, 20 nt, synthetic construct
  source 1..20: mol_type = other RNA
atgaaaagttttcggccatc

SEQ ID NO: 2758 - RNA, 20 nt, synthetic construct
  source 1..20: mol_type = other RNA
agaatattaacaaaatcgca

SEQ ID NO: 2759 - RNA, 20 nt, synthetic construct
  source 1..20: mol_type = other RNA
caaaaacacgaaattcaatg

SEQ ID NO: 2760 - RNA, 20 nt, synthetic construct
  source 1..20: mol_type = other RNA
aataggcgtttcgaaaaaaa

SEQ ID NO: 2761 - RNA, 20 nt, synthetic construct
  source 1..20: mol_type = other RNA
taccagattttttctttttt

SEQ ID NO: 2762 - RNA, 20 nt, synthetic construct
  source 1..20: mol_type = other RNA
ggtatgatgcacttttgtac

SEQ ID NO: 2763 - RNA, 20 nt, synthetic construct
  source 1..20: mol_type = other RNA
ttgtcttcttaccgtgaaaa

SEQ ID NO: 2764 - RNA, 20 nt, synthetic construct
  source 1..20: mol_type = other RNA
ctgttcttctagcaagaaac

SEQ ID NO: 2765 - RNA, 20 nt, synthetic construct
  source 1..20: mol_type = other RNA
ggcttccagtgtttttgacg

SEQ ID NO: 2766 - RNA, 20 nt, synthetic construct
  source 1..20: mol_type = other RNA
cttcttgttcctgtttacca

SEQ ID NO: 2767 - RNA, 20 nt, synthetic construct
  source 1..20: mol_type = other RNA
accaagaatgctaaatccag

SEQ ID NO: 2768 - RNA, 20 nt, synthetic construct
  source 1..20: mol_type = other RNA
tcaaggcattttattgctgg

SEQ ID NO: 2769 - RNA, 20 nt, synthetic construct
  source 1..20: mol_type = other RNA
agcaataaaatgccttgaag

SEQ ID NO: 2770 - RNA, 20 nt, synthetic construct
  source 1..20: mol_type = other RNA
tccatgctgcataaatgtat

SEQ ID NO: 2771 - RNA, 20 nt, synthetic construct
  source 1..20: mol_type = other RNA
atgctgcataaatgtatgtt

SEQ ID NO: 2772 - RNA, 20 nt, synthetic construct
  source 1..20: mol_type = other RNA
gcctgctgattccaaattct

SEQ ID NO: 2773 - RNA, 20 nt, synthetic construct
  source 1..20: mol_type = other RNA
gcaggctgatgtaacaagag

SEQ ID NO: 2774 - RNA, 20 nt, synthetic construct
  source 1..20: mol_type = other RNA
acatttgccaattgctgggt

SEQ ID NO: 2775 - RNA, 20 nt, synthetic construct
  source 1..20: mol_type = other RNA
ttttgtttccagtagtcaac

SEQ ID NO: 2776 - RNA, 20 nt, synthetic construct
  source 1..20: mol_type = other RNA
tgtagggaataattagaagt

SEQ ID NO: 2777 - RNA, 20 nt, synthetic construct
  source 1..20: mol_type = other RNA
ccttgaacccacacagtaac

SEQ ID NO: 2778 - RNA, 20 nt, synthetic construct
  source 1..20: mol_type = other RNA
tagagcaatcacaaagtttt

SEQ ID NO: 2779 - RNA, 20 nt, synthetic construct
  source 1..20: mol_type = other RNA
caaagttttgaactctgagg

SEQ ID NO: 2780 - RNA, 20 nt, synthetic construct
  source 1..20: mol_type = other RNA
tgtagctcattgaaccagct

SEQ ID NO: 2781 - RNA, 20 nt, synthetic construct
  source 1..20: mol_type = other RNA
cagaccctccattccaggaa

SEQ ID NO: 2782 - RNA, 20 nt, synthetic construct
  source 1..20: mol_type = other RNA
ccatggcccgtaatacattt

SEQ ID NO: 2783 - RNA, 20 nt, synthetic construct
  source 1..20: mol_type = other RNA
tcacattcatgacctgtggc

SEQ ID NO: 2784 - RNA, 20 nt, synthetic construct
  source 1..20: mol_type = other RNA
tgaagcatttgctcttcctt

SEQ ID NO: 2785 - RNA, 20 nt, synthetic construct
  source 1..20: mol_type = other RNA
ccgcagcccaaactcctacc

SEQ ID NO: 2786 - RNA, 20 nt, synthetic construct
  source 1..20: mol_type = other RNA
gaagaggtcggacagctacg

SEQ ID NO: 2787 - RNA, 20 nt, synthetic construct
  source 1..20: mol_type = other RNA
cttagtctaccctgccatct

SEQ ID NO: 2788 - RNA, 20 nt, synthetic construct
  source 1..20: mol_type = other RNA
tcctttatgccatgggtccc

SEQ ID NO: 2789 - RNA, 20 nt, synthetic construct
  source 1..20: mol_type = other RNA
ccctttccctcagtgcagag

SEQ ID NO: 2790 - RNA, 20 nt, synthetic construct
  source 1..20: mol_type = other RNA
ctagaatgggttcctgggca

SEQ ID NO: 2791 - RNA, 20 nt, synthetic construct
  source 1..20: mol_type = other RNA
tgtgggtcaaataggtttgt

SEQ ID NO: 2792 - RNA, 20 nt, synthetic construct
  source 1..20: mol_type = other RNA
aggaggataacctttccagg

SEQ ID NO: 2793 - RNA, 20 nt, synthetic construct
  source 1..20: mol_type = other RNA
tcctggatcccatgtttttt

SEQ ID NO: 2794 - RNA, 20 nt, synthetic construct
  source 1..20: mol_type = other RNA
catgttttttctgaagaact

SEQ ID NO: 2795 - RNA, 20 nt, synthetic construct
  source 1..20: mol_type = other RNA
ctctcggtaggacttcatat

SEQ ID NO: 2796 - RNA, 20 nt, synthetic construct
  source 1..20: mol_type = other RNA
agttctccgtatctctctcg

SEQ ID NO: 2797 - RNA, 20 nt, synthetic construct
  source 1..20: mol_type = other RNA
gtatttatctagttctccgt

SEQ ID NO: 2798 - RNA, 20 nt, synthetic construct
  source 1..20: mol_type = other RNA
tttattcacatacaaaagta

SEQ ID NO: 2799 - RNA, 20 nt, synthetic construct
  source 1..20: mol_type = other RNA
aaatccataccagttattcc

SEQ ID NO: 2800 - RNA, 20 nt, synthetic construct
  source 1..20: mol_type = other RNA
ctctggaataactggtatgg

SEQ ID NO: 2801 - RNA, 20 nt, synthetic construct
  source 1..20: mol_type = other RNA
ataccagttattccagagag

SEQ ID NO: 2802 - RNA, 20 nt, synthetic construct
  source 1..20: mol_type = other RNA
atctctctggaataactggt

SEQ ID NO: 2803 - RNA, 20 nt, synthetic construct
  source 1..20: mol_type = other RNA
gagtattctccttctgcctt

SEQ ID NO: 2804 - RNA, 20 nt, synthetic construct
  source 1..20: mol_type = other RNA
ttttttgcccacgtgtatgt

SEQ ID NO: 2805 - RNA, 20 nt, synthetic construct
  source 1..20: mol_type = other RNA
cagtgtttctaagaagcgtt

SEQ ID NO: 2806 - RNA, 20 nt, synthetic construct
  source 1..20: mol_type = other RNA
aaagtagcaaacgcttctta

SEQ ID NO: 2807 - RNA, 20 nt, synthetic construct
  source 1..20: mol_type = other RNA
tttaagtatgagaaatgtgc

SEQ ID NO: 2808 - RNA, 20 nt, synthetic construct
  source 1..20: mol_type = other RNA
tgtctgcacatttctcatac

SEQ ID NO: 2809 - RNA, 20 nt, synthetic construct
  source 1..20: mol_type = other RNA
ctaatcctgtctgcacattt

SEQ ID NO: 2810 - RNA, 20 nt, synthetic construct
  source 1..20: mol_type = other RNA
tatggtacttttatgggaat

SEQ ID NO: 2811 - RNA, 20 nt, synthetic construct
  source 1..20: mol_type = other RNA
agccactggaaattccaaaa

SEQ ID NO: 2812 - RNA, 20 nt, synthetic construct
  source 1..20: mol_type = other RNA
ttttggaatttccagtggct

SEQ ID NO: 2813 - RNA, 20 nt, synthetic construct
  source 1..20: mol_type = other RNA
ggattcctgcagtagttcat

SEQ ID NO: 2814 - RNA, 20 nt, synthetic construct
  source 1..20: mol_type = other RNA
tgaactactgcaggaatcca

SEQ ID NO: 2815 - RNA, 20 nt, synthetic construct
  source 1..20: mol_type = other RNA
agatcctgtggcagcccctt

SEQ ID NO: 2816 - RNA, 20 nt, synthetic construct
  source 1..20: mol_type = other RNA
ctcgtataacaataaggggc

SEQ ID NO: 2817 - RNA, 20 nt, synthetic construct
  source 1..20: mol_type = other RNA
cagtgtcaggtgggagtact

SEQ ID NO: 2818 - RNA, 20 nt, synthetic construct
  source 1..20: mol_type = other RNA
aaacgtgtaggtttctggcc

SEQ ID NO: 2819 - RNA, 20 nt, synthetic construct
  source 1..20: mol_type = other RNA
cagcatcgaaacgtgtaggt

SEQ ID NO: 2820 - RNA, 20 nt, synthetic construct
  source 1..20: mol_type = other RNA
gtgggaatttccatggcttt

SEQ ID NO: 2821 - RNA, 20 nt, synthetic construct
  source 1..20: mol_type = other RNA
gtttaccattggaggctgct

SEQ ID NO: 2822 - RNA, 20 nt, synthetic construct
  source 1..20: mol_type = other RNA
gctggctcccccagagagtg

SEQ ID NO: 2823 - RNA, 20 nt, synthetic construct
  source 1..20: mol_type = other RNA
atccgctggctcccccagag

SEQ ID NO: 2824 - RNA, 20 nt, synthetic construct
  source 1..20: mol_type = other RNA
ccctggagggtttgtgccaa

SEQ ID NO: 2825 - RNA, 20 nt, synthetic construct
  source 1..20: mol_type = other RNA
acttcacaactcacctcgtt

SEQ ID NO: 2826 - RNA, 20 nt, synthetic construct
  source 1..20: mol_type = other RNA
cagtgtcttagccaaaattt

SEQ ID NO: 2827 - RNA, 20 nt, synthetic construct
  source 1..20: mol_type = other RNA
gacagcatgttacaataaaa

SEQ ID NO: 2828 - RNA, 20 nt, synthetic construct
  source 1..20: mol_type = other RNA
gcaatgctgaagattgcact

SEQ ID NO: 2829 - RNA, 20 nt, synthetic construct
  source 1..20: mol_type = other RNA
tcagcattgcagattcagag

SEQ ID NO: 2830 - RNA, 20 nt, synthetic construct
  source 1..20: mol_type = other RNA
ccctggttctatggagcagt

SEQ ID NO: 2831 - RNA, 20 nt, synthetic construct
  source 1..20: mol_type = other RNA
ttgggagttcatgtactgct

SEQ ID NO: 2832 - RNA, 20 nt, synthetic construct
  source 1..20: mol_type = other RNA
atgtttcaggacttcctcag

SEQ ID NO: 2833 - RNA, 20 nt, synthetic construct
  source 1..20: mol_type = other RNA
agaccgctcacaggtacaac

SEQ ID NO: 2834 - RNA, 20 nt, synthetic construct
  source 1..20: mol_type = other RNA
tgagttgcaataatacagaa

SEQ ID NO: 2835 - RNA, 20 nt, synthetic construct
  source 1..20: mol_type = other RNA
tctcatgacccacatcctga

SEQ ID NO: 2836 - RNA, 20 nt, synthetic construct
  source 1..20: mol_type = other RNA
ctcctgcaggggagtaagct

SEQ ID NO: 2837 - RNA, 20 nt, synthetic construct
  source 1..20: mol_type = other RNA
gggatgggtggaggcgaaca

SEQ ID NO: 2838 - RNA, 20 nt, synthetic construct
  source 1..20: mol_type = other RNA
ctgataactgaagtgtcttt

SEQ ID NO: 2839 - RNA, 20 nt, synthetic construct
  source 1..20: mol_type = other RNA
ccatgtatggcctgtacccc

SEQ ID NO: 2840 - RNA, 20 nt, synthetic construct
  source 1..20: mol_type = other RNA
tgctttgctgtttgctgccc

SEQ ID NO: 2841 - RNA, 20 nt, synthetic construct
  source 1..20: mol_type = other RNA
gcctacaaataaagaaacaa

SEQ ID NO: 2842 - RNA, 20 nt, synthetic construct
  source 1..20: mol_type = other RNA
aactgagtgtttccaagaag

SEQ ID NO: 2843 - RNA, 20 nt, synthetic construct
  source 1..20: mol_type = other RNA
atgacaccacactcgcatag

SEQ ID NO: 2844 - RNA, 20 nt, synthetic construct
  source 1..20: mol_type = other RNA
gagacaacttgagtcctgaa

SEQ ID NO: 2845 - RNA, 20 nt, synthetic construct
  source 1..20: mol_type = other RNA
ggctctccttcctcctagtt

SEQ ID NO: 2846 - RNA, 20 nt, synthetic construct
  source 1..20: mol_type = other RNA
ttgcctccagatacctttct

SEQ ID NO: 2847 - RNA, 20 nt, synthetic construct
  source 1..20: mol_type = other RNA
ggaggcaaggatatcacatt

SEQ ID NO: 2848 - RNA, 20 nt, synthetic construct
  source 1..20: mol_type = other RNA
tgacttgtttcttaatgtga

SEQ ID NO: 2849 - RNA, 20 nt, synthetic construct
  source 1..20: mol_type = other RNA
cattaagaaacaagtcaaga

SEQ ID NO: 2850 - RNA, 20 nt, synthetic construct
  source 1..20: mol_type = other RNA
tttgtcatcttgacttgttt

SEQ ID NO: 2851 - RNA, 20 nt, synthetic construct
  source 1..20: mol_type = other RNA
atggagaggcaaatctatct

SEQ ID NO: 2852 - RNA, 20 nt, synthetic construct
  source 1..20: mol_type = other RNA
atctctttctatatctacgt

SEQ ID NO: 2853 - RNA, 20 nt, synthetic construct
  source 1..20: mol_type = other RNA
ctttctatatctacgtctat

SEQ ID NO: 2854 - RNA, 20 nt, synthetic construct
  source 1..20: mol_type = other RNA
acgtctattccaatatgtag

SEQ ID NO: 2855 - RNA, 20 nt, synthetic construct
  source 1..20: mol_type = other RNA
cttcagaccactggtggtca

SEQ ID NO: 2856 - RNA, 20 nt, synthetic construct
  source 1..20: mol_type = other RNA
gccttcctgccatttttatt

SEQ ID NO: 2857 - RNA, 20 nt, synthetic construct
  source 1..20: mol_type = other RNA
ctctctttgctgactctcat

SEQ ID NO: 2858 - RNA, 20 nt, synthetic construct
  source 1..20: mol_type = other RNA
acccttttactttacaggat

SEQ ID NO: 2859 - RNA, 20 nt, synthetic construct
  source 1..20: mol_type = other RNA
atccacccttttactttaca

SEQ ID NO: 2860 - RNA, 20 nt, synthetic construct
  source 1..20: mol_type = other RNA
tgtaaagtaaaagggtggat

SEQ ID NO: 2861 - RNA, 20 nt, synthetic construct
  source 1..20: mol_type = other RNA
cattgttccccctgtcacta

SEQ ID NO: 2862 - RNA, 20 nt, synthetic construct
  source 1..20: mol_type = other RNA
atggagttgatctcattgtt

SEQ ID NO: 2863 - RNA, 20 nt, synthetic construct
  source 1..20: mol_type = other RNA
actccatagataccttggct

SEQ ID NO: 2864 - RNA, 20 nt, synthetic construct
  source 1..20: mol_type = other RNA
ccttgctcttcagtgcaaga

SEQ ID NO: 2865 - RNA, 20 nt, synthetic construct
  source 1..20: mol_type = other RNA
gggctccatcaccttgctct

SEQ ID NO: 2866 - RNA, 20 nt, synthetic construct
  source 1..20: mol_type = other RNA
ctctcctgcattcaggaaga

SEQ ID NO: 2867 - RNA, 20 nt, synthetic construct
  source 1..20: mol_type = other RNA
tcctgaatgcaggagagaga

SEQ ID NO: 2868 - RNA, 20 nt, synthetic construct
  source 1..20: mol_type = other RNA
tagctaccacagtagtccca

SEQ ID NO: 2869 - RNA, 20 nt, synthetic construct
  source 1..20: mol_type = other RNA
attctcattctcagcaggcc

SEQ ID NO: 2870 - RNA, 20 nt, synthetic construct
  source 1..20: mol_type = other RNA
acaaatccattctcattctc

SEQ ID NO: 2871 - RNA, 20 nt, synthetic construct
  source 1..20: mol_type = other RNA
ttggctaaacatgacgttgc

SEQ ID NO: 2872 - RNA, 20 nt, synthetic construct
  source 1..20: mol_type = other RNA
cagttgctattcctcaggat

SEQ ID NO: 2873 - RNA, 20 nt, synthetic construct
  source 1..20: mol_type = other RNA
tgaggaatagcaactgcgat

SEQ ID NO: 2874 - RNA, 20 nt, synthetic construct
  source 1..20: mol_type = other RNA
cagaatgctatgagggctct

SEQ ID NO: 2875 - RNA, 20 nt, synthetic construct
  source 1..20: mol_type = other RNA
tttccaagtcaattaactgc

SEQ ID NO: 2876 - RNA, 20 nt, synthetic construct
  source 1..20: mol_type = other RNA
gtcaatacaaatagacctag

SEQ ID NO: 2877 - RNA, 20 nt, synthetic construct
  source 1..20: mol_type = other RNA
tttctgtcatttctaggtct

SEQ ID NO: 2878 - RNA, 20 nt, synthetic construct
  source 1..20: mol_type = other RNA
atatgtcaactgagttttag

SEQ ID NO: 2879 - RNA, 20 nt, synthetic construct
  source 1..20: mol_type = other RNA
gcttcattccgtattcatgt

SEQ ID NO: 2880 - RNA, 20 nt, synthetic construct
  source 1..20: mol_type = other RNA
agagacagtaacagtataga

SEQ ID NO: 2881 - RNA, 20 nt, synthetic construct
  source 1..20: mol_type = other RNA
agtaattttttcatttaaga

SEQ ID NO: 2882 - RNA, 20 nt, synthetic construct
  source 1..20: mol_type = other RNA
cactccattgggaatacatc

SEQ ID NO: 2883 - RNA, 20 nt, synthetic construct
  source 1..20: mol_type = other RNA
gtggatttcattttttagta

SEQ ID NO: 2884 - RNA, 20 nt, synthetic construct
  source 1..20: mol_type = other RNA
actgatcctcacagacaggc

SEQ ID NO: 2885 - RNA, 20 nt, synthetic construct
  source 1..20: mol_type = other RNA
tcacagacaggcgggaaaat

SEQ ID NO: 2886 - RNA, 20 nt, synthetic construct
  source 1..20: mol_type = other RNA
ttttatattttcccgcctgt

SEQ ID NO: 2887 - RNA, 20 nt, synthetic construct
  source 1..20: mol_type = other RNA
ctccttcctctccttctgtg

SEQ ID NO: 2888 - RNA, 20 nt, synthetic construct
  source 1..20: mol_type = other RNA
ttgcttccagtatttgttcc

SEQ ID NO: 2889 - RNA, 20 nt, synthetic construct
  source 1..20: mol_type = other RNA
gtggtttttaatattcttct

SEQ ID NO: 2890 - RNA, 20 nt, synthetic construct
  source 1..20: mol_type = other RNA
gacagggaatttccaaaaaa

SEQ ID NO: 2891 - RNA, 20 nt, synthetic construct
  source 1..20: mol_type = other RNA
tacagttttttttttttttt

SEQ ID NO: 2892 - RNA, 20 nt, synthetic construct
  source 1..20: mol_type = other RNA
ccgttcaacagtcagaaggc

SEQ ID NO: 2893 - RNA, 20 nt, synthetic construct
  source 1..20: mol_type = other RNA
ttgccttctgactgttgaac

SEQ ID NO: 2894 - RNA, 20 nt, synthetic construct
  source 1..20: mol_type = other RNA
catgagaaactggaggaaaa

SEQ ID NO: 2895 - RNA, 20 nt, synthetic construct
  source 1..20: mol_type = other RNA
ctgttcttctagcaagacac

SEQ ID NO: 2896 - RNA, 20 nt, synthetic construct
  source 1..20: mol_type = other RNA
gaaacactggaacccagtta

SEQ ID NO: 2897 - RNA, 20 nt, synthetic construct
  source 1..20: mol_type = other RNA
cctgttaactgggttccagt

SEQ ID NO: 2898 - RNA, 20 nt, synthetic construct
  source 1..20: mol_type = other RNA
ttttaatgatatcccctgtt

SEQ ID NO: 2899 - RNA, 20 nt, synthetic construct
  source 1..20: mol_type = other RNA
ttaaaatgataaactagaaa

SEQ ID NO: 2900 - RNA, 20 nt, synthetic construct
  source 1..20: mol_type = other RNA
cttttttttctagtttatca

SEQ ID NO: 2901 - RNA, 20 nt, synthetic construct
  source 1..20: mol_type = other RNA
aatgagaatgctacatccag

SEQ ID NO: 2902 - RNA, 20 nt, synthetic construct
  source 1..20: mol_type = other RNA
tcaaggcattttattgctgg

SEQ ID NO: 2903 - RNA, 20 nt, synthetic construct
  source 1..20: mol_type = other RNA
agcaataaaatgccttgaag

SEQ ID NO: 2904 - RNA, 20 nt, synthetic construct
  source 1..20: mol_type = other RNA
aacatggatgatcttcaagg

SEQ ID NO: 2905 - RNA, 20 nt, synthetic construct
  source 1..20: mol_type = other RNA
tccatgttggataaatgcat

SEQ ID NO: 2906 - RNA, 20 nt, synthetic construct
  source 1..20: mol_type = other RNA
atgttggataaatgcatatt

SEQ ID NO: 2907 - RNA, 20 nt, synthetic construct
  source 1..20: mol_type = other RNA
cttgttacacaagcctgctg

SEQ ID NO: 2908 - RNA, 20 nt, synthetic construct
  source 1..20: mol_type = other RNA
gcaggcttgtgtaacaagag

SEQ ID NO: 2909 - RNA, 20 nt, synthetic construct
  source 1..20: mol_type = other RNA
acatttgccatttgctgggt

SEQ ID NO: 2910 - RNA, 20 nt, synthetic construct
  source 1..20: mol_type = other RNA
agaaaatattttgcatttac

SEQ ID NO: 2911 - RNA, 20 nt, synthetic construct
  source 1..20: mol_type = other RNA
aatttctatatctttttaaa

SEQ ID NO: 2912 - RNA, 20 nt, synthetic construct
  source 1..20: mol_type = other RNA
ttttaaatgagagttgacta

SEQ ID NO: 2913 - RNA, 20 nt, synthetic construct
  source 1..20: mol_type = other RNA
ttttgcttcaagtagtcaac

SEQ ID NO: 2914 - RNA, 20 nt, synthetic construct
  source 1..20: mol_type = other RNA
tgtggggaataattggaagt

SEQ ID NO: 2915 - RNA, 20 nt, synthetic construct
  source 1..20: mol_type = other RNA
tggataaggtaagaaactta

SEQ ID NO: 2916 - RNA, 20 nt, synthetic construct
  source 1..20: mol_type = other RNA
acgatggtatgtaatattaa

SEQ ID NO: 2917 - RNA, 20 nt, synthetic construct
  source 1..20: mol_type = other RNA
ctttggacccacaaattcaa

SEQ ID NO: 2918 - RNA, 20 nt, synthetic construct
  source 1..20: mol_type = other RNA
taaagcaatcataaaatttt

SEQ ID NO: 2919 - RNA, 20 nt, synthetic construct
  source 1..20: mol_type = other RNA
ctcagaattcaaaattttat

SEQ ID NO: 2920 - RNA, 20 nt, synthetic construct
  source 1..20: mol_type = other RNA
taaaattttgaattctgagg

SEQ ID NO: 2921 - RNA, 20 nt, synthetic construct
  source 1..20: mol_type = other RNA
aaaagagggaagccaaggaa

SEQ ID NO: 2922 - RNA, 20 nt, synthetic construct
  source 1..20: mol_type = other RNA
agttgctcattgaaccagct

SEQ ID NO: 2923 - RNA, 20 nt, synthetic construct
  source 1..20: mol_type = other RNA
aacactgtctctctagagac

SEQ ID NO: 2924 - RNA, 20 nt, synthetic construct
  source 1..20: mol_type = other RNA
ccatggcccataatacattt

SEQ ID NO: 2925 - RNA, 20 nt, synthetic construct
  source 1..20: mol_type = other RNA
tcccattcgtgacctgtggc

SEQ ID NO: 2926 - RNA, 20 nt, synthetic construct
  source 1..20: mol_type = other RNA
cagagcattcactcctcctt

SEQ ID NO: 2927 - RNA, 20 nt, synthetic construct
  source 1..20: mol_type = other RNA
cccattccctcagtcccgga

SEQ ID NO: 2928 - RNA, 20 nt, synthetic construct
  source 1..20: mol_type = other RNA
tctgctggccacagcaattc

SEQ ID NO: 2929 - RNA, 20 nt, synthetic construct
  source 1..20: mol_type = other RNA
ctaggatgggttcctggtca

SEQ ID NO: 2930 - RNA, 20 nt, synthetic construct
  source 1..20: mol_type = other RNA
tagagatactgcatcctgcc

SEQ ID NO: 2931 - RNA, 20 nt, synthetic construct
  source 1..20: mol_type = other RNA
tgcctgaaagctaggtttcc

SEQ ID NO: 2932 - RNA, 20 nt, synthetic construct
  source 1..20: mol_type = other RNA
ggtgggtcaagtgggtttct

SEQ ID NO: 2933 - RNA, 20 nt, synthetic construct
  source 1..20: mol_type = other RNA
acagacaggaatactttttg

SEQ ID NO: 2934 - RNA, 20 nt, synthetic construct
  source 1..20: mol_type = other RNA
ttcccaggccagcagtctca

SEQ ID NO: 2935 - RNA, 20 nt, synthetic construct
  source 1..20: mol_type = other RNA
agcatgatatccttcccagg

SEQ ID NO: 2936 - RNA, 20 nt, synthetic construct
  source 1..20: mol_type = other RNA
tgctggatgccatttttttc

SEQ ID NO: 2937 - RNA, 20 nt, synthetic construct
  source 1..20: mol_type = other RNA
ctctgtgtaggacttcatat

SEQ ID NO: 2938 - RNA, 20 nt, synthetic construct
  source 1..20: mol_type = other RNA
gtctagctctccgtatctct

SEQ ID NO: 2939 - RNA, 20 nt, synthetic construct
  source 1..20: mol_type = other RNA
ctatctgtctagctctccgt

SEQ ID NO: 2940 - RNA, 20 nt, synthetic construct
  source 1..20: mol_type = other RNA
ctctggaataactggtatgg

SEQ ID NO: 2941 - RNA, 20 nt, synthetic construct
  source 1..20: mol_type = other RNA
ataccagttattccagagag

SEQ ID NO: 2942 - RNA, 20 nt, synthetic construct
  source 1..20: mol_type = other RNA
atctctctggaataactggt

SEQ ID NO: 2943 - RNA, 20 nt, synthetic construct
  source 1..20: mol_type = other RNA
tccttctgccttctgcccaa

SEQ ID NO: 2944 - RNA, 20 nt, synthetic construct
  source 1..20: mol_type = other RNA
gaatatcctccttctgcctt

SEQ ID NO: 2945 - RNA, 20 nt, synthetic construct
  source 1..20: mol_type = other RNA
ctttttggccacatgtatgt

SEQ ID NO: 2946 - RNA, 20 nt, synthetic construct
  source 1..20: mol_type = other RNA
cagtgtttctaggaagtgtg

SEQ ID NO: 2947 - RNA, 20 nt, synthetic construct
  source 1..20: mol_type = other RNA
aatgcagcacacacttccta

SEQ ID NO: 2948 - RNA, 20 nt, synthetic construct
  source 1..20: mol_type = other RNA
ctttttttaaagaaaaaaaa

SEQ ID NO: 2949 - RNA, 20 nt, synthetic construct
  source 1..20: mol_type = other RNA
tctctgcacatttctcatac

SEQ ID NO: 2950 - RNA, 20 nt, synthetic construct
  source 1..20: mol_type = other RNA
ctaatcctctctgcacattt

SEQ ID NO: 2951 - RNA, 20 nt, synthetic construct
  source 1..20: mol_type = other RNA
cttttgggaatatttcaaag

SEQ ID NO: 2952 - RNA, 20 nt, synthetic construct
  source 1..20: mol_type = other RNA
caaaaaatgggtacatatgc

SEQ ID NO: 2953 - RNA, 20 nt, synthetic construct
  source 1..20: mol_type = other RNA
agccactggaaattccaaaa

SEQ ID NO: 2954 - RNA, 20 nt, synthetic construct
  source 1..20: mol_type = other RNA
agatcctgtggcagcccctt

SEQ ID NO: 2955 - RNA, 20 nt, synthetic construct
  source 1..20: mol_type = other RNA
gttgtataacaccaaggggc

SEQ ID NO: 2956 - RNA, 20 nt, synthetic construct
  source 1..20: mol_type = other RNA
cagtgtcaggtgggagtact

SEQ ID NO: 2957 - RNA, 20 nt, synthetic construct
  source 1..20: mol_type = other RNA
tgtcaggttgcagtactccc

SEQ ID NO: 2958 - RNA, 20 nt, synthetic construct
  source 1..20: mol_type = other RNA
aagcaggtaaatgtctggca

SEQ ID NO: 2959 - RNA, 20 nt, synthetic construct
  source 1..20: mol_type = other RNA
cagcatccaagcaggtaaat

SEQ ID NO: 2960 - RNA, 20 nt, synthetic construct
  source 1..20: mol_type = other RNA
atggcttttcatcccagcat

SEQ ID NO: 2961 - RNA, 20 nt, synthetic construct
  source 1..20: mol_type = other RNA
cacctctggctcccccagag

SEQ ID NO: 2962 - RNA, 20 nt, synthetic construct
  source 1..20: mol_type = other RNA
taaagacacagctcgcacag

SEQ ID NO: 2963 - RNA, 20 nt, synthetic construct
  source 1..20: mol_type = other RNA
cattgtcctagacaaaattc

SEQ ID NO: 2964 - RNA, 20 nt, synthetic construct
  source 1..20: mol_type = other RNA
gacagcatattacaataaga

SEQ ID NO: 2965 - RNA, 20 nt, synthetic construct
  source 1..20: mol_type = other RNA
ctggaaaagtttactggctt

SEQ ID NO: 2966 - RNA, 20 nt, synthetic construct
  source 1..20: mol_type = other RNA
gcaatgctgaagattgcact

SEQ ID NO: 2967 - RNA, 20 nt, synthetic construct
  source 1..20: mol_type = other RNA
tcagcattgcagattccgag

SEQ ID NO: 2968 - RNA, 20 nt, synthetic construct
  source 1..20: mol_type = other RNA
agagccacatttctcggaat

SEQ ID NO: 2969 - RNA, 20 nt, synthetic construct
  source 1..20: mol_type = other RNA
tgttatccttgagaaaccta

SEQ ID NO: 2970 - RNA, 20 nt, synthetic construct
  source 1..20: mol_type = other RNA
ttgagaaacctaactgggtt

SEQ ID NO: 2971 - RNA, 20 nt, synthetic construct
  source 1..20: mol_type = other RNA
ccctgggtctgtggagtagt

SEQ ID NO: 2972 - RNA, 20 nt, synthetic construct
  source 1..20: mol_type = other RNA
ctcaggtctttttcagtccg

SEQ ID NO: 2973 - RNA, 20 nt, synthetic construct
  source 1..20: mol_type = other RNA
ctcccttcaaagctaagaac

SEQ ID NO: 2974 - RNA, 20 nt, synthetic construct
  source 1..20: mol_type = other RNA
gaaagaggcaaaagcacacg

SEQ ID NO: 2975 - RNA, 20 nt, synthetic construct
  source 1..20: mol_type = other RNA
tctcgtgcccagcataatgc

SEQ ID NO: 2976 - RNA, 20 nt, synthetic construct
  source 1..20: mol_type = other RNA
cctacaataagatagggaat

SEQ ID NO: 2977 - RNA, 20 nt, synthetic construct
  source 1..20: mol_type = other RNA
tattgtaggtgataagcttt

SEQ ID NO: 2978 - RNA, 20 nt, synthetic construct
  source 1..20: mol_type = other RNA
ctgagaagtgaagtgttgtt

SEQ ID NO: 2979 - RNA, 20 nt, synthetic construct
  source 1..20: mol_type = other RNA
ccaggagtttaatgctttct

SEQ ID NO: 2980 - RNA, 20 nt, synthetic construct
  source 1..20: mol_type = other RNA
tctagggacacatgcaaggt

SEQ ID NO: 2981 - RNA, 20 nt, synthetic construct
  source 1..20: mol_type = other RNA
agggacacatgcaaggtttt

SEQ ID NO: 2982 - RNA, 20 nt, synthetic construct
  source 1..20: mol_type = other RNA
ccctttcttctatgctgttc

SEQ ID NO: 2983 - RNA, 20 nt, synthetic construct
  source 1..20: mol_type = other RNA
ctacagagtgttcatgacga

SEQ ID NO: 2984 - RNA, 20 nt, synthetic construct
  source 1..20: mol_type = other RNA
gaaactccactaacatggaa

SEQ ID NO: 2985 - RNA, 20 nt, synthetic construct
  source 1..20: mol_type = other RNA
gattgcttctcatcggaaac

SEQ ID NO: 2986 - RNA, 20 nt, synthetic construct
  source 1..20: mol_type = other RNA
gatatttcttttccactaag

SEQ ID NO: 2987 - RNA, 20 nt, synthetic construct
  source 1..20: mol_type = other RNA
cttactttcgtgtttgtttg

SEQ ID NO: 2988 - RNA, 20 nt, synthetic construct
  source 1..20: mol_type = other RNA
cagtgactcttttttggttt

SEQ ID NO: 2989 - RNA, 20 nt, synthetic construct
  source 1..20: mol_type = other RNA
agcttattatttcctagaac

SEQ ID NO: 2990 - RNA, 20 nt, synthetic construct
  source 1..20: mol_type = other RNA
atgacaccacaccagcatag

SEQ ID NO: 2991 - RNA, 20 nt, synthetic construct
  source 1..20: mol_type = other RNA
gagccaagttgagtcctgag

SEQ ID NO: 2992 - RNA, 20 nt, synthetic construct
  source 1..20: mol_type = other RNA
tgccactgcactccagcctg

SEQ ID NO: 2993 - RNA, 20 nt, synthetic construct
  source 1..20: mol_type = other RNA
cggctcactgcaagctccgc

SEQ ID NO: 2994 - RNA, 20 nt, synthetic construct
  source 1..20: mol_type = other RNA
tggctagaacagtgaaaccc

SEQ ID NO: 2995 - RNA, 20 nt, synthetic construct
  source 1..20: mol_type = other RNA
cgaggtcaggagaccaagac

SEQ ID NO: 2996 - RNA, 20 nt, synthetic construct
  source 1..20: mol_type = other RNA
gcctgcctcagcctcccaaa

SEQ ID NO: 2997 - RNA, 20 nt, synthetic construct
  source 1..20: mol_type = other RNA
cagcactttgggaggctgag

SEQ ID NO: 2998 - RNA, 20 nt, synthetic construct
  source 1..20: mol_type = other RNA
ttctgcttccataaaactag

SEQ ID NO: 2999 - RNA, 20 nt, synthetic construct
  source 1..20: mol_type = other RNA
tctcaactccatatatcctt

SEQ ID NO: 3000 - RNA, 20 nt, synthetic construct
  source 1..20: mol_type = other RNA
cggctgttttattaataaga

SEQ ID NO: 3001 - RNA, 20 nt, synthetic construct
  source 1..20: mol_type = other RNA
tattaataaaacagccggga

SEQ ID NO: 3002 - RNA, 20 nt, synthetic construct
  source 1..20: mol_type = other RNA
ttctacaacatcggctgagg

SEQ ID NO: 3003 - RNA, 20 nt, synthetic construct
  source 1..20: mol_type = other RNA
gctgagggttaatacaacct

SEQ ID NO: 3004 - RNA, 20 nt, synthetic construct
  source 1..20: mol_type = other RNA
ttctaagctctagtccctga

SEQ ID NO: 3005 - RNA, 20 nt, synthetic construct
  source 1..20: mol_type = other RNA
attccctgtgacccaagatg

SEQ ID NO: 3006 - RNA, 20 nt, synthetic construct
  source 1..20: mol_type = other RNA
tgggtcacagggaattgata

SEQ ID NO: 3007 - RNA, 20 nt, synthetic construct
  source 1..20: mol_type = other RNA
atggagaggcaaatcttttt

SEQ ID NO: 3008 - RNA, 20 nt, synthetic construct
  source 1..20: mol_type = other RNA
ttttctatctacttcttttt

SEQ ID NO: 3009 - RNA, 20 nt, synthetic construct
  source 1..20: mol_type = other RNA
acttctttttcaatgggtac

SEQ ID NO: 3010 - RNA, 20 nt, synthetic construct
  source 1..20: mol_type = other RNA
cttcagaccactggtgctca

SEQ ID NO: 3011 - RNA, 20 nt, synthetic construct
  source 1..20: mol_type = other RNA
gctttcctgcctttgttctt

SEQ ID NO: 3012 - RNA, 20 nt, synthetic construct
  source 1..20: mol_type = other RNA
cccctttgctgactctcatc

SEQ ID NO: 3013 - RNA, 20 nt, synthetic construct
  source 1..20: mol_type = other RNA
acccgccccttttacttttc

SEQ ID NO: 3014 - RNA, 20 nt, synthetic construct
  source 1..20: mol_type = other RNA
tggcttctgtccatctaccc

SEQ ID NO: 3015 - RNA, 20 nt, synthetic construct
  source 1..20: mol_type = other RNA
ggccattctatggccagtct

SEQ ID NO: 3016 - RNA, 20 nt, synthetic construct
  source 1..20: mol_type = other RNA
gttgttcaacatgtggaaac

SEQ ID NO: 3017 - RNA, 20 nt, synthetic construct
  source 1..20: mol_type = other RNA
cattttctccctcttgcaat

SEQ ID NO: 3018 - RNA, 20 nt, synthetic construct
  source 1..20: mol_type = other RNA
acccatcaatgccttggctt

SEQ ID NO: 3019 - RNA, 20 nt, synthetic construct
  source 1..20: mol_type = other RNA
atgccttggctttcttcaag

SEQ ID NO: 3020 - RNA, 20 nt, synthetic construct
  source 1..20: mol_type = other RNA
ccttgctcttcagtgcagga

SEQ ID NO: 3021 - RNA, 20 nt, synthetic construct
  source 1..20: mol_type = other RNA
ctctcctctgttcagcaaca

SEQ ID NO: 3022 - RNA, 20 nt, synthetic construct
  source 1..20: mol_type = other RNA
caaagtccaatcactctcct

SEQ ID NO: 3023 - RNA, 20 nt, synthetic construct
  source 1..20: mol_type = other RNA
taactacctgagtaatccca

SEQ ID NO: 3024 - RNA, 20 nt, synthetic construct
  source 1..20: mol_type = other RNA
tccacaagtccattcttact

SEQ ID NO: 3025 - RNA, 20 nt, synthetic construct
  source 1..20: mol_type = other RNA
tctatgcaagtgctgcttta

SEQ ID NO: 3026 - RNA, 20 nt, synthetic construct
  source 1..20: mol_type = other RNA
tgggcattcagtagagacct

SEQ ID NO: 3027 - RNA, 20 nt, synthetic construct
  source 1..20: mol_type = other RNA
ccaagcattaaaatggtgtc

SEQ ID NO: 3028 - RNA, 20 nt, synthetic construct
  source 1..20: mol_type = other RNA
acagtgtgagtcctaaattt

SEQ ID NO: 3029 - RNA, 20 nt, synthetic construct
  source 1..20: mol_type = other RNA
gtcaataaaaatagaaccag

SEQ ID NO: 3030 - RNA, 20 nt, synthetic construct
  source 1..20: mol_type = other RNA
ttcctggttctatttttatt

SEQ ID NO: 3031 - RNA, 20 nt, synthetic construct
  source 1..20: mol_type = other RNA
tttctatcattcctggttct

SEQ ID NO: 3032 - RNA, 20 nt, synthetic construct
  source 1..20: mol_type = other RNA
agcaatgcagttatgatact

SEQ ID NO: 3033 - RNA, 20 nt, synthetic construct
  source 1..20: mol_type = other RNA
taactgcattgctggattta

SEQ ID NO: 3034 - RNA, 20 nt, synthetic construct
  source 1..20: mol_type = other RNA
gttacgttccatgtttatgt

SEQ ID NO: 3035 - RNA, 20 nt, synthetic construct
  source 1..20: mol_type = other RNA
ttttactttcccttgatatg

SEQ ID NO: 3036 - RNA, 20 nt, synthetic construct
  source 1..20: mol_type = other RNA
tatcaagggaaagtaaaagg

SEQ ID NO: 3037 - RNA, 20 nt, synthetic construct
  source 1..20: mol_type = other RNA
agggaaagtaaaaggataaa

SEQ ID NO: 3038 - RNA, 20 nt, synthetic construct
  source 1..20: mol_type = other RNA
aattaaaggactattaaaag

SEQ ID NO: 3039 - RNA, 20 nt, synthetic construct
  source 1..20: mol_type = other RNA
agtgaatttttcatttaaga

SEQ ID NO: 3040 - RNA, 20 nt, synthetic construct
  source 1..20: mol_type = other RNA
taaatgaaaaattcactgga

SEQ ID NO: 3041 - RNA, 20 nt, synthetic construct
  source 1..20: mol_type = other RNA
ggttagttgtttccagggaa

SEQ ID NO: 3042 - RNA, 20 nt, synthetic construct
  source 1..20: mol_type = other RNA
acagaaatagctgcacatat

SEQ ID NO: 3043 - RNA, 20 nt, synthetic construct
  source 1..20: mol_type = other RNA
tagagccacacgagcattga

SEQ ID NO: 3044 - RNA, 20 nt, synthetic construct
  source 1..20: mol_type = other RNA
caaaagctcttattagggta

SEQ ID NO: 3045 - RNA, 20 nt, synthetic construct
  source 1..20: mol_type = other RNA
tacatcacaaaagctcttat

SEQ ID NO: 3046 - RNA, 20 nt, synthetic construct
  source 1..20: mol_type = other RNA
atttctctcttcagttgtgt

SEQ ID NO: 3047 - RNA, 20 nt, synthetic construct
  source 1..20: mol_type = other RNA
ctaactcagagtgtgggctt

SEQ ID NO: 3048 - RNA, 20 nt, synthetic construct
  source 1..20: mol_type = other RNA
aggaaatctctaactcagag

SEQ ID NO: 3049 - RNA, 20 nt, synthetic construct
  source 1..20: mol_type = other RNA
ttcccaaacacaacaggcta

SEQ ID NO: 3050 - RNA, 20 nt, synthetic construct
  source 1..20: mol_type = other RNA
ttgttctcaataaaaacgtc

SEQ ID NO: 3051 - RNA, 20 nt, synthetic construct
  source 1..20: mol_type = other RNA
atggagacttgctggaaggt

SEQ ID NO: 3052 - RNA, 20 nt, synthetic construct
  source 1..20: mol_type = other RNA
cactttattctgggagaata

SEQ ID NO: 3053 - RNA, 20 nt, synthetic construct
  source 1..20: mol_type = other RNA
ctaaggaatttagaaaagtt

SEQ ID NO: 3054 - RNA, 20 nt, synthetic construct
  source 1..20: mol_type = other RNA
cctaagtttggataaattgt

SEQ ID NO: 3055 - RNA, 20 nt, synthetic construct
  source 1..20: mol_type = other RNA
aaacttaggagatgcagtga

SEQ ID NO: 3056 - RNA, 20 nt, synthetic construct
  source 1..20: mol_type = other RNA
aaaattatgtaaaagcctaa

SEQ ID NO: 3057 - RNA, 20 nt, synthetic construct
  source 1..20: mol_type = other RNA
tgattattacatgcttctgt

SEQ ID NO: 3058 - RNA, 20 nt, synthetic construct
  source 1..20: mol_type = other RNA
agatttcaaactgcaattct

SEQ ID NO: 3059 - RNA, 20 nt, synthetic construct
  source 1..20: mol_type = other RNA
tacttttcacgtagcaaagt

SEQ ID NO: 3060 - RNA, 20 nt, synthetic construct
  source 1..20: mol_type = other RNA
gagacatgatgccattacat

SEQ ID NO: 3061 - RNA, 20 nt, synthetic construct
  source 1..20: mol_type = other RNA
tgtctctgatggctaagaaa

SEQ ID NO: 3062 - RNA, 20 nt, synthetic construct
  source 1..20: mol_type = other RNA
tgtgttttgaaaaagaaaag

SEQ ID NO: 3063 - RNA, 20 nt, synthetic construct
  source 1..20: mol_type = other RNA
cctatgaacaaagactttga

SEQ ID NO: 3064 - RNA, 20 nt, synthetic construct
  source 1..20: mol_type = other RNA
acaactgtcaaagtctttgt

SEQ ID NO: 3065 - RNA, 20 nt, synthetic construct
  source 1..20: mol_type = other RNA
aagaccacagcttaaatatc

SEQ ID NO: 3066 - RNA, 20 nt, synthetic construct
  source 1..20: mol_type = other RNA
acacaagaaaaaaaaaaaaa

SEQ ID NO: 3067 - RNA, 20 nt, synthetic construct
  source 1..20: mol_type = other RNA
gctttccttggctcttattt

SEQ ID NO: 3068 - RNA, 20 nt, synthetic construct
  source 1..20: mol_type = other RNA
actttctgtttcaagagttt

SEQ ID NO: 3069 - RNA, 20 nt, synthetic construct
  source 1..20: mol_type = other RNA
tttcaaagaatcaactttct

SEQ ID NO: 3070 - RNA, 20 nt, synthetic construct
  source 1..20: mol_type = other RNA
tatggatcttttcaaagaat

SEQ ID NO: 3071 - RNA, 20 nt, synthetic construct
  source 1..20: mol_type = other RNA
atatgattgaacacagtctg

SEQ ID NO: 3072 - RNA, 20 nt, synthetic construct
  source 1..20: mol_type = other RNA
ccatctggagtaacagagga

SEQ ID NO: 3073 - RNA, 20 nt, synthetic construct
  source 1..20: mol_type = other RNA
ggagtaacagaggagaggtg

SEQ ID NO: 3074 - RNA, 20 nt, synthetic construct
  source 1..20: mol_type = other RNA
tccagttctgaaagctgaaa

SEQ ID NO: 3075 - RNA, 20 nt, synthetic construct
  source 1..20: mol_type = other RNA
tcttttcagctttcagaact

SEQ ID NO: 3076 - RNA, 20 nt, synthetic construct
  source 1..20: mol_type = other RNA
tgtgggccaattcctgagga

SEQ ID NO: 3077 - RNA, 20 nt, synthetic construct
  source 1..20: mol_type = other RNA
ggtttgctgatttgttgtct

SEQ ID NO: 3078 - RNA, 20 nt, synthetic construct
  source 1..20: mol_type = other RNA
gcaaaccagatgctgaatag

SEQ ID NO: 3079 - RNA, 20 nt, synthetic construct
  source 1..20: mol_type = other RNA
acaagacacacttcaaaatc

SEQ ID NO: 3080 - RNA, 20 nt, synthetic construct
  source 1..20: mol_type = other RNA
atctcagttaatctggagga

SEQ ID NO: 3081 - RNA, 20 nt, synthetic construct
  source 1..20: mol_type = other RNA
cagttaatctggaggaacat

SEQ ID NO: 3082 - RNA, 20 nt, synthetic construct
  source 1..20: mol_type = other RNA
ggaggaacatatttcacaga

SEQ ID NO: 3083 - RNA, 20 nt, synthetic construct
  source 1..20: mol_type = other RNA
gaataccctccttccacctt

SEQ ID NO: 3084 - RNA, 20 nt, synthetic construct
  source 1..20: mol_type = other RNA
tcttgtacattgtacaacat

SEQ ID NO: 3085 - RNA, 20 nt, synthetic construct
  source 1..20: mol_type = other RNA
atgtttactctgtacattgt

SEQ ID NO: 3086 - RNA, 20 nt, synthetic construct
  source 1..20: mol_type = other RNA
gtgctccataagaaaattga

SEQ ID NO: 3087 - RNA, 20 nt, synthetic construct
  source 1..20: mol_type = other RNA
aaagtcatctgtgctccata

SEQ ID NO: 3088 - RNA, 20 nt, synthetic construct
  source 1..20: mol_type = other RNA
ttcatattgtaacacatcca

SEQ ID NO: 3089 - RNA, 20 nt, synthetic construct
  source 1..20: mol_type = other RNA
caaagacaaattatcattca

SEQ ID NO: 3090 - RNA, 20 nt, synthetic construct
  source 1..20: mol_type = other RNA
tctcccatctctggtgacct

SEQ ID NO: 3091 - RNA, 20 nt, synthetic construct
  source 1..20: mol_type = other RNA
ctggtgacctgtgttgtttt

SEQ ID NO: 3092 - RNA, 20 nt, synthetic construct
  source 1..20: mol_type = other RNA
ggattcctgcagtagttcct

SEQ ID NO: 3093 - RNA, 20 nt, synthetic construct
  source 1..20: mol_type = other RNA
cagcatctggattcctgcag

SEQ ID NO: 3094 - RNA, 20 nt, synthetic construct
  source 1..20: mol_type = other RNA
agatgctgagattcgccctt

SEQ ID NO: 3095 - RNA, 20 nt, synthetic construct
  source 1..20: mol_type = other RNA
atggtgtaacaccaagggcg

SEQ ID NO: 3096 - RNA, 20 nt, synthetic construct
  source 1..20: mol_type = other RNA
cagtgtcaggtgggagtact

SEQ ID NO: 3097 - RNA, 20 nt, synthetic construct
  source 1..20: mol_type = other RNA
caacgtcctagggtgtggtt

SEQ ID NO: 3098 - RNA, 20 nt, synthetic construct
  source 1..20: mol_type = other RNA
ctaagattttgcaactcttt

SEQ ID NO: 3099 - RNA, 20 nt, synthetic construct
  source 1..20: mol_type = other RNA
tagtgatatagaagccttcc

SEQ ID NO: 3100 - RNA, 20 nt, synthetic construct
  source 1..20: mol_type = other RNA
cagctctggttctcccagag

SEQ ID NO: 3101 - RNA, 20 nt, synthetic construct
  source 1..20: mol_type = other RNA
ataggaagggtgcagaccct

SEQ ID NO: 3102 - RNA, 20 nt, synthetic construct
  source 1..20: mol_type = other RNA
tttgaataaccaggggagtg

SEQ ID NO: 3103 - RNA, 20 nt, synthetic construct
  source 1..20: mol_type = other RNA
ttttagtgtcttagccagaa

SEQ ID NO: 3104 - RNA, 20 nt, synthetic construct
  source 1..20: mol_type = other RNA
tcacaaatttggcaaaatgt

SEQ ID NO: 3105 - RNA, 20 nt, synthetic construct
  source 1..20: mol_type = other RNA
tgagcttggtaaatcttcac

SEQ ID NO: 3106 - RNA, 20 nt, synthetic construct
  source 1..20: mol_type = other RNA
ttggctttgcggtttcggag

SEQ ID NO: 3107 - RNA, 20 nt, synthetic construct
  source 1..20: mol_type = other RNA
ttgagaaacctaatatgact

SEQ ID NO: 3108 - RNA, 20 nt, synthetic construct
  source 1..20: mol_type = other RNA
ttctggcctatctccatctt

SEQ ID NO: 3109 - RNA, 20 nt, synthetic construct
  source 1..20: mol_type = other RNA
ccatcttaagccagtcctgc

SEQ ID NO: 3110 - RNA, 20 nt, synthetic construct
  source 1..20: mol_type = other RNA
taagccagtcctgcacaact

SEQ ID NO: 3111 - RNA, 20 nt, synthetic construct
  source 1..20: mol_type = other RNA
aagcctagttgtgcaggact

SEQ ID NO: 3112 - RNA, 20 nt, synthetic construct
  source 1..20: mol_type = other RNA
ctcccatcaaagcctagttg

SEQ ID NO: 3113 - RNA, 20 nt, synthetic construct
  source 1..20: mol_type = other RNA
ctcagtgttcttgcccctcc

SEQ ID NO: 3114 - RNA, 20 nt, synthetic construct
  source 1..20: mol_type = other RNA
gtgttggtctctgagaagaa

SEQ ID NO: 3115 - RNA, 20 nt, synthetic construct
  source 1..20: mol_type = other RNA
actactcttcttctcagaga

SEQ ID NO: 3116 - RNA, 20 nt, synthetic construct
  source 1..20: mol_type = other RNA
actttgttgcaatgcagaat

SEQ ID NO: 3117 - RNA, 20 nt, synthetic construct
  source 1..20: mol_type = other RNA
ttggcccaggattctgcatt

SEQ ID NO: 3118 - RNA, 20 nt, synthetic construct
  source 1..20: mol_type = other RNA
tgggccaaagataccagcca

SEQ ID NO: 3119 - RNA, 20 nt, synthetic construct
  source 1..20: mol_type = other RNA
ctccaagggaataaaatttt

SEQ ID NO: 3120 - RNA, 20 nt, synthetic construct
  source 1..20: mol_type = other RNA
aggactcgtaggcaaagaca

SEQ ID NO: 3121 - RNA, 20 nt, synthetic construct
  source 1..20: mol_type = other RNA
tcaagaagctgaaggctttg

SEQ ID NO: 3122 - RNA, 20 nt, synthetic construct
  source 1..20: mol_type = other RNA
tccaaagccaaagccttcag

SEQ ID NO: 3123 - RNA, 20 nt, synthetic construct
  source 1..20: mol_type = other RNA
gcagtctagggaaatgtgtg

SEQ ID NO: 3124 - RNA, 20 nt, synthetic construct
  source 1..20: mol_type = other RNA
ccacctacaacctgcacagc

SEQ ID NO: 3125 - RNA, 20 nt, synthetic construct
  source 1..20: mol_type = other RNA
ggctgtgcaggttgtaggtg

SEQ ID NO: 3126 - RNA, 20 nt, synthetic construct
  source 1..20: mol_type = other RNA
tctgggtgttcctgagaata

SEQ ID NO: 3127 - RNA, 20 nt, synthetic construct
  source 1..20: mol_type = other RNA
gtcaaaattgcactcatgtg

SEQ ID NO: 3128 - RNA, 20 nt, synthetic construct
  source 1..20: mol_type = other RNA
gagtgcctatcagtcaaaat

SEQ ID NO: 3129 - RNA, 20 nt, synthetic construct
  source 1..20: mol_type = other RNA
ttcctttggtgcctgtgttt

SEQ ID NO: 3130 - RNA, 20 nt, synthetic construct
  source 1..20: mol_type = other RNA
ttctaagaactcgttaaagt

SEQ ID NO: 3131 - RNA, 20 nt, synthetic construct
  source 1..20: mol_type = other RNA
ttgggttttattattggtat

SEQ ID NO: 3132 - RNA, 20 nt, synthetic construct
  source 1..20: mol_type = other RNA
gcctgctagtacagaacaga

SEQ ID NO: 3133 - RNA, 20 nt, synthetic construct
  source 1..20: mol_type = other RNA
ttgtctctgagaaagactac

SEQ ID NO: 3134 - RNA, 20 nt, synthetic construct
  source 1..20: mol_type = other RNA
gtgactgaaacaggatcatt

SEQ ID NO: 3135 - RNA, 20 nt, synthetic construct
  source 1..20: mol_type = other RNA
tgtttcagtcacagatttct

SEQ ID NO: 3136 - RNA, 20 nt, synthetic construct
  source 1..20: mol_type = other RNA
gaagaaatctgtgactgaaa

SEQ ID NO: 3137 - RNA, 20 nt, synthetic construct
  source 1..20: mol_type = other RNA
agctgagtaatttctagaac

SEQ ID NO: 3138 - RNA, 20 nt, synthetic construct
  source 1..20: mol_type = other RNA
ccatggtagcaatcctggac

SEQ ID NO: 3139 - RNA, 20 nt, synthetic construct
  source 1..20: mol_type = other RNA
aggctcattctctaccactg

SEQ ID NO: 3140 - RNA, 20 nt, synthetic construct
  source 1..20: mol_type = other RNA
aaatgggtacaaccttgagt

SEQ ID NO: 3141 - RNA, 20 nt, synthetic construct
  source 1..20: mol_type = other RNA
gagataaatttgtcataaga

SEQ ID NO: 3142 - RNA, 20 nt, synthetic construct
  source 1..20: mol_type = other RNA
cagatctggaatgttgggta

SEQ ID NO: 3143 - RNA, 20 nt, synthetic construct
  source 1..20: mol_type = other RNA
ggaatgttgggtagaatgtc

SEQ ID NO: 3144 - RNA, 20 nt, synthetic construct
  source 1..20: mol_type = other RNA
tcctgcttctgtcaactatg

SEQ ID NO: 3145 - RNA, 20 nt, synthetic construct
  source 1..20: mol_type = other RNA
ctggttgaactattgcattg

SEQ ID NO: 3146 - RNA, 20 nt, synthetic construct
  source 1..20: mol_type = other RNA
ccaagtcctgaagtgaaggt

SEQ ID NO: 3147 - RNA, 20 nt, synthetic construct
  source 1..20: mol_type = other RNA
tttatttgttgcccaagatg

SEQ ID NO: 3148 - RNA, 20 nt, synthetic construct
  source 1..20: mol_type = other RNA
tgggcaacaaataaaggata

SEQ ID NO: 3149 - RNA, 20 nt, synthetic construct
  source 1..20: mol_type = other RNA
ggatgtcaacatagatatcc

SEQ ID NO: 3150 - RNA, 20 nt, synthetic construct
  source 1..20: mol_type = other RNA
atgttgacatccagatcttc

SEQ ID NO: 3151 - RNA, 20 nt, synthetic construct
  source 1..20: mol_type = other RNA
agatcttccaatcactttct

SEQ ID NO: 3152 - RNA, 20 nt, synthetic construct
  source 1..20: mol_type = other RNA
tccaatcactttctcctcta

SEQ ID NO: 3153 - RNA, 20 nt, synthetic construct
  source 1..20: mol_type = other RNA
ctttctcctctaacctgtac

SEQ ID NO: 3154 - RNA, 20 nt, synthetic construct
  source 1..20: mol_type = other RNA
gaagagctatgtgttgccag

SEQ ID NO: 3155 - RNA, 20 nt, synthetic construct
  source 1..20: mol_type = other RNA
ttatacttcctgactctcag

SEQ ID NO: 3156 - RNA, 20 nt, synthetic construct
  source 1..20: mol_type = other RNA
tcctgcatgtgtaactcttc

SEQ ID NO: 3157 - RNA, 20 nt, synthetic construct
  source 1..20: mol_type = other RNA
aatacataggaaaagtgttt

SEQ ID NO: 3158 - RNA, 20 nt, synthetic construct
  source 1..20: mol_type = other RNA
cctttgattccctttctgaa

SEQ ID NO: 3159 - RNA, 20 nt, synthetic construct
  source 1..20: mol_type = other RNA
aaggagatcaaccttatcat

SEQ ID NO: 3160 - RNA, 20 nt, synthetic construct
  source 1..20: mol_type = other RNA
accttatcatgtccctggca

SEQ ID NO: 3161 - RNA, 20 nt, synthetic construct
  source 1..20: mol_type = other RNA
tgtccctggcatccttcctt

SEQ ID NO: 3162 - RNA, 20 nt, synthetic construct
  source 1..20: mol_type = other RNA
ttccttgagacccttgaagg

SEQ ID NO: 3163 - RNA, 20 nt, synthetic construct
  source 1..20: mol_type = other RNA
gcttgcccttcaagggtctc

SEQ ID NO: 3164 - RNA, 20 nt, synthetic construct
  source 1..20: mol_type = other RNA
caaactccagtctctctcct

SEQ ID NO: 3165 - RNA, 20 nt, synthetic construct
  source 1..20: mol_type = other RNA
gacgtattctaggctggcta

SEQ ID NO: 3166 - RNA, 20 nt, synthetic construct
  source 1..20: mol_type = other RNA
cctctcattcttagccagcc

SEQ ID NO: 3167 - RNA, 20 nt, synthetic construct
  source 1..20: mol_type = other RNA
ccattgagctcactgttccc

SEQ ID NO: 3168 - RNA, 20 nt, synthetic construct
  source 1..20: mol_type = other RNA
cccagtgctatgtgagctct

SEQ ID NO: 3169 - RNA, 20 nt, synthetic construct
  source 1..20: mol_type = other RNA
tgggcattcagtagaggtca

SEQ ID NO: 3170 - RNA, 20 nt, synthetic construct
  source 1..20: mol_type = other RNA
tactcccaaattatggcttt

SEQ ID NO: 3171 - RNA, 20 nt, synthetic construct
  source 1..20: mol_type = other RNA
gaagatcctactcccaaatt

SEQ ID NO: 3172 - RNA, 20 nt, synthetic construct
  source 1..20: mol_type = other RNA
tcggattcctagaaataagg

SEQ ID NO: 3173 - RNA, 20 nt, synthetic construct
  source 1..20: mol_type = other RNA
ttttagactggcttggaaga

SEQ ID NO: 3174 - RNA, 20 nt, synthetic construct
  source 1..20: mol_type = other RNA
tttggatccttttagactgg

SEQ ID NO: 3175 - RNA, 20 nt, synthetic construct
  source 1..20: mol_type = other RNA
aaatgatttccaagtaaatt

SEQ ID NO: 3176 - RNA, 20 nt, synthetic construct
  source 1..20: mol_type = other RNA
ccagagtgcaacttgcattt

SEQ ID NO: 3177 - RNA, 20 nt, synthetic construct
  source 1..20: mol_type = other RNA
cagtgaaaacttcttttgtg

SEQ ID NO: 3178 - RNA, 20 nt, synthetic construct
  source 1..20: mol_type = other RNA
ataactgggagaaaaatcac

SEQ ID NO: 3179 - RNA, 20 nt, synthetic construct
  source 1..20: mol_type = other RNA
ctcaacacaaataggcccag

SEQ ID NO: 3180 - RNA, 20 nt, synthetic construct
  source 1..20: mol_type = other RNA
gaaaagaaaagaattgaaga

SEQ ID NO: 3181 - RNA, 20 nt, synthetic construct
  source 1..20: mol_type = other RNA
agtgaattcctcattacaga

SEQ ID NO: 3182 - RNA, 20 nt, synthetic construct
  source 1..20: mol_type = other RNA
gtaatgaggaattcactgga

SEQ ID NO: 3183 - RNA, 20 nt, synthetic construct
  source 1..20: mol_type = other RNA
aaactggttataaggccatc

SEQ ID NO: 3184 - RNA, 20 nt, synthetic construct
  source 1..20: mol_type = other RNA
ttttctcgttcaccttttcc

SEQ ID NO: 3185 - RNA, 20 nt, synthetic construct
  source 1..20: mol_type = other RNA
acagagcctcaaggacatct

SEQ ID NO: 3186 - RNA, 20 nt, synthetic construct
  source 1..20: mol_type = other RNA
aggaaaacatccacacattt

SEQ ID NO: 3187 - RNA, 20 nt, synthetic construct
  source 1..20: mol_type = other RNA
acacatttaatatatgtgtt

SEQ ID NO: 3188 - RNA, 20 nt, synthetic construct
  source 1..20: mol_type = other RNA
ttttcctctctttctgtgac

SEQ ID NO: 3189 - RNA, 20 nt, synthetic construct
  source 1..20: mol_type = other RNA
atacctgagtcattgagctt

SEQ ID NO: 3190 - RNA, 20 nt, synthetic construct
  source 1..20: mol_type = other RNA
gagttttgctctttaaaaat

SEQ ID NO: 3191 - RNA, 20 nt, synthetic construct
  source 1..20: mol_type = other RNA
gacaatttaactatgatgta

SEQ ID NO: 3192 - RNA, 20 nt, synthetic construct
  source 1..20: mol_type = other RNA
tagttaaattgtctgatttc

SEQ ID NO: 3193 - RNA, 20 nt, synthetic construct
  source 1..20: mol_type = other RNA
actgtcaaaatgtttgttca

SEQ ID NO: 3194 - RNA, 20 nt, synthetic construct
  source 1..20: mol_type = other RNA
aagaccacagcttaaatatc

SEQ ID NO: 3195 - RNA, 20 nt, synthetic construct
  source 1..20: mol_type = other RNA
aggcaaggaaaagcaaataa

SEQ ID NO: 3196 - RNA, 20 nt, synthetic construct
  source 1..20: mol_type = other RNA
cctttccttgtgtcttattt

SEQ ID NO: 3197 - RNA, 20 nt, synthetic construct
  source 1..20: mol_type = other RNA
atcccctttccttgtgtctt

SEQ ID NO: 3198 - RNA, 20 nt, synthetic construct
  source 1..20: mol_type = other RNA
atgaaacagaaagttggttc

SEQ ID NO: 3199 - RNA, 20 nt, synthetic construct
  source 1..20: mol_type = other RNA
tttcaaagaaccaactttct

SEQ ID NO: 3200 - RNA, 20 nt, synthetic construct
  source 1..20: mol_type = other RNA
catgaatcttttcaaagaac

SEQ ID NO: 3201 - RNA, 20 nt, synthetic construct
  source 1..20: mol_type = other RNA
gttcagccagactgtggtca

SEQ ID NO: 3202 - RNA, 20 nt, synthetic construct
  source 1..20: mol_type = other RNA
ccatttgaagtaacagggga

SEQ ID NO: 3203 - RNA, 20 nt, synthetic construct
  source 1..20: mol_type = other RNA
tcttgtcagctttcagacct

SEQ ID NO: 3204 - RNA, 20 nt, synthetic construct
  source 1..20: mol_type = other RNA
agaaaaactgtatgtgaata

SEQ ID NO: 3205 - RNA, 20 nt, synthetic construct
  source 1..20: mol_type = other RNA
acattcatgaatttattcac

SEQ ID NO: 3206 - RNA, 20 nt, synthetic construct
  source 1..20: mol_type = other RNA
acatgatctacattcatgaa

SEQ ID NO: 3207 - RNA, 20 nt, synthetic construct
  source 1..20: mol_type = other RNA
tgtggatcaattccttaggt

SEQ ID NO: 3208 - RNA, 20 nt, synthetic construct
  source 1..20: mol_type = other RNA
attccttaggtaaacaacaa

SEQ ID NO: 3209 - RNA, 20 nt, synthetic construct
  source 1..20: mol_type = other RNA
ggtttgctgatttgttgttt

SEQ ID NO: 3210 - RNA, 20 nt, synthetic construct
  source 1..20: mol_type = other RNA
attcagtatctggtttgctg

SEQ ID NO: 3211 - RNA, 20 nt, synthetic construct
  source 1..20: mol_type = other RNA
gcaaaccagatactgaatag

SEQ ID NO: 3212 - RNA, 20 nt, synthetic construct
  source 1..20: mol_type = other RNA
gtatgtctttctataggagt

SEQ ID NO: 3213 - RNA, 20 nt, synthetic construct
  source 1..20: mol_type = other RNA
acaagactcacttcaaaatc

SEQ ID NO: 3214 - RNA, 20 nt, synthetic construct
  source 1..20: mol_type = other RNA
ctcagttaatccaaagtaac

SEQ ID NO: 3215 - RNA, 20 nt, synthetic construct
  source 1..20: mol_type = other RNA
aaagtaacatatttggcaga

SEQ ID NO: 3216 - RNA, 20 nt, synthetic construct
  source 1..20: mol_type = other RNA
gaataccctccttccacctt

SEQ ID NO: 3217 - RNA, 20 nt, synthetic construct
  source 1..20: mol_type = other RNA
atgtgtacaagaaaggatca

SEQ ID NO: 3218 - RNA, 20 nt, synthetic construct
  source 1..20: mol_type = other RNA
tttcttgtacacattgatgt

SEQ ID NO: 3219 - RNA, 20 nt, synthetic construct
  source 1..20: mol_type = other RNA
aaactcgtctatactccata

SEQ ID NO: 3220 - RNA, 20 nt, synthetic construct
  source 1..20: mol_type = other RNA
ttcttattgtaacacatcca

SEQ ID NO: 3221 - RNA, 20 nt, synthetic construct
  source 1..20: mol_type = other RNA
gtctttgaaatgttcacagt

SEQ ID NO: 3222 - RNA, 20 nt, synthetic construct
  source 1..20: mol_type = other RNA
tcctcaacttctaaacaact

SEQ ID NO: 3223 - RNA, 20 nt, synthetic construct
  source 1..20: mol_type = other RNA
caaatcgtcctcaacttcta

SEQ ID NO: 3224 - RNA, 20 nt, synthetic construct
  source 1..20: mol_type = other RNA
tctacattttgttgtaacaa

SEQ ID NO: 3225 - RNA, 20 nt, synthetic construct
  source 1..20: mol_type = other RNA
tctcccatctctggtgaact

SEQ ID NO: 3226 - RNA, 20 nt, synthetic construct
  source 1..20: mol_type = other RNA
ctggtgaactgtattgtttt

SEQ ID NO: 3227 - RNA, 20 nt, synthetic construct
  source 1..20: mol_type = other RNA
ggattcctgcagtagttcct

SEQ ID NO: 3228 - RNA, 20 nt, synthetic construct
  source 1..20: mol_type = other RNA
cagcatctggattcctgcag

SEQ ID NO: 3229 - RNA, 20 nt, synthetic construct
  source 1..20: mol_type = other RNA
gacattgggatccatggtat

SEQ ID NO: 3230 - RNA, 20 nt, synthetic construct
  source 1..20: mol_type = other RNA
caatgtcagatgggagtact

SEQ ID NO: 3231 - RNA, 20 nt, synthetic construct
  source 1..20: mol_type = other RNA
caacgtccaagggtgtggtt

SEQ ID NO: 3232 - RNA, 20 nt, synthetic construct
  source 1..20: mol_type = other RNA
ctaagattttgcaactcttt

SEQ ID NO: 3233 - RNA, 20 nt, synthetic construct
  source 1..20: mol_type = other RNA
tagtgatacagaagccttcc

SEQ ID NO: 3234 - RNA, 20 nt, synthetic construct
  source 1..20: mol_type = other RNA
gaatgtggactcagggtcag

SEQ ID NO: 3235 - RNA, 20 nt, synthetic construct
  source 1..20: mol_type = other RNA
cagccctggttcccccagag

SEQ ID NO: 3236 - RNA, 20 nt, synthetic construct
  source 1..20: mol_type = other RNA
agtgccctagaaggtctgca

SEQ ID NO: 3237 - RNA, 20 nt, synthetic construct
  source 1..20: mol_type = other RNA
attgaataaccaggggagtg

SEQ ID NO: 3238 - RNA, 20 nt, synthetic construct
  source 1..20: mol_type = other RNA
attttcactaggacactgaa

SEQ ID NO: 3239 - RNA, 20 nt, synthetic construct
  source 1..20: mol_type = other RNA
caaatttggcaggatgttag

SEQ ID NO: 3240 - RNA, 20 nt, synthetic construct
  source 1..20: mol_type = other RNA
tcacaaatttggcaggatgt

SEQ ID NO: 3241 - RNA, 20 nt, synthetic construct
  source 1..20: mol_type = other RNA
tgccaaatttgtgatgattt

SEQ ID NO: 3242 - RNA, 20 nt, synthetic construct
  source 1..20: mol_type = other RNA
tgagcctttcctggtatttc

SEQ ID NO: 3243 - RNA, 20 nt, synthetic construct
  source 1..20: mol_type = other RNA
ggtttctcaaggatgacaga

SEQ ID NO: 3244 - RNA, 20 nt, synthetic construct
  source 1..20: mol_type = other RNA
ttgagaaacctgatatgact

SEQ ID NO: 3245 - RNA, 20 nt, synthetic construct
  source 1..20: mol_type = other RNA
tcctgggtctaggtaacagt

SEQ ID NO: 3246 - RNA, 20 nt, synthetic construct
  source 1..20: mol_type = other RNA
ccctgtctaccttaatctta

SEQ ID NO: 3247 - RNA, 20 nt, synthetic construct
  source 1..20: mol_type = other RNA
taggcaggtgctgcacacct

SEQ ID NO: 3248 - RNA, 20 nt, synthetic construct
  source 1..20: mol_type = other RNA
aagcctaggtgtgcagcacc

SEQ ID NO: 3249 - RNA, 20 nt, synthetic construct
  source 1..20: mol_type = other RNA
cttccatcaaagcctaggtg

SEQ ID NO: 3250 - RNA, 20 nt, synthetic construct
  source 1..20: mol_type = other RNA
gtgttgctgtttgtgaagaa

SEQ ID NO: 3251 - RNA, 20 nt, synthetic construct
  source 1..20: mol_type = other RNA
actactcttcttcacaaaca

SEQ ID NO: 3252 - RNA, 20 nt, synthetic construct
  source 1..20: mol_type = other RNA
tgcattgcaacaaagtagac

SEQ ID NO: 3253 - RNA, 20 nt, synthetic construct
  source 1..20: mol_type = other RNA
tgggcccaggatcctgcatt

SEQ ID NO: 3254 - RNA, 20 nt, synthetic construct
  source 1..20: mol_type = other RNA
tgggcccaagatttcccgcc

SEQ ID NO: 3255 - RNA, 20 nt, synthetic construct
  source 1..20: mol_type = other RNA
aggacttccaggcaaagaca

SEQ ID NO: 3256 - RNA, 20 nt, synthetic construct
  source 1..20: mol_type = other RNA
tccagaaacttaaggctttg

SEQ ID NO: 3257 - RNA, 20 nt, synthetic construct
  source 1..20: mol_type = other RNA
tccaaagccaaagccttaag

SEQ ID NO: 3258 - RNA, 20 nt, synthetic construct
  source 1..20: mol_type = other RNA
gtgctctggagaaatgtgtg

SEQ ID NO: 3259 - RNA, 20 nt, synthetic construct
  source 1..20: mol_type = other RNA
ggcggtgcaggctgtaggtg

SEQ ID NO: 3260 - RNA, 20 nt, synthetic construct
  source 1..20: mol_type = other RNA
cttttgggtgttcctgagaa

SEQ ID NO: 3261 - RNA, 20 nt, synthetic construct
  source 1..20: mol_type = other RNA
ttgccaaagaacaggcacat

SEQ ID NO: 3262 - RNA, 20 nt, synthetic construct
  source 1..20: mol_type = other RNA
gtcaaaattgcactcatgtg

SEQ ID NO: 3263 - RNA, 20 nt, synthetic construct
  source 1..20: mol_type = other RNA
gagtgcctatcagtcaaaat

SEQ ID NO: 3264 - RNA, 20 nt, synthetic construct
  source 1..20: mol_type = other RNA
gtcctttggtgcccaggttt

SEQ ID NO: 3265 - RNA, 20 nt, synthetic construct
  source 1..20: mol_type = other RNA
ttctaaaaactcattgaagt

SEQ ID NO: 3266 - RNA, 20 nt, synthetic construct
  source 1..20: mol_type = other RNA
ttgagctttgttattggcat

SEQ ID NO: 3267 - RNA, 20 nt, synthetic construct
  source 1..20: mol_type = other RNA
gcctactaatgtagaacaga

SEQ ID NO: 3268 - RNA, 20 nt, synthetic construct
  source 1..20: mol_type = other RNA
ctgaaaatgacgaccatgct

SEQ ID NO: 3269 - RNA, 20 nt, synthetic construct
  source 1..20: mol_type = other RNA
tctctgaaaatgacgaccat

SEQ ID NO: 3270 - RNA, 20 nt, synthetic construct
  source 1..20: mol_type = other RNA
atgatagaaacaggacatca

SEQ ID NO: 3271 - RNA, 20 nt, synthetic construct
  source 1..20: mol_type = other RNA
tggattttttttctcatgct

SEQ ID NO: 3272 - RNA, 20 nt, synthetic construct
  source 1..20: mol_type = other RNA
ccatggtagcagtcctggac

SEQ ID NO: 3273 - RNA, 20 nt, synthetic construct
  source 1..20: mol_type = other RNA
aggctcattctccaccactg

SEQ ID NO: 3274 - RNA, 20 nt, synthetic construct
  source 1..20: mol_type = other RNA
gagaaccacagaatactacc

SEQ ID NO: 3275 - RNA, 20 nt, synthetic construct
  source 1..20: mol_type = other RNA
actatgagaaaagagagctg

SEQ ID NO: 3276 - RNA, 20 nt, synthetic construct
  source 1..20: mol_type = other RNA
tcctacttctatcaactatg

SEQ ID NO: 3277 - RNA, 20 nt, synthetic construct
  source 1..20: mol_type = other RNA
ccaagccctggagtgaaggt

SEQ ID NO: 3278 - RNA, 20 nt, synthetic construct
  source 1..20: mol_type = other RNA
ttcacttgttacccaagaca

SEQ ID NO: 3279 - RNA, 20 nt, synthetic construct
  source 1..20: mol_type = other RNA
cgaagtcaatatagatatcc

SEQ ID NO: 3280 - RNA, 20 nt, synthetic construct
  source 1..20: mol_type = other RNA
gaagatctcgaagtcaatat

SEQ ID NO: 3281 - RNA, 20 nt, synthetic construct
  source 1..20: mol_type = other RNA
atattgacttcgagatcttc

SEQ ID NO: 3282 - RNA, 20 nt, synthetic construct
  source 1..20: mol_type = other RNA
tccgatcactttctcctcta

SEQ ID NO: 3283 - RNA, 20 nt, synthetic construct
  source 1..20: mol_type = other RNA
ctttctcctctaacctgtat

SEQ ID NO: 3284 - RNA, 20 nt, synthetic construct
  source 1..20: mol_type = other RNA
ctatacttcctgactctcag

SEQ ID NO: 3285 - RNA, 20 nt, synthetic construct
  source 1..20: mol_type = other RNA
tcctgaatgtgtaactcttc

SEQ ID NO: 3286 - RNA, 20 nt, synthetic construct
  source 1..20: mol_type = other RNA
aatacatgagaaaacagttt

SEQ ID NO: 3287 - RNA, 20 nt, synthetic construct
  source 1..20: mol_type = other RNA
gttgtccaacctgtgaaaac

SEQ ID NO: 3288 - RNA, 20 nt, synthetic construct
  source 1..20: mol_type = other RNA
cctttgattccctttctcag

SEQ ID NO: 3289 - RNA, 20 nt, synthetic construct
  source 1..20: mol_type = other RNA
aaggagatcaacttcatcat

SEQ ID NO: 3290 - RNA, 20 nt, synthetic construct
  source 1..20: mol_type = other RNA
acttcatcattaacctgtct

SEQ ID NO: 3291 - RNA, 20 nt, synthetic construct
  source 1..20: mol_type = other RNA
ttaacctgtcttccttcctg

SEQ ID NO: 3292 - RNA, 20 nt, synthetic construct
  source 1..20: mol_type = other RNA
aacactgtgtccaggaagga

SEQ ID NO: 3293 - RNA, 20 nt, synthetic construct
  source 1..20: mol_type = other RNA
gcttgtccttcaatccaaca

SEQ ID NO: 3294 - RNA, 20 nt, synthetic construct
  source 1..20: mol_type = other RNA
cagactccagtctctctcct

SEQ ID NO: 3295 - RNA, 20 nt, synthetic construct
  source 1..20: mol_type = other RNA
gctgcctgaggcatcgcaga

SEQ ID NO: 3296 - RNA, 20 nt, synthetic construct
  source 1..20: mol_type = other RNA
cttctcattcttagccagcc

SEQ ID NO: 3297 - RNA, 20 nt, synthetic construct
  source 1..20: mol_type = other RNA
ccattgagcttactgttccc

SEQ ID NO: 3298 - RNA, 20 nt, synthetic construct
  source 1..20: mol_type = other RNA
cccagtgctatgtgagctct

SEQ ID NO: 3299 - RNA, 20 nt, synthetic construct
  source 1..20: mol_type = other RNA
caaaatacagctttctttgg

SEQ ID NO: 3300 - RNA, 20 nt, synthetic construct
  source 1..20: mol_type = other RNA
caatcccaaaatacagcttt

SEQ ID NO: 3301 - RNA, 20 nt, synthetic construct
  source 1..20: mol_type = other RNA
tcttattcctagaatcaagg

SEQ ID NO: 3302 - RNA, 20 nt, synthetic construct
  source 1..20: mol_type = other RNA
tattcctagaatcaaggtga

SEQ ID NO: 3303 - RNA, 20 nt, synthetic construct
  source 1..20: mol_type = other RNA
aggtgactccagaaaaactc

SEQ ID NO: 3304 - RNA, 20 nt, synthetic construct
  source 1..20: mol_type = other RNA
ttttagactggcttggaaga

SEQ ID NO: 3305 - RNA, 20 nt, synthetic construct
  source 1..20: mol_type = other RNA
tttggatccttttagactgg

SEQ ID NO: 3306 - RNA, 20 nt, synthetic construct
  source 1..20: mol_type = other RNA
aaatgatctccaagtaaatt

SEQ ID NO: 3307 - RNA, 20 nt, synthetic construct
  source 1..20: mol_type = other RNA
ccaagtaaattaactgcatt

SEQ ID NO: 3308 - RNA, 20 nt, synthetic construct
  source 1..20: mol_type = other RNA
cagtgaaagcttcttgtgtc

SEQ ID NO: 3309 - RNA, 20 nt, synthetic construct
  source 1..20: mol_type = other RNA
ctcaacacaaacaggcccag

SEQ ID NO: 3310 - RNA, 20 nt, synthetic construct
  source 1..20: mol_type = other RNA
attctataatttctgggcct

SEQ ID NO: 3311 - RNA, 20 nt, synthetic construct
  source 1..20: mol_type = other RNA
agtgagttcttcattagaga

SEQ ID NO: 3312 - RNA, 20 nt, synthetic construct
  source 1..20: mol_type = other RNA
ctaatgaagaactcactgga

SEQ ID NO: 3313 - RNA, 20 nt, synthetic construct
  source 1..20: mol_type = other RNA
tcactttagacattacggta

SEQ ID NO: 3314 - RNA, 20 nt, synthetic construct
  source 1..20: mol_type = other RNA
ctttagacattacggtagga

SEQ ID NO: 3315 - RNA, 20 nt, synthetic construct
  source 1..20: mol_type = other RNA
caggacagacagacagacca

SEQ ID NO: 3316 - RNA, 20 nt, synthetic construct
  source 1..20: mol_type = other RNA
acagagcctcaagggcatct

SEQ ID NO: 3317 - RNA, 20 nt, synthetic construct
  source 1..20: mol_type = other RNA
aggaaaaatccacacattta

SEQ ID NO: 3318 - RNA, 20 nt, synthetic construct
  source 1..20: mol_type = other RNA
acacatttaatatatgtgtt

SEQ ID NO: 3319 - RNA, 20 nt, synthetic construct
  source 1..20: mol_type = other RNA
ttttcttctccttctgtgac

SEQ ID NO: 3320 - RNA, 20 nt, synthetic construct
  source 1..20: mol_type = other RNA
tgacagacattatacttgaa

SEQ ID NO: 3321 - RNA, 20 nt, synthetic construct
  source 1..20: mol_type = other RNA
cttcaagtataatgtctgtc

SEQ ID NO: 3322 - RNA, 20 nt, synthetic construct
  source 1..20: mol_type = other RNA
tcgcttcaagtataatgtct

SEQ ID NO: 3323 - RNA, 20 nt, synthetic construct
  source 1..20: mol_type = other RNA
tagagttttgctctttaaaa

SEQ ID NO: 3324 - RNA, 20 nt, synthetic construct
  source 1..20: mol_type = other RNA
cagtaaatcatagagttttg

SEQ ID NO: 3325 - RNA, 20 nt, synthetic construct
  source 1..20: mol_type = other RNA
tagttaagttgcctcaattc

SEQ ID NO: 3326 - RNA, 20 nt, synthetic construct
  source 1..20: mol_type = other RNA
acagctgtcaaagctgttgt

SEQ ID NO: 3327 - RNA, 20 nt, synthetic construct
  source 1..20: mol_type = other RNA
aagaccacagcttaaatatc

SEQ ID NO: 3328 - RNA, 20 nt, synthetic construct
  source 1..20: mol_type = other RNA
aggcaaggaaaagcaaataa

SEQ ID NO: 3329 - RNA, 20 nt, synthetic construct
  source 1..20: mol_type = other RNA
tctttccttgtgccttattt

SEQ ID NO: 3330 - RNA, 20 nt, synthetic construct
  source 1..20: mol_type = other RNA
atgaaacagaaagttaggtt

SEQ ID NO: 3331 - RNA, 20 nt, synthetic construct
  source 1..20: mol_type = other RNA
tatagacttttcaaagaacc

SEQ ID NO: 3332 - RNA, 20 nt, synthetic construct
  source 1..20: mol_type = other RNA
gtttagccagactttggcca

SEQ ID NO: 3333 - RNA, 20 nt, synthetic construct
  source 1..20: mol_type = other RNA
atcaccatcatgagtaacag

SEQ ID NO: 3334 - RNA, 20 nt, synthetic construct
  source 1..20: mol_type = other RNA
ccatcatgagtaacaggaga

SEQ ID NO: 3335 - RNA, 20 nt, synthetic construct
  source 1..20: mol_type = other RNA
ctctcctgttactcatgatg

SEQ ID NO: 3336 - RNA, 20 nt, synthetic construct
  source 1..20: mol_type = other RNA
tgagtaacaggagagagatg

SEQ ID NO: 3337 - RNA, 20 nt, synthetic construct
  source 1..20: mol_type = other RNA
tccaggtgtgaaagctgaga

SEQ ID NO: 3338 - RNA, 20 nt, synthetic construct
  source 1..20: mol_type = other RNA
acttctcagctttcacacct

SEQ ID NO: 3339 - RNA, 20 nt, synthetic construct
  source 1..20: mol_type = other RNA
caatatctacttctcagctt

SEQ ID NO: 3340 - RNA, 20 nt, synthetic construct
  source 1..20: mol_type = other RNA
actgtatgtaaataaattca

SEQ ID NO: 3341 - RNA, 20 nt, synthetic construct
  source 1..20: mol_type = other RNA
acattcatgaatttatttac

SEQ ID NO: 3342 - RNA, 20 nt, synthetic construct
  source 1..20: mol_type = other RNA
acatgatctacattcatgaa

SEQ ID NO: 3343 - RNA, 20 nt, synthetic construct
  source 1..20: mol_type = other RNA
atccacatgatctacattca

SEQ ID NO: 3344 - RNA, 20 nt, synthetic construct
  source 1..20: mol_type = other RNA
tgtggatggattgcttaggt

SEQ ID NO: 3345 - RNA, 20 nt, synthetic construct
  source 1..20: mol_type = other RNA
attcagtgtttgatttgctg

SEQ ID NO: 3346 - RNA, 20 nt, synthetic construct
  source 1..20: mol_type = other RNA
gcaaatcaaacactgaatag

SEQ ID NO: 3347 - RNA, 20 nt, synthetic construct
  source 1..20: mol_type = other RNA
aacactgaatagatcatgca

SEQ ID NO: 3348 - RNA, 20 nt, synthetic construct
  source 1..20: mol_type = other RNA
tgcagttttatagagactta

SEQ ID NO: 3349 - RNA, 20 nt, synthetic construct
  source 1..20: mol_type = other RNA
gtcaggctgtctgtaagtct

SEQ ID NO: 3350 - RNA, 20 nt, synthetic construct
  source 1..20: mol_type = other RNA
ccaagacacacttcaaaatc

SEQ ID NO: 3351 - RNA, 20 nt, synthetic construct
  source 1..20: mol_type = other RNA
ctctcggttaatccaaagga

SEQ ID NO: 3352 - RNA, 20 nt, synthetic construct
  source 1..20: mol_type = other RNA
aaaggaatgtatttggcaga

SEQ ID NO: 3353 - RNA, 20 nt, synthetic construct
  source 1..20: mol_type = other RNA
gaataccctccttctacctt

SEQ ID NO: 3354 - RNA, 20 nt, synthetic construct
  source 1..20: mol_type = other RNA
atgtgtaccagaaaggatca

SEQ ID NO: 3355 - RNA, 20 nt, synthetic construct
  source 1..20: mol_type = other RNA
tttctggtacacattgatgt

SEQ ID NO: 3356 - RNA, 20 nt, synthetic construct
  source 1..20: mol_type = other RNA
atgctttataagaaaactga

SEQ ID NO: 3357 - RNA, 20 nt, synthetic construct
  source 1..20: mol_type = other RNA
taagctgtctttgaaatgtt

SEQ ID NO: 3358 - RNA, 20 nt, synthetic construct
  source 1..20: mol_type = other RNA
tctccaatctctggtgacct

SEQ ID NO: 3359 - RNA, 20 nt, synthetic construct
  source 1..20: mol_type = other RNA
ctggtgacctgtattgtttt

SEQ ID NO: 3360 - RNA, 20 nt, synthetic construct
  source 1..20: mol_type = other RNA
ggattcctgcagtagttcct

SEQ ID NO: 3361 - RNA, 20 nt, synthetic construct
  source 1..20: mol_type = other RNA
cagcatctggattcctgcag

SEQ ID NO: 3362 - RNA, 20 nt, synthetic construct
  source 1..20: mol_type = other RNA
agatgctgagattcgccctt

SEQ ID NO: 3363 - RNA, 20 nt, synthetic construct
  source 1..20: mol_type = other RNA
atggtataacaccaagggcg

SEQ ID NO: 3364 - RNA, 20 nt, synthetic construct
  source 1..20: mol_type = other RNA
gacactgggatccatggtat

SEQ ID NO: 3365 - RNA, 20 nt, synthetic construct
  source 1..20: mol_type = other RNA
cagtgtcagatgggagtact

SEQ ID NO: 3366 - RNA, 20 nt, synthetic construct
  source 1..20: mol_type = other RNA
caatgtccgagggtatggtt

SEQ ID NO: 3367 - RNA, 20 nt, synthetic construct
  source 1..20: mol_type = other RNA
ttttatcccaatgtccgagg

SEQ ID NO: 3368 - RNA, 20 nt, synthetic construct
  source 1..20: mol_type = other RNA
caaagattttgcaaatcttt

SEQ ID NO: 3369 - RNA, 20 nt, synthetic construct
  source 1..20: mol_type = other RNA
ttgtgatgcagaaaacttcc

SEQ ID NO: 3370 - RNA, 20 nt, synthetic construct
  source 1..20: mol_type = other RNA
cagctctggtccccccagag

SEQ ID NO: 3371 - RNA, 20 nt, synthetic construct
  source 1..20: mol_type = other RNA
ctcacaaggcactcaacatc

SEQ ID NO: 3372 - RNA, 20 nt, synthetic construct
  source 1..20: mol_type = other RNA
agtgtcctagagggtctgtg

SEQ ID NO: 3373 - RNA, 20 nt, synthetic construct
  source 1..20: mol_type = other RNA
cttccctgttatcaaacgaa

SEQ ID NO: 3374 - RNA, 20 nt, synthetic construct
  source 1..20: mol_type = other RNA
aacgaatcatattagtgtcc

SEQ ID NO: 3375 - RNA, 20 nt, synthetic construct
  source 1..20: mol_type = other RNA
tggctaggacactaatatga

SEQ ID NO: 3376 - RNA, 20 nt, synthetic construct
  source 1..20: mol_type = other RNA
tattagtgtcctagccaaga

SEQ ID NO: 3377 - RNA, 20 nt, synthetic construct
  source 1..20: mol_type = other RNA
atcttggctaggacactaat

SEQ ID NO: 3378 - RNA, 20 nt, synthetic construct
  source 1..20: mol_type = other RNA
tcacaagtttggcaggatgt

SEQ ID NO: 3379 - RNA, 20 nt, synthetic construct
  source 1..20: mol_type = other RNA
tgccaaacttgtgaagatat

SEQ ID NO: 3380 - RNA, 20 nt, synthetic construct
  source 1..20: mol_type = other RNA
aatgaagacatgttaggttt

SEQ ID NO: 3381 - RNA, 20 nt, synthetic construct
  source 1..20: mol_type = other RNA
gtattgtcctgagactttga

SEQ ID NO: 3382 - RNA, 20 nt, synthetic construct
  source 1..20: mol_type = other RNA
ccccagcctaccttcatctt

SEQ ID NO: 3383 - RNA, 20 nt, synthetic construct
  source 1..20: mol_type = other RNA
tgggcatgccttccacacct

SEQ ID NO: 3384 - RNA, 20 nt, synthetic construct
  source 1..20: mol_type = other RNA
taggtgtggaaggcatgccc

SEQ ID NO: 3385 - RNA, 20 nt, synthetic construct
  source 1..20: mol_type = other RNA
cttccctcaaatcctaggtg

SEQ ID NO: 3386 - RNA, 20 nt, synthetic construct
  source 1..20: mol_type = other RNA
ctgcttctcatggaacattt

SEQ ID NO: 3387 - RNA, 20 nt, synthetic construct
  source 1..20: mol_type = other RNA
ccgttgttttttgagaagaa

SEQ ID NO: 3388 - RNA, 20 nt, synthetic construct
  source 1..20: mol_type = other RNA
actactcttcttctcaaaaa

SEQ ID NO: 3389 - RNA, 20 nt, synthetic construct
  source 1..20: mol_type = other RNA
ctcattacaagaaagctgac

SEQ ID NO: 3390 - RNA, 20 nt, synthetic construct
  source 1..20: mol_type = other RNA
tgggcccaggatccctcatt

SEQ ID NO: 3391 - RNA, 20 nt, synthetic construct
  source 1..20: mol_type = other RNA
tgggcccaagattccctgtc

SEQ ID NO: 3392 - RNA, 20 nt, synthetic construct
  source 1..20: mol_type = other RNA
aggacttgtaggtaaagaca

SEQ ID NO: 3393 - RNA, 20 nt, synthetic construct
  source 1..20: mol_type = other RNA
tgcatctaggacttgtaggt

SEQ ID NO: 3394 - RNA, 20 nt, synthetic construct
  source 1..20: mol_type = other RNA
ttttctgccccacaccccag

SEQ ID NO: 3395 - RNA, 20 nt, synthetic construct
  source 1..20: mol_type = other RNA
gaaggcttttgctttggagg

SEQ ID NO: 3396 - RNA, 20 nt, synthetic construct
  source 1..20: mol_type = other RNA
ccacctatagcctgaacagc

SEQ ID NO: 3397 - RNA, 20 nt, synthetic construct
  source 1..20: mol_type = other RNA
agctgttcaggctataggtg

SEQ ID NO: 3398 - RNA, 20 nt, synthetic construct
  source 1..20: mol_type = other RNA
gagtgcctatacttcaaaat

SEQ ID NO: 3399 - RNA, 20 nt, synthetic construct
  source 1..20: mol_type = other RNA
gttttttgtttgtttctttg

SEQ ID NO: 3400 - RNA, 20 nt, synthetic construct
  source 1..20: mol_type = other RNA
tataagtctatttgtatttt

SEQ ID NO: 3401 - RNA, 20 nt, synthetic construct
  source 1..20: mol_type = other RNA
gaggattaacaatttacact

SEQ ID NO: 3402 - RNA, 20 nt, synthetic construct
  source 1..20: mol_type = other RNA
tcagattattccactttgtg

SEQ ID NO: 3403 - RNA, 20 nt, synthetic construct
  source 1..20: mol_type = other RNA
agctcagtattgcctagaaa

SEQ ID NO: 3404 - RNA, 20 nt, synthetic construct
  source 1..20: mol_type = other RNA
caggaagaacatgtcagtct

SEQ ID NO: 3405 - RNA, 20 nt, synthetic construct
  source 1..20: mol_type = other RNA
aaatgcgtatgtctatcatg

SEQ ID NO: 3406 - RNA, 20 nt, synthetic construct
  source 1..20: mol_type = other RNA
tgttagccataaaaggaaca

SEQ ID NO: 3407 - RNA, 20 nt, synthetic construct
  source 1..20: mol_type = other RNA
taaaacttctcttcattcag

SEQ ID NO: 3408 - RNA, 20 nt, synthetic construct
  source 1..20: mol_type = other RNA
aattgttatgaaagatagca

SEQ ID NO: 3409 - RNA, 20 nt, synthetic construct
  source 1..20: mol_type = other RNA
ttcataacaatttgatggaa

SEQ ID NO: 3410 - RNA, 20 nt, synthetic construct
  source 1..20: mol_type = other RNA
tgctgcttccatcaaattgt

SEQ ID NO: 3411 - RNA, 20 nt, synthetic construct
  source 1..20: mol_type = other RNA
ccttagctttacattaatga

SEQ ID NO: 3412 - RNA, 20 nt, synthetic construct
  source 1..20: mol_type = other RNA
aatgaccaaatgctgagaca

SEQ ID NO: 3413 - RNA, 20 nt, synthetic construct
  source 1..20: mol_type = other RNA
ttccacaatgcccactaaag

SEQ ID NO: 3414 - RNA, 20 nt, synthetic construct
  source 1..20: mol_type = other RNA
ttctatcctccattccctga

SEQ ID NO: 3415 - RNA, 20 nt, synthetic construct
  source 1..20: mol_type = other RNA
tccattccctgaagtgaaat

SEQ ID NO: 3416 - RNA, 20 nt, synthetic construct
  source 1..20: mol_type = other RNA
gaagtaacaaattcaggctg

SEQ ID NO: 3417 - RNA, 20 nt, synthetic construct
  source 1..20: mol_type = other RNA
caggcctgagccactgcacc

SEQ ID NO: 3418 - RNA, 20 nt, synthetic construct
  source 1..20: mol_type = other RNA
caacactttgggaggacaag

SEQ ID NO: 3419 - RNA, 20 nt, synthetic construct
  source 1..20: mol_type = other RNA
gcccgtcttgtcctcccaaa

SEQ ID NO: 3420 - RNA, 20 nt, synthetic construct
  source 1..20: mol_type = other RNA
ccagaggtcaggagttcaag

SEQ ID NO: 3421 - RNA, 20 nt, synthetic construct
  source 1..20: mol_type = other RNA
ctacgaaaaattaaaaaatt

SEQ ID NO: 3422 - RNA, 20 nt, synthetic construct
  source 1..20: mol_type = other RNA
caggctcaagtgtttctcct

SEQ ID NO: 3423 - RNA, 20 nt, synthetic construct
  source 1..20: mol_type = other RNA
caaaaaaaaaaaaaaagaag

SEQ ID NO: 3424 - RNA, 20 nt, synthetic construct
  source 1..20: mol_type = other RNA
cttcagaaaactggtgctta

SEQ ID NO: 3425 - RNA, 20 nt, synthetic construct
  source 1..20: mol_type = other RNA
gcattcctgcttttactctg

SEQ ID NO: 3426 - RNA, 20 nt, synthetic construct
  source 1..20: mol_type = other RNA
gtttacttcctgactctcat

SEQ ID NO: 3427 - RNA, 20 nt, synthetic construct
  source 1..20: mol_type = other RNA
ccacatctgtttacttcctg

SEQ ID NO: 3428 - RNA, 20 nt, synthetic construct
  source 1..20: mol_type = other RNA
caggttgtactgtctgctgt

SEQ ID NO: 3429 - RNA, 20 nt, synthetic construct
  source 1..20: mol_type = other RNA
tatttgtttccctttctaaa

SEQ ID NO: 3430 - RNA, 20 nt, synthetic construct
  source 1..20: mol_type = other RNA
accccataattacccttcct

SEQ ID NO: 3431 - RNA, 20 nt, synthetic construct
  source 1..20: mol_type = other RNA
cggttttattagtaaacaaa

SEQ ID NO: 3432 - RNA, 20 nt, synthetic construct
  source 1..20: mol_type = other RNA
tcattgagctcactgttccc

SEQ ID NO: 3433 - RNA, 20 nt, synthetic construct
  source 1..20: mol_type = other RNA
tgggcattcagcaaagaccc

SEQ ID NO: 3434 - RNA, 20 nt, synthetic construct
  source 1..20: mol_type = other RNA
ttttagacttggtttctaag

SEQ ID NO: 3435 - RNA, 20 nt, synthetic construct
  source 1..20: mol_type = other RNA
tttggatctttttagacttg

SEQ ID NO: 3436 - RNA, 20 nt, synthetic construct
  source 1..20: mol_type = other RNA
aaatgatctccaagtaaatt

SEQ ID NO: 3437 - RNA, 20 nt, synthetic construct
  source 1..20: mol_type = other RNA
ccaagtaaattaattgcctg

SEQ ID NO: 3438 - RNA, 20 nt, synthetic construct
  source 1..20: mol_type = other RNA
gtcaatacaaatagacccaa

SEQ ID NO: 3439 - RNA, 20 nt, synthetic construct
  source 1..20: mol_type = other RNA
tttttgggtctatttgtatt

SEQ ID NO: 3440 - RNA, 20 nt, synthetic construct
  source 1..20: mol_type = other RNA
ccttgccaattctgttattt

SEQ ID NO: 3441 - RNA, 20 nt, synthetic construct
  source 1..20: mol_type = other RNA
ttgaacacaattatgataca

SEQ ID NO: 3442 - RNA, 20 nt, synthetic construct
  source 1..20: mol_type = other RNA
taattgtgttcaaggattta

SEQ ID NO: 3443 - RNA, 20 nt, synthetic construct
  source 1..20: mol_type = other RNA
atttatttatttcttgtcca

SEQ ID NO: 3444 - RNA, 20 nt, synthetic construct
  source 1..20: mol_type = other RNA
acagaaagaaaaattgtaaa

SEQ ID NO: 3445 - RNA, 20 nt, synthetic construct
  source 1..20: mol_type = other RNA
ctttaatgagaaaatcacta

SEQ ID NO: 3446 - RNA, 20 nt, synthetic construct
  source 1..20: mol_type = other RNA
ctacatggccttataatcat

SEQ ID NO: 3447 - RNA, 20 nt, synthetic construct
  source 1..20: mol_type = other RNA
aatatgattataaggccatg

SEQ ID NO: 3448 - RNA, 20 nt, synthetic construct
  source 1..20: mol_type = other RNA
gtactatctaatatgattat

SEQ ID NO: 3449 - RNA, 20 nt, synthetic construct
  source 1..20: mol_type = other RNA
tctgtactatctaatatgat

SEQ ID NO: 3450 - RNA, 20 nt, synthetic construct
  source 1..20: mol_type = other RNA
tattagatagtacagatgat

SEQ ID NO: 3451 - RNA, 20 nt, synthetic construct
  source 1..20: mol_type = other RNA
tctcaggctttgtataagcg

SEQ ID NO: 3452 - RNA, 20 nt, synthetic construct
  source 1..20: mol_type = other RNA
atgaaaatatcaaaatattt

SEQ ID NO: 3453 - RNA, 20 nt, synthetic construct
  source 1..20: mol_type = other RNA
aaatatttaatatttgttta

SEQ ID NO: 3454 - RNA, 20 nt, synthetic construct
  source 1..20: mol_type = other RNA
ctttcccttcctctgtgact

SEQ ID NO: 3455 - RNA, 20 nt, synthetic construct
  source 1..20: mol_type = other RNA
ctgcttcaagtattttttct

SEQ ID NO: 3456 - RNA, 20 nt, synthetic construct
  source 1..20: mol_type = other RNA
gccatcactgcttcaagtat

SEQ ID NO: 3457 - RNA, 20 nt, synthetic construct
  source 1..20: mol_type = other RNA
ttttttccatatttagaaag

SEQ ID NO: 3458 - RNA, 20 nt, synthetic construct
  source 1..20: mol_type = other RNA
attgagcttcttgactatgt

SEQ ID NO: 3459 - RNA, 20 nt, synthetic construct
  source 1..20: mol_type = other RNA
gatccattgagcttcttgac

SEQ ID NO: 3460 - RNA, 20 nt, synthetic construct
  source 1..20: mol_type = other RNA
tatatctgatccattgagct

SEQ ID NO: 3461 - RNA, 20 nt, synthetic construct
  source 1..20: mol_type = other RNA
gatataggattttaaaaagt

SEQ ID NO: 3462 - RNA, 20 nt, synthetic construct
  source 1..20: mol_type = other RNA
tacagctttactttttaaaa

SEQ ID NO: 3463 - RNA, 20 nt, synthetic construct
  source 1..20: mol_type = other RNA
taattaaattgtccataatc

SEQ ID NO: 3464 - RNA, 20 nt, synthetic construct
  source 1..20: mol_type = other RNA
ttgattatggacaatttaat

SEQ ID NO: 3465 - RNA, 20 nt, synthetic construct
  source 1..20: mol_type = other RNA
aagatagaaagtaaaatctt

SEQ ID NO: 3466 - RNA, 20 nt, synthetic construct
  source 1..20: mol_type = other RNA
tatttgaagcccaagggaaa

SEQ ID NO: 3467 - RNA, 20 nt, synthetic construct
  source 1..20: mol_type = other RNA
gtcatttgtgtcactgttac

SEQ ID NO: 3468 - RNA, 20 nt, synthetic construct
  source 1..20: mol_type = other RNA
gaaacaacacaaatcagaaa

SEQ ID NO: 3469 - RNA, 20 nt, synthetic construct
  source 1..20: mol_type = other RNA
gaaacaatagaataacacct

SEQ ID NO: 3470 - RNA, 20 nt, synthetic construct
  source 1..20: mol_type = other RNA
ttttttcttcttaccactct

SEQ ID NO: 3471 - RNA, 20 nt, synthetic construct
  source 1..20: mol_type = other RNA
aatcagaaacaacaaaataa

SEQ ID NO: 3472 - RNA, 20 nt, synthetic construct
  source 1..20: mol_type = other RNA
gaaacaacaaaataacacgt

SEQ ID NO: 3473 - RNA, 20 nt, synthetic construct
  source 1..20: mol_type = other RNA
tgttttcctccttaccactc

SEQ ID NO: 3474 - RNA, 20 nt, synthetic construct
  source 1..20: mol_type = other RNA
aatcagaaacaatggaataa

SEQ ID NO: 3475 - RNA, 20 nt, synthetic construct
  source 1..20: mol_type = other RNA
gaaacaatggaataacacct

SEQ ID NO: 3476 - RNA, 20 nt, synthetic construct
  source 1..20: mol_type = other RNA
ttttttctttcttacactct

SEQ ID NO: 3477 - RNA, 20 nt, synthetic construct
  source 1..20: mol_type = other RNA
aatcaggaacaacagaataa

SEQ ID NO: 3478 - RNA, 20 nt, synthetic construct
  source 1..20: mol_type = other RNA
ggaacaacagaataacgcct

SEQ ID NO: 3479 - RNA, 20 nt, synthetic construct
  source 1..20: mol_type = other RNA
tgttttccttcttaccactc

SEQ ID NO: 3480 - RNA, 20 nt, synthetic construct
  source 1..20: mol_type = other RNA
gaaacaatgaaataacacct

SEQ ID NO: 3481 - RNA, 20 nt, synthetic construct
  source 1..20: mol_type = other RNA
tttcttcttcttactactct

SEQ ID NO: 3482 - RNA, 20 nt, synthetic construct
  source 1..20: mol_type = other RNA
ggtcagaaaaaatggaataa

SEQ ID NO: 3483 - RNA, 20 nt, synthetic construct
  source 1..20: mol_type = other RNA
ttttttttcttcttagcata

SEQ ID NO: 3484 - RNA, 20 nt, synthetic construct
  source 1..20: mol_type = other RNA
agtcagaaacaatggaataa

SEQ ID NO: 3485 - RNA, 20 nt, synthetic construct
  source 1..20: mol_type = other RNA
tgctgatgaaacattctttt

SEQ ID NO: 3486 - RNA, 20 nt, synthetic construct
  source 1..20: mol_type = other RNA
tttattacataatcctgctg

SEQ ID NO: 3487 - RNA, 20 nt, synthetic construct
  source 1..20: mol_type = other RNA
gcaggattatgtaataaaag

SEQ ID NO: 3488 - RNA, 20 nt, synthetic construct
  source 1..20: mol_type = other RNA
aaaccacaaaatactatcaa

SEQ ID NO: 3489 - RNA, 20 nt, synthetic construct
  source 1..20: mol_type = other RNA
ataaagtttttttgttttga

SEQ ID NO: 3490 - RNA, 20 nt, synthetic construct
  source 1..20: mol_type = other RNA
aaacaaaaaaactttattga

SEQ ID NO: 3491 - RNA, 20 nt, synthetic construct
  source 1..20: mol_type = other RNA
tctaattttcttctcaccaa

SEQ ID NO: 3492 - RNA, 20 nt, synthetic construct
  source 1..20: mol_type = other RNA
aaataaagacacatcatgct

SEQ ID NO: 3493 - RNA, 20 nt, synthetic construct
  source 1..20: mol_type = other RNA
ataagcatgatgtgtcttta

SEQ ID NO: 3494 - RNA, 20 nt, synthetic construct
  source 1..20: mol_type = other RNA
tgcttatagattaaaaaatc

SEQ ID NO: 3495 - RNA, 20 nt, synthetic construct
  source 1..20: mol_type = other RNA
gttttgtgaaaagtgacatt

SEQ ID NO: 3496 - RNA, 20 nt, synthetic construct
  source 1..20: mol_type = other RNA
aatgtcacttttcacaaaac

SEQ ID NO: 3497 - RNA, 20 nt, synthetic construct
  source 1..20: mol_type = other RNA
ttagtttcaacccacaccca

SEQ ID NO: 3498 - RNA, 20 nt, synthetic construct
  source 1..20: mol_type = other RNA
ccaagacaatctttaaaaag

SEQ ID NO: 3499 - RNA, 20 nt, synthetic construct
  source 1..20: mol_type = other RNA
ttaaaaagaataaaaaactt

SEQ ID NO: 3500 - RNA, 20 nt, synthetic construct
  source 1..20: mol_type = other RNA
cacaaacttgtgattttatt

SEQ ID NO: 3501 - RNA, 20 nt, synthetic construct
  source 1..20: mol_type = other RNA
atcccacaaacttgtgattt

SEQ ID NO: 3502 - RNA, 20 nt, synthetic construct
  source 1..20: mol_type = other RNA
caagtttgtgggatagatgc

SEQ ID NO: 3503 - RNA, 20 nt, synthetic construct
  source 1..20: mol_type = other RNA
agacatgtggtattggctgg

SEQ ID NO: 3504 - RNA, 20 nt, synthetic construct
  source 1..20: mol_type = other RNA
tggcctcccaaagtgttagg

SEQ ID NO: 3505 - RNA, 20 nt, synthetic construct
  source 1..20: mol_type = other RNA
taacactttgggaggccaag

SEQ ID NO: 3506 - RNA, 20 nt, synthetic construct
  source 1..20: mol_type = other RNA
tctcatcttggcctcccaaa

SEQ ID NO: 3507 - RNA, 20 nt, synthetic construct
  source 1..20: mol_type = other RNA
caggcaatcctctcatcttg

SEQ ID NO: 3508 - RNA, 20 nt, synthetic construct
  source 1..20: mol_type = other RNA
ctacaaatatttaaaaaaat

SEQ ID NO: 3509 - RNA, 20 nt, synthetic construct
  source 1..20: mol_type = other RNA
tcccacctcagcttcctgaa

SEQ ID NO: 3510 - RNA, 20 nt, synthetic construct
  source 1..20: mol_type = other RNA
ctggagcccatgaggtggag

SEQ ID NO: 3511 - RNA, 20 nt, synthetic construct
  source 1..20: mol_type = other RNA
tggctcatttcagcctccac

SEQ ID NO: 3512 - RNA, 20 nt, synthetic construct
  source 1..20: mol_type = other RNA
gtctcccaggctaaagttca

SEQ ID NO: 3513 - RNA, 20 nt, synthetic construct
  source 1..20: mol_type = other RNA
agttgtttcagaccaatttt

SEQ ID NO: 3514 - RNA, 20 nt, synthetic construct
  source 1..20: mol_type = other RNA
tactgtatgactcaaattaa

SEQ ID NO: 3515 - RNA, 20 nt, synthetic construct
  source 1..20: mol_type = other RNA
caaattaatttaatttgagt

SEQ ID NO: 3516 - RNA, 20 nt, synthetic construct
  source 1..20: mol_type = other RNA
tataaccttggagaaggaaa

SEQ ID NO: 3517 - RNA, 20 nt, synthetic construct
  source 1..20: mol_type = other RNA
tttgttttcttttacagtta

SEQ ID NO: 3518 - RNA, 20 nt, synthetic construct
  source 1..20: mol_type = other RNA
atatatctgacaaatggcct

SEQ ID NO: 3519 - RNA, 20 nt, synthetic construct
  source 1..20: mol_type = other RNA
gacaaatggcctgtatccag

SEQ ID NO: 3520 - RNA, 20 nt, synthetic construct
  source 1..20: mol_type = other RNA
agagtatagaaacatttctc

SEQ ID NO: 3521 - RNA, 20 nt, synthetic construct
  source 1..20: mol_type = other RNA
gaggacaaacaacctaatca

SEQ ID NO: 3522 - RNA, 20 nt, synthetic construct
  source 1..20: mol_type = other RNA
aaatgggcaacaggcttgaa

SEQ ID NO: 3523 - RNA, 20 nt, synthetic construct
  source 1..20: mol_type = other RNA
tctcctaagaaatgactatt

SEQ ID NO: 3524 - RNA, 20 nt, synthetic construct
  source 1..20: mol_type = other RNA
cctgaaaaagtgcacaacat

SEQ ID NO: 3525 - RNA, 20 nt, synthetic construct
  source 1..20: mol_type = other RNA
tagccatcaaaaatcaagag

SEQ ID NO: 3526 - RNA, 20 nt, synthetic construct
  source 1..20: mol_type = other RNA
aaaatcaagagttataaccc

SEQ ID NO: 3527 - RNA, 20 nt, synthetic construct
  source 1..20: mol_type = other RNA
tatgagggttataactcttg

SEQ ID NO: 3528 - RNA, 20 nt, synthetic construct
  source 1..20: mol_type = other RNA
agagttataaccctcataag

SEQ ID NO: 3529 - RNA, 20 nt, synthetic construct
  source 1..20: mol_type = other RNA
atgtacactggatgttcagt

SEQ ID NO: 3530 - RNA, 20 nt, synthetic construct
  source 1..20: mol_type = other RNA
agtgtacatggatatcatta

SEQ ID NO: 3531 - RNA, 20 nt, synthetic construct
  source 1..20: mol_type = other RNA
ttaagaagacacaataataa

SEQ ID NO: 3532 - RNA, 20 nt, synthetic construct
  source 1..20: mol_type = other RNA
gtgacaccacttattattgt

SEQ ID NO: 3533 - RNA, 20 nt, synthetic construct
  source 1..20: mol_type = other RNA
tacaacaaattaaaaaatca

SEQ ID NO: 3534 - RNA, 20 nt, synthetic construct
  source 1..20: mol_type = other RNA
gactgattttttaatttgtt

SEQ ID NO: 3535 - RNA, 20 nt, synthetic construct
  source 1..20: mol_type = other RNA
gtctgatgctttcttataaa

SEQ ID NO: 3536 - RNA, 20 nt, synthetic construct
  source 1..20: mol_type = other RNA
aactttataagaaagcatca

SEQ ID NO: 3537 - RNA, 20 nt, synthetic construct
  source 1..20: mol_type = other RNA
atcctacaaacctgtaattc

SEQ ID NO: 3538 - RNA, 20 nt, synthetic construct
  source 1..20: mol_type = other RNA
tacaaacctgtaattctatt

SEQ ID NO: 3539 - RNA, 20 nt, synthetic construct
  source 1..20: mol_type = other RNA
atataaatattcatagcagc

SEQ ID NO: 3540 - RNA, 20 nt, synthetic construct
  source 1..20: mol_type = other RNA
aaagaaaatgaaaactattt

SEQ ID NO: 3541 - RNA, 20 nt, synthetic construct
  source 1..20: mol_type = other RNA
aaagaaaatgaaaaaagaat

SEQ ID NO: 3542 - RNA, 20 nt, synthetic construct
  source 1..20: mol_type = other RNA
gtaacttgttccttgttgat

SEQ ID NO: 3543 - RNA, 20 nt, synthetic construct
  source 1..20: mol_type = other RNA
acaaggaacaagttactgat

SEQ ID NO: 3544 - RNA, 20 nt, synthetic construct
  source 1..20: mol_type = other RNA
ctgctaccctcttcccacgg

SEQ ID NO: 3545 - RNA, 20 nt, synthetic construct
  source 1..20: mol_type = other RNA
atctctgctaccctcttccc

SEQ ID NO: 3546 - RNA, 20 nt, synthetic construct
  source 1..20: mol_type = other RNA
aatctcatccagctacattt

SEQ ID NO: 3547 - RNA, 20 nt, synthetic construct
  source 1..20: mol_type = other RNA
taaatgtagctggatgagat

SEQ ID NO: 3548 - RNA, 20 nt, synthetic construct
  source 1..20: mol_type = other RNA
catccagctacatttaagat

SEQ ID NO: 3549 - RNA, 20 nt, synthetic construct
  source 1..20: mol_type = other RNA
agctacatttaagatctgtg

SEQ ID NO: 3550 - RNA, 20 nt, synthetic construct
  source 1..20: mol_type = other RNA
gtgcatctcactctatgtga

SEQ ID NO: 3551 - RNA, 20 nt, synthetic construct
  source 1..20: mol_type = other RNA
cactctatgtgaaaatatac

SEQ ID NO: 3552 - RNA, 20 nt, synthetic construct
  source 1..20: mol_type = other RNA
agtgatgtagcacctgaaac

SEQ ID NO: 3553 - RNA, 20 nt, synthetic construct
  source 1..20: mol_type = other RNA
gtttcaggtgctacatcact

SEQ ID NO: 3554 - RNA, 20 nt, synthetic construct
  source 1..20: mol_type = other RNA
cttgatacgtccagttgtgt

SEQ ID NO: 3555 - RNA, 20 nt, synthetic construct
  source 1..20: mol_type = other RNA
cccatttgaggatgttaggc

SEQ ID NO: 3556 - RNA, 20 nt, synthetic construct
  source 1..20: mol_type = other RNA
tcaaatgggggatctgggct

SEQ ID NO: 3557 - RNA, 20 nt, synthetic construct
  source 1..20: mol_type = other RNA
gggcttgagactaggtcaca

SEQ ID NO: 3558 - RNA, 20 nt, synthetic construct
  source 1..20: mol_type = other RNA
aacacggtctctgtagagac

SEQ ID NO: 3559 - RNA, 20 nt, synthetic construct
  source 1..20: mol_type = other RNA
tcacattcatgacctgtggc

SEQ ID NO: 3560 - RNA, 20 nt, synthetic construct
  source 1..20: mol_type = other RNA
tggagaatgccttccccatt

SEQ ID NO: 3561 - RNA, 20 nt, synthetic construct
  source 1..20: mol_type = other RNA
gaaggggtcaagtggctatg

SEQ ID NO: 3562 - RNA, 20 nt, synthetic construct
  source 1..20: mol_type = other RNA
atagccacttgaccccttca

SEQ ID NO: 3563 - RNA, 20 nt, synthetic construct
  source 1..20: mol_type = other RNA
catagtctacctagccgtct

SEQ ID NO: 3564 - RNA, 20 nt, synthetic construct
  source 1..20: mol_type = other RNA
cccattccttcagtcccaga

SEQ ID NO: 3565 - RNA, 20 nt, synthetic construct
  source 1..20: mol_type = other RNA
tctgctggctgcagccactc

SEQ ID NO: 3566 - RNA, 20 nt, synthetic construct
  source 1..20: mol_type = other RNA
tagagaagcagcatcctgcc

SEQ ID NO: 3567 - RNA, 20 nt, synthetic construct
  source 1..20: mol_type = other RNA
tgcctgggagctagttttcc

SEQ ID NO: 3568 - RNA, 20 nt, synthetic construct
  source 1..20: mol_type = other RNA
ggtagagcaagtgggtttgg

SEQ ID NO: 3569 - RNA, 20 nt, synthetic construct
  source 1..20: mol_type = other RNA
tgaaaatagtattactataa

SEQ ID NO: 3570 - RNA, 20 nt, synthetic construct
  source 1..20: mol_type = other RNA
aagattatataattcccatg

SEQ ID NO: 3571 - RNA, 20 nt, synthetic construct
  source 1..20: mol_type = other RNA
tggatgccacttcttccttg

SEQ ID NO: 3572 - RNA, 20 nt, synthetic construct
  source 1..20: mol_type = other RNA
ctgtctgtctagctctttgt

SEQ ID NO: 3573 - RNA, 20 nt, synthetic construct
  source 1..20: mol_type = other RNA
ttgtatgtgcattaaaaaat

SEQ ID NO: 3574 - RNA, 20 nt, synthetic construct
  source 1..20: mol_type = other RNA
tagattttttaatgcacata

SEQ ID NO: 3575 - RNA, 20 nt, synthetic construct
  source 1..20: mol_type = other RNA
aagatacatatttcaaaatc

SEQ ID NO: 3576 - RNA, 20 nt, synthetic construct
  source 1..20: mol_type = other RNA
gtgtcatttattctggagga

SEQ ID NO: 3577 - RNA, 20 nt, synthetic construct
  source 1..20: mol_type = other RNA
tcctttcaccttctgccaaa

SEQ ID NO: 3578 - RNA, 20 nt, synthetic construct
  source 1..20: mol_type = other RNA
gaatatcttcctttcacctt

SEQ ID NO: 3579 - RNA, 20 nt, synthetic construct
  source 1..20: mol_type = other RNA
tttcttgtacagacatgtat

SEQ ID NO: 3580 - RNA, 20 nt, synthetic construct
  source 1..20: mol_type = other RNA
cagttttcatagagagcata

SEQ ID NO: 3581 - RNA, 20 nt, synthetic construct
  source 1..20: mol_type = other RNA
aaagtagtatatgctctcta

SEQ ID NO: 3582 - RNA, 20 nt, synthetic construct
  source 1..20: mol_type = other RNA
cagattataatttttgtttt

SEQ ID NO: 3583 - RNA, 20 nt, synthetic construct
  source 1..20: mol_type = other RNA
gtgatgtgtccacagttgtt

SEQ ID NO: 3584 - RNA, 20 nt, synthetic construct
  source 1..20: mol_type = other RNA
ctggtgacctgtgttgtttt

SEQ ID NO: 3585 - RNA, 20 nt, synthetic construct
  source 1..20: mol_type = other RNA
ggattcctgcagtagttcct

SEQ ID NO: 3586 - RNA, 20 nt, synthetic construct
  source 1..20: mol_type = other RNA
cagcatctggattcctgcag

SEQ ID NO: 3587 - RNA, 20 nt, synthetic construct
  source 1..20: mol_type = other RNA
agatgctgagattcgccctt

SEQ ID NO: 3588 - RNA, 20 nt, synthetic construct
  source 1..20: mol_type = other RNA
atggtgtaacaccaagggcg

SEQ ID NO: 3589 - RNA, 20 nt, synthetic construct
  source 1..20: mol_type = other RNA
cagtgtcaggtgggagtact

SEQ ID NO: 3590 - RNA, 20 nt, synthetic construct
  source 1..20: mol_type = other RNA
tgtcaggttgcagtactccc

SEQ ID NO: 3591 - RNA, 20 nt, synthetic construct
  source 1..20: mol_type = other RNA
cagtatatagatgtctaacc

SEQ ID NO: 3592 - RNA, 20 nt, synthetic construct
  source 1..20: mol_type = other RNA
atatactgggatgaaaaacc

SEQ ID NO: 3593 - RNA, 20 nt, synthetic construct
  source 1..20: mol_type = other RNA
gtaagattttccatggtttt

SEQ ID NO: 3594 - RNA, 20 nt, synthetic construct
  source 1..20: mol_type = other RNA
tactgatgcagaagccttca

SEQ ID NO: 3595 - RNA, 20 nt, synthetic construct
  source 1..20: mol_type = other RNA
cccagagagggcgctgaggc

SEQ ID NO: 3596 - RNA, 20 nt, synthetic construct
  source 1..20: mol_type = other RNA
cagttctggatcccccagag

SEQ ID NO: 3597 - RNA, 20 nt, synthetic construct
  source 1..20: mol_type = other RNA
agaactgtgatttttggcac

SEQ ID NO: 3598 - RNA, 20 nt, synthetic construct
  source 1..20: mol_type = other RNA
attttggctaggacactgaa

SEQ ID NO: 3599 - RNA, 20 nt, synthetic construct
  source 1..20: mol_type = other RNA
tcacatatttggcaggctgt

SEQ ID NO: 3600 - RNA, 20 nt, synthetic construct
  source 1..20: mol_type = other RNA
ctggaaaggcttattggctt

SEQ ID NO: 3601 - RNA, 20 nt, synthetic construct
  source 1..20: mol_type = other RNA
acagtttgcagtttcttaag

SEQ ID NO: 3602 - RNA, 20 nt, synthetic construct
  source 1..20: mol_type = other RNA
tactcaaaggccatgttctt

SEQ ID NO: 3603 - RNA, 20 nt, synthetic construct
  source 1..20: mol_type = other RNA
tagagaaacctaaggagact

SEQ ID NO: 3604 - RNA, 20 nt, synthetic construct
  source 1..20: mol_type = other RNA
cagtctttcacaggctctgt

SEQ ID NO: 3605 - RNA, 20 nt, synthetic construct
  source 1..20: mol_type = other RNA
tctagtgcccagagtcctga

SEQ ID NO: 3606 - RNA, 20 nt, synthetic construct
  source 1..20: mol_type = other RNA
ctcctccaagggaataagtt

SEQ ID NO: 3607 - RNA, 20 nt, synthetic construct
  source 1..20: mol_type = other RNA
tacatttaggagtgcaggca

SEQ ID NO: 3608 - RNA, 20 nt, synthetic construct
  source 1..20: mol_type = other RNA
tcctacatttaggagtgcag

SEQ ID NO: 3609 - RNA, 20 nt, synthetic construct
  source 1..20: mol_type = other RNA
tttgaaaatttgggcaggaa

SEQ ID NO: 3610 - RNA, 20 nt, synthetic construct
  source 1..20: mol_type = other RNA
ctgctggttttcatgagaac

SEQ ID NO: 3611 - RNA, 20 nt, synthetic construct
  source 1..20: mol_type = other RNA
tatgaatctctgctggtttt

SEQ ID NO: 3612 - RNA, 20 nt, synthetic construct
  source 1..20: mol_type = other RNA
aaagataaagaacagaggag

SEQ ID NO: 3613 - RNA, 20 nt, synthetic construct
  source 1..20: mol_type = other RNA
ttagatttaaaaataatgtt

SEQ ID NO: 3614 - RNA, 20 nt, synthetic construct
  source 1..20: mol_type = other RNA
actgggtcttttcacatcct

SEQ ID NO: 3615 - RNA, 20 nt, synthetic construct
  source 1..20: mol_type = other RNA
ttttgctactagtagaaaaa

SEQ ID NO: 3616 - RNA, 20 nt, synthetic construct
  source 1..20: mol_type = other RNA
tactcagtaattgcatgagc

SEQ ID NO: 3617 - RNA, 20 nt, synthetic construct
  source 1..20: mol_type = other RNA
ccatggtagcaatcctggac

SEQ ID NO: 3618 - RNA, 20 nt, synthetic construct
  source 1..20: mol_type = other RNA
gaggaccccagaaaactacc

SEQ ID NO: 3619 - RNA, 20 nt, synthetic construct
  source 1..20: mol_type = other RNA
aatacatacgcatttgggta

SEQ ID NO: 3620 - RNA, 20 nt, synthetic construct
  source 1..20: mol_type = other RNA
tctgagctttacattaatat

SEQ ID NO: 3621 - RNA, 20 nt, synthetic construct
  source 1..20: mol_type = other RNA
atgtcatctttcactcgtgc

SEQ ID NO: 3622 - RNA, 20 nt, synthetic construct
  source 1..20: mol_type = other RNA
ttcactcgtgcaattctgtc

SEQ ID NO: 3623 - RNA, 20 nt, synthetic construct
  source 1..20: mol_type = other RNA
taatttttttttttttactt

SEQ ID NO: 3624 - RNA, 20 nt, synthetic construct
  source 1..20: mol_type = other RNA
gaatatttatatatatgtct

SEQ ID NO: 3625 - RNA, 20 nt, synthetic construct
  source 1..20: mol_type = other RNA
gccttcctgcttttgctctt

SEQ ID NO: 3626 - RNA, 20 nt, synthetic construct
  source 1..20: mol_type = other RNA
gttgtgcaacttgtgaaaac

SEQ ID NO: 3627 - RNA, 20 nt, synthetic construct
  source 1..20: mol_type = other RNA
caatacactactatctgttg

SEQ ID NO: 3628 - RNA, 20 nt, synthetic construct
  source 1..20: mol_type = other RNA
catttgttttctgttctaaa

SEQ ID NO: 3629 - RNA, 20 nt, synthetic construct
  source 1..20: mol_type = other RNA
accccataagtgtgctgtat

SEQ ID NO: 3630 - RNA, 20 nt, synthetic construct
  source 1..20: mol_type = other RNA
atgatgaaatacagcacact

SEQ ID NO: 3631 - RNA, 20 nt, synthetic construct
  source 1..20: mol_type = other RNA
ctttttccttcaatccatga

SEQ ID NO: 3632 - RNA, 20 nt, synthetic construct
  source 1..20: mol_type = other RNA
tggattgaaggaaaaagaga

SEQ ID NO: 3633 - RNA, 20 nt, synthetic construct
  source 1..20: mol_type = other RNA
agactgctgtggtcttcttg

SEQ ID NO: 3634 - RNA, 20 nt, synthetic construct
  source 1..20: mol_type = other RNA
caaactctggtgtctctcag

SEQ ID NO: 3635 - RNA, 20 nt, synthetic construct
  source 1..20: mol_type = other RNA
cagctgcctttgtaatccca

SEQ ID NO: 3636 - RNA, 20 nt, synthetic construct
  source 1..20: mol_type = other RNA
ccacaaattctttctcatta

SEQ ID NO: 3637 - RNA, 20 nt, synthetic construct
  source 1..20: mol_type = other RNA
ctccctgtgcatatgcagat

SEQ ID NO: 3638 - RNA, 20 nt, synthetic construct
  source 1..20: mol_type = other RNA
gcatatgcacagggagtgat

SEQ ID NO: 3639 - RNA, 20 nt, synthetic construct
  source 1..20: mol_type = other RNA
ccattgaactcattgttccc

SEQ ID NO: 3640 - RNA, 20 nt, synthetic construct
  source 1..20: mol_type = other RNA
cccagtgctttgtgagctct

SEQ ID NO: 3641 - RNA, 20 nt, synthetic construct
  source 1..20: mol_type = other RNA
tgggcattcagtagagaccc

SEQ ID NO: 3642 - RNA, 20 nt, synthetic construct
  source 1..20: mol_type = other RNA
actctgtttccaaagagtgg

SEQ ID NO: 3643 - RNA, 20 nt, synthetic construct
  source 1..20: mol_type = other RNA
actccacaaaaatcctagca

SEQ ID NO: 3644 - RNA, 20 nt, synthetic construct
  source 1..20: mol_type = other RNA
tagcaaaattgaaaagcaag

SEQ ID NO: 3645 - RNA, 20 nt, synthetic construct
  source 1..20: mol_type = other RNA
tctcaacataaattagttgc

SEQ ID NO: 3646 - RNA, 20 nt, synthetic construct
  source 1..20: mol_type = other RNA
gaagaaagcttaacctcttc

SEQ ID NO: 3647 - RNA, 20 nt, synthetic construct
  source 1..20: mol_type = other RNA
aattgctcagttatctggca

SEQ ID NO: 3648 - RNA, 20 nt, synthetic construct
  source 1..20: mol_type = other RNA
ggcatccacaatatgtgaca

SEQ ID NO: 3649 - RNA, 20 nt, synthetic construct
  source 1..20: mol_type = other RNA
acaatatgtgacataaattt

SEQ ID NO: 3650 - RNA, 20 nt, synthetic construct
  source 1..20: mol_type = other RNA
cactaaatgcttcttgtatg

SEQ ID NO: 3651 - RNA, 20 nt, synthetic construct
  source 1..20: mol_type = other RNA
ataaccaggagaaaaatcat

SEQ ID NO: 3652 - RNA, 20 nt, synthetic construct
  source 1..20: mol_type = other RNA
ttcaatacaaatagacccag

SEQ ID NO: 3653 - RNA, 20 nt, synthetic construct
  source 1..20: mol_type = other RNA
tttctgtcatttctgggtct

SEQ ID NO: 3654 - RNA, 20 nt, synthetic construct
  source 1..20: mol_type = other RNA
tatgtatattttaaatgttt

SEQ ID NO: 3655 - RNA, 20 nt, synthetic construct
  source 1..20: mol_type = other RNA
aatgatcatatgtatatttt

SEQ ID NO: 3656 - RNA, 20 nt, synthetic construct
  source 1..20: mol_type = other RNA
caagatcaaatgatcatatg

SEQ ID NO: 3657 - RNA, 20 nt, synthetic construct
  source 1..20: mol_type = other RNA
gatcacaagatcaaatgatc

SEQ ID NO: 3658 - RNA, 20 nt, synthetic construct
  source 1..20: mol_type = other RNA
tttgatcttgtgatcagata

SEQ ID NO: 3659 - RNA, 20 nt, synthetic construct
  source 1..20: mol_type = other RNA
tgtgatcagatatcacaaga

SEQ ID NO: 3660 - RNA, 20 nt, synthetic construct
  source 1..20: mol_type = other RNA
ctttcttctcttgtgatatc

SEQ ID NO: 3661 - RNA, 20 nt, synthetic construct
  source 1..20: mol_type = other RNA
gatatcacaagagaagaaag

SEQ ID NO: 3662 - RNA, 20 nt, synthetic construct
  source 1..20: mol_type = other RNA
caagagaagaaagagatact

SEQ ID NO: 3663 - RNA, 20 nt, synthetic construct
  source 1..20: mol_type = other RNA
ttgcttcaggcattttttct

SEQ ID NO: 3664 - RNA, 20 nt, synthetic construct
  source 1..20: mol_type = other RNA
gtgagcttttttttcttcat

SEQ ID NO: 3665 - RNA, 20 nt, synthetic construct
  source 1..20: mol_type = other RNA
tatttctgattgattagttt

SEQ ID NO: 3666 - RNA, 20 nt, synthetic construct
  source 1..20: mol_type = other RNA
atcagaaatatgattttgaa

SEQ ID NO: 3667 - RNA, 20 nt, synthetic construct
  source 1..20: mol_type = other RNA
gaaatatgattttgaaaagt

SEQ ID NO: 3668 - RNA, 20 nt, synthetic construct
  source 1..20: mol_type = other RNA
tacatttttacttttcaaaa

SEQ ID NO: 3669 - RNA, 20 nt, synthetic construct
  source 1..20: mol_type = other RNA
tcttggttaaattgtctaaa

SEQ ID NO: 3670 - RNA, 20 nt, synthetic construct
  source 1..20: mol_type = other RNA
aagaaagctaggaaaatttt

SEQ ID NO: 3671 - RNA, 20 nt, synthetic construct
  source 1..20: mol_type = other RNA
tttttcctctggcttataaa

SEQ ID NO: 3672 - RNA, 20 nt, synthetic construct
  source 1..20: mol_type = other RNA
gtcatttgtgtaactgttcc

SEQ ID NO: 3673 - RNA, 20 nt, synthetic construct
  source 1..20: mol_type = other RNA
gaaacaatgaaagtcagaaa

SEQ ID NO: 3674 - RNA, 20 nt, synthetic construct
  source 1..20: mol_type = other RNA
ttaaagtaatagaagaaaaa

SEQ ID NO: 3675 - RNA, 20 nt, synthetic construct
  source 1..20: mol_type = other RNA
ctcacctcttgggtttttct

SEQ ID NO: 3676 - RNA, 20 nt, synthetic construct
  source 1..20: mol_type = other RNA
tggcagacaggaggcaggac

SEQ ID NO: 3677 - RNA, 20 nt, synthetic construct
  source 1..20: mol_type = other RNA
agtcctgcctcctgtctgcc

SEQ ID NO: 3678 - RNA, 20 nt, synthetic construct
  source 1..20: mol_type = other RNA
tgagaggacccacagaccgt

SEQ ID NO: 3679 - RNA, 20 nt, synthetic construct
  source 1..20: mol_type = other RNA
tgcaggagcagtctgcttcc

SEQ ID NO: 3680 - RNA, 20 nt, synthetic construct
  source 1..20: mol_type = other RNA
agcaagctctgaggtcttct

SEQ ID NO: 3681 - RNA, 20 nt, synthetic construct
  source 1..20: mol_type = other RNA
ccaagcagctcattcctgcc

SEQ ID NO: 3682 - RNA, 20 nt, synthetic construct
  source 1..20: mol_type = other RNA
ctgtggtgccaggcaggaat

SEQ ID NO: 3683 - RNA, 20 nt, synthetic construct
  source 1..20: mol_type = other RNA
atcagaagtgtggccaaagg

SEQ ID NO: 3684 - RNA, 20 nt, synthetic construct
  source 1..20: mol_type = other RNA
gaagtgtggccaaaggaaca

SEQ ID NO: 3685 - RNA, 20 nt, synthetic construct
  source 1..20: mol_type = other RNA
ggtttgcagacttcacaggt

SEQ ID NO: 3686 - RNA, 20 nt, synthetic construct
  source 1..20: mol_type = other RNA
tcctaggtacacaactccag

SEQ ID NO: 3687 - RNA, 20 nt, synthetic construct
  source 1..20: mol_type = other RNA
gttgggggtgggactaggcg

SEQ ID NO: 3688 - RNA, 20 nt, synthetic construct
  source 1..20: mol_type = other RNA
ttggagttctagggcccacc

SEQ ID NO: 3689 - RNA, 20 nt, synthetic construct
  source 1..20: mol_type = other RNA
gctatactagtgtggagagg

SEQ ID NO: 3690 - RNA, 20 nt, synthetic construct
  source 1..20: mol_type = other RNA
atgggtctctcagctgtgga

SEQ ID NO: 3691 - RNA, 20 nt, synthetic construct
  source 1..20: mol_type = other RNA
acagctgagagacccataga

SEQ ID NO: 3692 - RNA, 20 nt, synthetic construct
  source 1..20: mol_type = other RNA
caggactctgtacagacagt

SEQ ID NO: 3693 - RNA, 20 nt, synthetic construct
  source 1..20: mol_type = other RNA
ctgcagttcagctcacagga

SEQ ID NO: 3694 - RNA, 20 nt, synthetic construct
  source 1..20: mol_type = other RNA
ataggaaaagagggagagta

SEQ ID NO: 3695 - RNA, 20 nt, synthetic construct
  source 1..20: mol_type = other RNA
catggggtgttcccttgatg

SEQ ID NO: 3696 - RNA, 20 nt, synthetic construct
  source 1..20: mol_type = other RNA
agggaacaccccatgggata

SEQ ID NO: 3697 - RNA, 20 nt, synthetic construct
  source 1..20: mol_type = other RNA
gaacaacagccttcagccct

SEQ ID NO: 3698 - RNA, 20 nt, synthetic construct
  source 1..20: mol_type = other RNA
cactcccagttcaccagcaa

SEQ ID NO: 3699 - RNA, 20 nt, synthetic construct
  source 1..20: mol_type = other RNA
attgctggtgaactgggagt

SEQ ID NO: 3700 - RNA, 20 nt, synthetic construct
  source 1..20: mol_type = other RNA
gggatttcttcttggtttgg

SEQ ID NO: 3701 - RNA, 20 nt, synthetic construct
  source 1..20: mol_type = other RNA
aaaccaagaagaaatccctg

SEQ ID NO: 3702 - RNA, 20 nt, synthetic construct
  source 1..20: mol_type = other RNA
ctgatttacctgaaagagaa

SEQ ID NO: 3703 - RNA, 20 nt, synthetic construct
  source 1..20: mol_type = other RNA
gggagggaccagagaaaggc

SEQ ID NO: 3704 - RNA, 20 nt, synthetic construct
  source 1..20: mol_type = other RNA
aaaaaaaaaaaggtataaga

SEQ ID NO: 3705 - RNA, 20 nt, synthetic construct
  source 1..20: mol_type = other RNA
attttgttgaatatttcacc

SEQ ID NO: 3706 - RNA, 20 nt, synthetic construct
  source 1..20: mol_type = other RNA
tttattctttgtctttgttg

SEQ ID NO: 3707 - RNA, 20 nt, synthetic construct
  source 1..20: mol_type = other RNA
aacaaagacaaagaataaag

SEQ ID NO: 3708 - RNA, 20 nt, synthetic construct
  source 1..20: mol_type = other RNA
tgaaggctttgttcatattt

SEQ ID NO: 3709 - RNA, 20 nt, synthetic construct
  source 1..20: mol_type = other RNA
cagacatcttgaaggctttg

SEQ ID NO: 3710 - RNA, 20 nt, synthetic construct
  source 1..20: mol_type = other RNA
tggctcctgaggaaaaagac

SEQ ID NO: 3711 - RNA, 20 nt, synthetic construct
  source 1..20: mol_type = other RNA
ttttgtgatgaatttcccag

SEQ ID NO: 3712 - RNA, 20 nt, synthetic construct
  source 1..20: mol_type = other RNA
caaaaagatcttagcctagg

SEQ ID NO: 3713 - RNA, 20 nt, synthetic construct
  source 1..20: mol_type = other RNA
tagcctaggcacattctcat

SEQ ID NO: 3714 - RNA, 20 nt, synthetic construct
  source 1..20: mol_type = other RNA
ggttatgcaaagttaagacg

SEQ ID NO: 3715 - RNA, 20 nt, synthetic construct
  source 1..20: mol_type = other RNA
taagagctgtgagacagaag

SEQ ID NO: 3716 - RNA, 20 nt, synthetic construct
  source 1..20: mol_type = other RNA
gatagggtttcctttataca

SEQ ID NO: 3717 - RNA, 20 nt, synthetic construct
  source 1..20: mol_type = other RNA
gattaacagccagtttttca

SEQ ID NO: 3718 - RNA, 20 nt, synthetic construct
  source 1..20: mol_type = other RNA
tttatagcttgtacagttcc

SEQ ID NO: 3719 - RNA, 20 nt, synthetic construct
  source 1..20: mol_type = other RNA
tagcctcctcaaacaaaaca

SEQ ID NO: 3720 - RNA, 20 nt, synthetic construct
  source 1..20: mol_type = other RNA
gtcaagaattttgtatccag

SEQ ID NO: 3721 - RNA, 20 nt, synthetic construct
  source 1..20: mol_type = other RNA
agcgaaagtaagcatcatat

SEQ ID NO: 3722 - RNA, 20 nt, synthetic construct
  source 1..20: mol_type = other RNA
ttccttcatatatgatgctt

SEQ ID NO: 3723 - RNA, 20 nt, synthetic construct
  source 1..20: mol_type = other RNA
tatatgaaggaaagatacag

SEQ ID NO: 3724 - RNA, 20 nt, synthetic construct
  source 1..20: mol_type = other RNA
tgaaacaaatcctagaaaca

SEQ ID NO: 3725 - RNA, 20 nt, synthetic construct
  source 1..20: mol_type = other RNA
tagaaacacatgaaaacaga

SEQ ID NO: 3726 - RNA, 20 nt, synthetic construct
  source 1..20: mol_type = other RNA
ctttaaagcataaatcacac

SEQ ID NO: 3727 - RNA, 20 nt, synthetic construct
  source 1..20: mol_type = other RNA
cacaggacctataaaacaaa

SEQ ID NO: 3728 - RNA, 20 nt, synthetic construct
  source 1..20: mol_type = other RNA
tattctttattgcctccgta

SEQ ID NO: 3729 - RNA, 20 nt, synthetic construct
  source 1..20: mol_type = other RNA
aaatggcctaaatgctccac

SEQ ID NO: 3730 - RNA, 20 nt, synthetic construct
  source 1..20: mol_type = other RNA
tttaagtggagcatttaggc

SEQ ID NO: 3731 - RNA, 20 nt, synthetic construct
  source 1..20: mol_type = other RNA
tgccagccaccaactctttt

SEQ ID NO: 3732 - RNA, 20 nt, synthetic construct
  source 1..20: mol_type = other RNA
cacggggagcggcagactgg

SEQ ID NO: 3733 - RNA, 20 nt, synthetic construct
  source 1..20: mol_type = other RNA
acacatagggtgggtcattt

SEQ ID NO: 3734 - RNA, 20 nt, synthetic construct
  source 1..20: mol_type = other RNA
cattgggactggttagacag

SEQ ID NO: 3735 - RNA, 20 nt, synthetic construct
  source 1..20: mol_type = other RNA
cctggtcttcaggttgcaaa

SEQ ID NO: 3736 - RNA, 20 nt, synthetic construct
  source 1..20: mol_type = other RNA
agggccctggtggtgtaggc

SEQ ID NO: 3737 - RNA, 20 nt, synthetic construct
  source 1..20: mol_type = other RNA
actgagaaagaccacttagc

SEQ ID NO: 3738 - RNA, 20 nt, synthetic construct
  source 1..20: mol_type = other RNA
cacccccatggagcccagca

SEQ ID NO: 3739 - RNA, 20 nt, synthetic construct
  source 1..20: mol_type = other RNA
acaaatactggggcttgagt

SEQ ID NO: 3740 - RNA, 20 nt, synthetic construct
  source 1..20: mol_type = other RNA
agagaggcactcttgctaca

SEQ ID NO: 3741 - RNA, 20 nt, synthetic construct
  source 1..20: mol_type = other RNA
ctgaaagaaaggcagcagcc

SEQ ID NO: 3742 - RNA, 20 nt, synthetic construct
  source 1..20: mol_type = other RNA
ataagcttctgactggggct

SEQ ID NO: 3743 - RNA, 20 nt, synthetic construct
  source 1..20: mol_type = other RNA
ccctgggacagagcaactgg

SEQ ID NO: 3744 - RNA, 20 nt, synthetic construct
  source 1..20: mol_type = other RNA
ggtgctcttttcagagctgg

SEQ ID NO: 3745 - RNA, 20 nt, synthetic construct
  source 1..20: mol_type = other RNA
cccaacacagcactagagct

SEQ ID NO: 3746 - RNA, 20 nt, synthetic construct
  source 1..20: mol_type = other RNA
attttgctattgatacttgt

SEQ ID NO: 3747 - RNA, 20 nt, synthetic construct
  source 1..20: mol_type = other RNA
atagcaaaatcgatcaagtg

SEQ ID NO: 3748 - RNA, 20 nt, synthetic construct
  source 1..20: mol_type = other RNA
tttcttccacttgatcgatt

SEQ ID NO: 3749 - RNA, 20 nt, synthetic construct
  source 1..20: mol_type = other RNA
atcaagtggaagaaaggata

SEQ ID NO: 3750 - RNA, 20 nt, synthetic construct
  source 1..20: mol_type = other RNA
ctgatatcctttcttccact

SEQ ID NO: 3751 - RNA, 20 nt, synthetic construct
  source 1..20: mol_type = other RNA
agtggaagaaaggatatcag

SEQ ID NO: 3752 - RNA, 20 nt, synthetic construct
  source 1..20: mol_type = other RNA
gagattgaaaatcaacttaa

SEQ ID NO: 3753 - RNA, 20 nt, synthetic construct
  source 1..20: mol_type = other RNA
acttaatgaagtaaagcgtg

SEQ ID NO: 3754 - RNA, 20 nt, synthetic construct
  source 1..20: mol_type = other RNA
tgttttcacgctttacttca

SEQ ID NO: 3755 - RNA, 20 nt, synthetic construct
  source 1..20: mol_type = other RNA
tccaagtatgggactatgtg

SEQ ID NO: 3756 - RNA, 20 nt, synthetic construct
  source 1..20: mol_type = other RNA
tttcacatagtcccatactt

SEQ ID NO: 3757 - RNA, 20 nt, synthetic construct
  source 1..20: mol_type = other RNA
aacgtaggttcaatcttttc

SEQ ID NO: 3758 - RNA, 20 nt, synthetic construct
  source 1..20: mol_type = other RNA
ctttcaggtacaccaatcaa

SEQ ID NO: 3759 - RNA, 20 nt, synthetic construct
  source 1..20: mol_type = other RNA
tgaagagtgttttccaactt

SEQ ID NO: 3760 - RNA, 20 nt, synthetic construct
  source 1..20: mol_type = other RNA
aggagaacttccccaaccta

SEQ ID NO: 3761 - RNA, 20 nt, synthetic construct
  source 1..20: mol_type = other RNA
ttgtggtgttctctgtattt

SEQ ID NO: 3762 - RNA, 20 nt, synthetic construct
  source 1..20: mol_type = other RNA
gacgattatgtgtcttcagg

SEQ ID NO: 3763 - RNA, 20 nt, synthetic construct
  source 1..20: mol_type = other RNA
tcagattcaccaaggttgaa

SEQ ID NO: 3764 - RNA, 20 nt, synthetic construct
  source 1..20: mol_type = other RNA
actgttagtctgatggggtt

SEQ ID NO: 3765 - RNA, 20 nt, synthetic construct
  source 1..20: mol_type = other RNA
gactaacagtggatcttcct

SEQ ID NO: 3766 - RNA, 20 nt, synthetic construct
  source 1..20: mol_type = other RNA
tcctgcagaaactctacaag

SEQ ID NO: 3767 - RNA, 20 nt, synthetic construct
  source 1..20: mol_type = other RNA
cctaatactatccctcccca

SEQ ID NO: 3768 - RNA, 20 nt, synthetic construct
  source 1..20: mol_type = other RNA
ctccccactccccccatccc

SEQ ID NO: 3769 - RNA, 20 nt, synthetic construct
  source 1..20: mol_type = other RNA
cacaccggggcctgtcatgg

SEQ ID NO: 3770 - RNA, 20 nt, synthetic construct
  source 1..20: mol_type = other RNA
catgacaggccccggtgtgt

SEQ ID NO: 3771 - RNA, 20 nt, synthetic construct
  source 1..20: mol_type = other RNA
aaacaccgaatgttctcact

SEQ ID NO: 3772 - RNA, 20 nt, synthetic construct
  source 1..20: mol_type = other RNA
caaggacagaaatccaaaca

SEQ ID NO: 3773 - RNA, 20 nt, synthetic construct
  source 1..20: mol_type = other RNA
ttctcagcaaactatcacaa

SEQ ID NO: 3774 - RNA, 20 nt, synthetic construct
  source 1..20: mol_type = other RNA
acatccctacaaaggacatg

SEQ ID NO: 3775 - RNA, 20 nt, synthetic construct
  source 1..20: mol_type = other RNA
ctacaaaggacatgaagtca

SEQ ID NO: 3776 - RNA, 20 nt, synthetic construct
  source 1..20: mol_type = other RNA
ttctttatggctgcatagta

SEQ ID NO: 3777 - RNA, 20 nt, synthetic construct
  source 1..20: mol_type = other RNA
atggtagactggattaagaa

SEQ ID NO: 3778 - RNA, 20 nt, synthetic construct
  source 1..20: mol_type = other RNA
agtctaccattgatggacgt

SEQ ID NO: 3779 - RNA, 20 nt, synthetic construct
  source 1..20: mol_type = other RNA
tgctgctataaagacacatg

SEQ ID NO: 3780 - RNA, 20 nt, synthetic construct
  source 1..20: mol_type = other RNA
aaaggattataaatcatgct

SEQ ID NO: 3781 - RNA, 20 nt, synthetic construct
  source 1..20: mol_type = other RNA
tttagatatatatccagtaa

SEQ ID NO: 3782 - RNA, 20 nt, synthetic construct
  source 1..20: mol_type = other RNA
agtaattgtatggctgtgtc

SEQ ID NO: 3783 - RNA, 20 nt, synthetic construct
  source 1..20: mol_type = other RNA
ttgaggaatcaccgcactgt

SEQ ID NO: 3784 - RNA, 20 nt, synthetic construct
  source 1..20: mol_type = other RNA
ccgcactgtcttccacaatg

SEQ ID NO: 3785 - RNA, 20 nt, synthetic construct
  source 1..20: mol_type = other RNA
tctctagcatctgttgtttc

SEQ ID NO: 3786 - RNA, 20 nt, synthetic construct
  source 1..20: mol_type = other RNA
ttaaaaagtcaggaaacaac

SEQ ID NO: 3787 - RNA, 20 nt, synthetic construct
  source 1..20: mol_type = other RNA
gttgtttcctgactttttaa

SEQ ID NO: 3788 - RNA, 20 nt, synthetic construct
  source 1..20: mol_type = other RNA
cataccagttagaatggtga

SEQ ID NO: 3789 - RNA, 20 nt, synthetic construct
  source 1..20: mol_type = other RNA
ccattctaactggtatgaga

SEQ ID NO: 3790 - RNA, 20 nt, synthetic construct
  source 1..20: mol_type = other RNA
aaaccacaatgagataccat

SEQ ID NO: 3791 - RNA, 20 nt, synthetic construct
  source 1..20: mol_type = other RNA
cattgtggttttgatttgca

SEQ ID NO: 3792 - RNA, 20 nt, synthetic construct
  source 1..20: mol_type = other RNA
gagaaatgcaaatcaaaacc

SEQ ID NO: 3793 - RNA, 20 nt, synthetic construct
  source 1..20: mol_type = other RNA
ctggccatcagagaaatgca

SEQ ID NO: 3794 - RNA, 20 nt, synthetic construct
  source 1..20: mol_type = other RNA
aaaagttggcaaaggatatt

SEQ ID NO: 3795 - RNA, 20 nt, synthetic construct
  source 1..20: mol_type = other RNA
tttgccaactttttgatggg

SEQ ID NO: 3796 - RNA, 20 nt, synthetic construct
  source 1..20: mol_type = other RNA
aacaaccccatcaaaaagtt

SEQ ID NO: 3797 - RNA, 20 nt, synthetic construct
  source 1..20: mol_type = other RNA
acaaagaacataaacaaatt

SEQ ID NO: 3798 - RNA, 20 nt, synthetic construct
  source 1..20: mol_type = other RNA
agaatctacaaagaacataa

SEQ ID NO: 3799 - RNA, 20 nt, synthetic construct
  source 1..20: mol_type = other RNA
gacaaagggctaatatccag

SEQ ID NO: 3800 - RNA, 20 nt, synthetic construct
  source 1..20: mol_type = other RNA
acccatctgacaaagggcta

SEQ ID NO: 3801 - RNA, 20 nt, synthetic construct
  source 1..20: mol_type = other RNA
aattaaactaaagagcttct

SEQ ID NO: 3802 - RNA, 20 nt, synthetic construct
  source 1..20: mol_type = other RNA
cattggtcaattttggcttt

SEQ ID NO: 3803 - RNA, 20 nt, synthetic construct
  source 1..20: mol_type = other RNA
ccaaaagcaatagcaacaaa

SEQ ID NO: 3804 - RNA, 20 nt, synthetic construct
  source 1..20: mol_type = other RNA
atcttgaattaatttttata

SEQ ID NO: 3805 - RNA, 20 nt, synthetic construct
  source 1..20: mol_type = other RNA
tgaattaatttttatataag

SEQ ID NO: 3806 - RNA, 20 nt, synthetic construct
  source 1..20: mol_type = other RNA
cttccttacaccttatataa

SEQ ID NO: 3807 - RNA, 20 nt, synthetic construct
  source 1..20: mol_type = other RNA
agtttcagctttctacatat

SEQ ID NO: 3808 - RNA, 20 nt, synthetic construct
  source 1..20: mol_type = other RNA
atgacaaacctgacaaaaac

SEQ ID NO: 3809 - RNA, 20 nt, synthetic construct
  source 1..20: mol_type = other RNA
gatctatgacaaacctgaca

SEQ ID NO: 3810 - RNA, 20 nt, synthetic construct
  source 1..20: mol_type = other RNA
acaaccatctgatctatgac

SEQ ID NO: 3811 - RNA, 20 nt, synthetic construct
  source 1..20: mol_type = other RNA
gatggttgtagatgtgtggt

SEQ ID NO: 3812 - RNA, 20 nt, synthetic construct
  source 1..20: mol_type = other RNA
ctgttttggtaccagtacca

SEQ ID NO: 3813 - RNA, 20 nt, synthetic construct
  source 1..20: mol_type = other RNA
ctctgcctgacttcaaacta

SEQ ID NO: 3814 - RNA, 20 nt, synthetic construct
  source 1..20: mol_type = other RNA
taagccaaaaaagcaaagct

SEQ ID NO: 3815 - RNA, 20 nt, synthetic construct
  source 1..20: mol_type = other RNA
agctaccaatgactttcttc

SEQ ID NO: 3816 - RNA, 20 nt, synthetic construct
  source 1..20: mol_type = other RNA
ccatcaagctaccaatgact

SEQ ID NO: 3817 - RNA, 20 nt, synthetic construct
  source 1..20: mol_type = other RNA
ataaattaccttaggcagta

SEQ ID NO: 3818 - RNA, 20 nt, synthetic construct
  source 1..20: mol_type = other RNA
atattgtgaaaatggccata

SEQ ID NO: 3819 - RNA, 20 nt, synthetic construct
  source 1..20: mol_type = other RNA
atgagcatggaatgttcttc

SEQ ID NO: 3820 - RNA, 20 nt, synthetic construct
  source 1..20: mol_type = other RNA
aacttacaagggatgggaag

SEQ ID NO: 3821 - RNA, 20 nt, synthetic construct
  source 1..20: mol_type = other RNA
cttgtaagttggattcctag

SEQ ID NO: 3822 - RNA, 20 nt, synthetic construct
  source 1..20: mol_type = other RNA
atgtccctacaaaggacatg

SEQ ID NO: 3823 - RNA, 20 nt, synthetic construct
  source 1..20: mol_type = other RNA
caagcattcccatacatgac

SEQ ID NO: 3824 - RNA, 20 nt, synthetic construct
  source 1..20: mol_type = other RNA
atgtgcaaaaatcacaagca

SEQ ID NO: 3825 - RNA, 20 nt, synthetic construct
  source 1..20: mol_type = other RNA
tgagactttgctgaagttgc

SEQ ID NO: 3826 - RNA, 20 nt, synthetic construct
  source 1..20: mol_type = other RNA
ccttaagctgataagcaact

SEQ ID NO: 3827 - RNA, 20 nt, synthetic construct
  source 1..20: mol_type = other RNA
gcttaaggagattttggtct

SEQ ID NO: 3828 - RNA, 20 nt, synthetic construct
  source 1..20: mol_type = other RNA
tctcagaccaaaatctcctt

SEQ ID NO: 3829 - RNA, 20 nt, synthetic construct
  source 1..20: mol_type = other RNA
tgtcatctgcaaacagggac

SEQ ID NO: 3830 - RNA, 20 nt, synthetic construct
  source 1..20: mol_type = other RNA
gcaaacagggacaatttaac

SEQ ID NO: 3831 - RNA, 20 nt, synthetic construct
  source 1..20: mol_type = other RNA
ctgtcttgtgccagttttca

SEQ ID NO: 3832 - RNA, 20 nt, synthetic construct
  source 1..20: mol_type = other RNA
tactgaatgggcaaaaactg

SEQ ID NO: 3833 - RNA, 20 nt, synthetic construct
  source 1..20: mol_type = other RNA
caaaataataagagctattt

SEQ ID NO: 3834 - RNA, 20 nt, synthetic construct
  source 1..20: mol_type = other RNA
atacatagtttattgagagt

SEQ ID NO: 3835 - RNA, 20 nt, synthetic construct
  source 1..20: mol_type = other RNA
caatagatgcagaaaaggcc

SEQ ID NO: 3836 - RNA, 20 nt, synthetic construct
  source 1..20: mol_type = other RNA
attgagataatcatgtggtt

SEQ ID NO: 3837 - RNA, 20 nt, synthetic construct
  source 1..20: mol_type = other RNA
tgtggtttttgtctttggtt

SEQ ID NO: 3838 - RNA, 20 nt, synthetic construct
  source 1..20: mol_type = other RNA
tataaacagaaccaaagaca

SEQ ID NO: 3839 - RNA, 20 nt, synthetic construct
  source 1..20: mol_type = other RNA
atcatataaacagaaccaaa

SEQ ID NO: 3840 - RNA, 20 nt, synthetic construct
  source 1..20: mol_type = other RNA
ataaatgtaatccatcatat

SEQ ID NO: 3841 - RNA, 20 nt, synthetic construct
  source 1..20: mol_type = other RNA
ctgggatgcaaggctggttc

SEQ ID NO: 3842 - RNA, 20 nt, synthetic construct
  source 1..20: mol_type = other RNA
agttggctttatccctggga

SEQ ID NO: 3843 - RNA, 20 nt, synthetic construct
  source 1..20: mol_type = other RNA
cagggataaagccaacttga

SEQ ID NO: 3844 - RNA, 20 nt, synthetic construct
  source 1..20: mol_type = other RNA
accatgatcaagttggcttt

SEQ ID NO: 3845 - RNA, 20 nt, synthetic construct
  source 1..20: mol_type = other RNA
aaaagcttatccaccatgat

SEQ ID NO: 3846 - RNA, 20 nt, synthetic construct
  source 1..20: mol_type = other RNA
tggtggataagctttttgat

SEQ ID NO: 3847 - RNA, 20 nt, synthetic construct
  source 1..20: mol_type = other RNA
agcagcacatcaaaaagctt

SEQ ID NO: 3848 - RNA, 20 nt, synthetic construct
  source 1..20: mol_type = other RNA
tcaataaaatactggcaaac

SEQ ID NO: 3849 - RNA, 20 nt, synthetic construct
  source 1..20: mol_type = other RNA
atgatgaacattgatgcaaa

SEQ ID NO: 3850 - RNA, 20 nt, synthetic construct
  source 1..20: mol_type = other RNA
atgttcatcatggatgttgg

SEQ ID NO: 3851 - RNA, 20 nt, synthetic construct
  source 1..20: mol_type = other RNA
tggatgttggtctaaaattc

SEQ ID NO: 3852 - RNA, 20 nt, synthetic construct
  source 1..20: mol_type = other RNA
tggcagagacacaacaaaaa

SEQ ID NO: 3853 - RNA, 20 nt, synthetic construct
  source 1..20: mol_type = other RNA
tgataccaaatcctggcaga

SEQ ID NO: 3854 - RNA, 20 nt, synthetic construct
  source 1..20: mol_type = other RNA
tcctgataccaaatcctggc

SEQ ID NO: 3855 - RNA, 20 nt, synthetic construct
  source 1..20: mol_type = other RNA
ggatgatgctggcctcataa

SEQ ID NO: 3856 - RNA, 20 nt, synthetic construct
  source 1..20: mol_type = other RNA
tccctaactcattttatgag

SEQ ID NO: 3857 - RNA, 20 nt, synthetic construct
  source 1..20: mol_type = other RNA
tagaaaaagagggaatcctc

SEQ ID NO: 3858 - RNA, 20 nt, synthetic construct
  source 1..20: mol_type = other RNA
gtggtagaattcggctatga

SEQ ID NO: 3859 - RNA, 20 nt, synthetic construct
  source 1..20: mol_type = other RNA
ctcctggactttttttggtt

SEQ ID NO: 3860 - RNA, 20 nt, synthetic construct
  source 1..20: mol_type = other RNA
ttgaatagaccaataacagg

SEQ ID NO: 3861 - RNA, 20 nt, synthetic construct
  source 1..20: mol_type = other RNA
agaagaaatggaaaaattcc

SEQ ID NO: 3862 - RNA, 20 nt, synthetic construct
  source 1..20: mol_type = other RNA
gagaatattataaacacctc

SEQ ID NO: 3863 - RNA, 20 nt, synthetic construct
  source 1..20: mol_type = other RNA
cacagaaatacaaactacca

SEQ ID NO: 3864 - RNA, 20 nt, synthetic construct
  source 1..20: mol_type = other RNA
ctaccaatcccacagaaata

SEQ ID NO: 3865 - RNA, 20 nt, synthetic construct
  source 1..20: mol_type = other RNA
cctttatcattttttattgc

SEQ ID NO: 3866 - RNA, 20 nt, synthetic construct
  source 1..20: mol_type = other RNA
aatagatgcaataaaaaatg

SEQ ID NO: 3867 - RNA, 20 nt, synthetic construct
  source 1..20: mol_type = other RNA
ttttttattgcatctatttg

SEQ ID NO: 3868 - RNA, 20 nt, synthetic construct
  source 1..20: mol_type = other RNA
atttgattcttctctctttt

SEQ ID NO: 3869 - RNA, 20 nt, synthetic construct
  source 1..20: mol_type = other RNA
acaaaattgatagaccacta

SEQ ID NO: 3870 - RNA, 20 nt, synthetic construct
  source 1..20: mol_type = other RNA
attttgttgatcttttcaaa

SEQ ID NO: 3871 - RNA, 20 nt, synthetic construct
  source 1..20: mol_type = other RNA
aggagctggttttttgaaaa

SEQ ID NO: 3872 - RNA, 20 nt, synthetic construct
  source 1..20: mol_type = other RNA
tttcaaaaaaccagctcctg

SEQ ID NO: 3873 - RNA, 20 nt, synthetic construct
  source 1..20: mol_type = other RNA
atgaatccaggagctggttt

SEQ ID NO: 3874 - RNA, 20 nt, synthetic construct
  source 1..20: mol_type = other RNA
ccttcagttctgctctggtc

SEQ ID NO: 3875 - RNA, 20 nt, synthetic construct
  source 1..20: mol_type = other RNA
ccattaaaagaactagagaa

SEQ ID NO: 3876 - RNA, 20 nt, synthetic construct
  source 1..20: mol_type = other RNA
aaaattgacaccctaacatc

SEQ ID NO: 3877 - RNA, 20 nt, synthetic construct
  source 1..20: mol_type = other RNA
ttcctgctttctcttgtggg

SEQ ID NO: 3878 - RNA, 20 nt, synthetic construct
  source 1..20: mol_type = other RNA
ccccctacacactgctttaa

SEQ ID NO: 3879 - RNA, 20 nt, synthetic construct
  source 1..20: mol_type = other RNA
ctgggacacatttaaagcag

SEQ ID NO: 3880 - RNA, 20 nt, synthetic construct
  source 1..20: mol_type = other RNA
ttatttctgccttcatttcg

SEQ ID NO: 3881 - RNA, 20 nt, synthetic construct
  source 1..20: mol_type = other RNA
aactaggactcaggattaag

SEQ ID NO: 3882 - RNA, 20 nt, synthetic construct
  source 1..20: mol_type = other RNA
tgagtcctagtttgattgca

SEQ ID NO: 3883 - RNA, 20 nt, synthetic construct
  source 1..20: mol_type = other RNA
cacttattctgaaattgacc

SEQ ID NO: 3884 - RNA, 20 nt, synthetic construct
  source 1..20: mol_type = other RNA
ggtcaatttcagaataagtg

SEQ ID NO: 3885 - RNA, 20 nt, synthetic construct
  source 1..20: mol_type = other RNA
acagaatatacattcttctc

SEQ ID NO: 3886 - RNA, 20 nt, synthetic construct
  source 1..20: mol_type = other RNA
acagaactctccaccccaaa

SEQ ID NO: 3887 - RNA, 20 nt, synthetic construct
  source 1..20: mol_type = other RNA
aggaattgaactcagctctg

SEQ ID NO: 3888 - RNA, 20 nt, synthetic construct
  source 1..20: mol_type = other RNA
atgagacagaaagttaacat

SEQ ID NO: 3889 - RNA, 20 nt, synthetic construct
  source 1..20: mol_type = other RNA
atgttaactttctgtctcat

SEQ ID NO: 3890 - RNA, 20 nt, synthetic construct
  source 1..20: mol_type = other RNA
gtctaatgttgacagtgggg

SEQ ID NO: 3891 - RNA, 20 nt, synthetic construct
  source 1..20: mol_type = other RNA
aggtgctcctgtattgggtg

SEQ ID NO: 3892 - RNA, 20 nt, synthetic construct
  source 1..20: mol_type = other RNA
taaatatatatgcacccaat

SEQ ID NO: 3893 - RNA, 20 nt, synthetic construct
  source 1..20: mol_type = other RNA
aaagagacaaagaaggccat

SEQ ID NO: 3894 - RNA, 20 nt, synthetic construct
  source 1..20: mol_type = other RNA
ttgttagtttaaagtctgtt

SEQ ID NO: 3895 - RNA, 20 nt, synthetic construct
  source 1..20: mol_type = other RNA
tagtctctgataaaacagac

SEQ ID NO: 3896 - RNA, 20 nt, synthetic construct
  source 1..20: mol_type = other RNA
gagactaggattgcaacccc

SEQ ID NO: 3897 - RNA, 20 nt, synthetic construct
  source 1..20: mol_type = other RNA
accaagcaaatggaaaacaa

SEQ ID NO: 3898 - RNA, 20 nt, synthetic construct
  source 1..20: mol_type = other RNA
tcctccatccctttattttg

SEQ ID NO: 3899 - RNA, 20 nt, synthetic construct
  source 1..20: mol_type = other RNA
ctttattttgagcctatgtg

SEQ ID NO: 3900 - RNA, 20 nt, synthetic construct
  source 1..20: mol_type = other RNA
cacgtgcagagacacacata

SEQ ID NO: 3901 - RNA, 20 nt, synthetic construct
  source 1..20: mol_type = other RNA
gtgtgctgtattctgaagac

SEQ ID NO: 3902 - RNA, 20 nt, synthetic construct
  source 1..20: mol_type = other RNA
atcagtgtgctgtattctga

SEQ ID NO: 3903 - RNA, 20 nt, synthetic construct
  source 1..20: mol_type = other RNA
tgactctttatccaattttc

SEQ ID NO: 3904 - RNA, 20 nt, synthetic construct
  source 1..20: mol_type = other RNA
aattttccagtctgtgtctt

SEQ ID NO: 3905 - RNA, 20 nt, synthetic construct
  source 1..20: mol_type = other RNA
aattcacacataaaaatatt

SEQ ID NO: 3906 - RNA, 20 nt, synthetic construct
  source 1..20: mol_type = other RNA
tgatgacaggatcaaattca

SEQ ID NO: 3907 - RNA, 20 nt, synthetic construct
  source 1..20: mol_type = other RNA
tgtcatcatgatgttcgctg

SEQ ID NO: 3908 - RNA, 20 nt, synthetic construct
  source 1..20: mol_type = other RNA
tgatgttcgctggttatttt

SEQ ID NO: 3909 - RNA, 20 nt, synthetic construct
  source 1..20: mol_type = other RNA
actaatgagcaaaataacca

SEQ ID NO: 3910 - RNA, 20 nt, synthetic construct
  source 1..20: mol_type = other RNA
atgctaggaagaaactgcat

SEQ ID NO: 3911 - RNA, 20 nt, synthetic construct
  source 1..20: mol_type = other RNA
atggtttttacaatttggca

SEQ ID NO: 3912 - RNA, 20 nt, synthetic construct
  source 1..20: mol_type = other RNA
gccactgcacaaacatgcca

SEQ ID NO: 3913 - RNA, 20 nt, synthetic construct
  source 1..20: mol_type = other RNA
gtatcagccactgcacaaac

SEQ ID NO: 3914 - RNA, 20 nt, synthetic construct
  source 1..20: mol_type = other RNA
ctcagcatttgcttgtctgt

SEQ ID NO: 3915 - RNA, 20 nt, synthetic construct
  source 1..20: mol_type = other RNA
tttacagacaagcaaatgct

SEQ ID NO: 3916 - RNA, 20 nt, synthetic construct
  source 1..20: mol_type = other RNA
agccaaactaagcttcataa

SEQ ID NO: 3917 - RNA, 20 nt, synthetic construct
  source 1..20: mol_type = other RNA
tatccagccaaactaagctt

SEQ ID NO: 3918 - RNA, 20 nt, synthetic construct
  source 1..20: mol_type = other RNA
ctcagcagaaactctacaag

SEQ ID NO: 3919 - RNA, 20 nt, synthetic construct
  source 1..20: mol_type = other RNA
gactaacagcagatctctca

SEQ ID NO: 3920 - RNA, 20 nt, synthetic construct
  source 1..20: mol_type = other RNA
gctgttagtctgatgggctt

SEQ ID NO: 3921 - RNA, 20 nt, synthetic construct
  source 1..20: mol_type = other RNA
gacaattatgtgtcttggag

SEQ ID NO: 3922 - RNA, 20 nt, synthetic construct
  source 1..20: mol_type = other RNA
aggagaacttccccaaccta

SEQ ID NO: 3923 - RNA, 20 nt, synthetic construct
  source 1..20: mol_type = other RNA
tgaagagtgttttccaactt

SEQ ID NO: 3924 - RNA, 20 nt, synthetic construct
  source 1..20: mol_type = other RNA
gcttggtgtacctgaaagtg

SEQ ID NO: 3925 - RNA, 20 nt, synthetic construct
  source 1..20: mol_type = other RNA
acatctgcttggtgtacctg

SEQ ID NO: 3926 - RNA, 20 nt, synthetic construct
  source 1..20: mol_type = other RNA
aatgaatgaaatgaagcgag

SEQ ID NO: 3927 - RNA, 20 nt, synthetic construct
  source 1..20: mol_type = other RNA
gtgattaaagatcaaatgaa

SEQ ID NO: 3928 - RNA, 20 nt, synthetic construct
  source 1..20: mol_type = other RNA
ttaatcactgataccctttc

SEQ ID NO: 3929 - RNA, 20 nt, synthetic construct
  source 1..20: mol_type = other RNA
agtggaagaaagggtatcag

SEQ ID NO: 3930 - RNA, 20 nt, synthetic construct
  source 1..20: mol_type = other RNA
ctgataccctttcttccact

SEQ ID NO: 3931 - RNA, 20 nt, synthetic construct
  source 1..20: mol_type = other RNA
actactgaaacttgttcatg

SEQ ID NO: 3932 - RNA, 20 nt, synthetic construct
  source 1..20: mol_type = other RNA
aatggagctgaaaaccatgg

SEQ ID NO: 3933 - RNA, 20 nt, synthetic construct
  source 1..20: mol_type = other RNA
tttaaggtcttctctatgct

SEQ ID NO: 3934 - RNA, 20 nt, synthetic construct
  source 1..20: mol_type = other RNA
aaactttttcaaggttttta

SEQ ID NO: 3935 - RNA, 20 nt, synthetic construct
  source 1..20: mol_type = other RNA
ttctttagctcggagaaatt

SEQ ID NO: 3936 - RNA, 20 nt, synthetic construct
  source 1..20: mol_type = other RNA
gtaataacaaatttctccga

SEQ ID NO: 3937 - RNA, 20 nt, synthetic construct
  source 1..20: mol_type = other RNA
tctgaagccttcttctctca

SEQ ID NO: 3938 - RNA, 20 nt, synthetic construct
  source 1..20: mol_type = other RNA
aagtcattctctgtccagct

SEQ ID NO: 3939 - RNA, 20 nt, synthetic construct
  source 1..20: mol_type = other RNA
gggtgcctcttctcctccga

SEQ ID NO: 3940 - RNA, 20 nt, synthetic construct
  source 1..20: mol_type = other RNA
ttgtggtttatctacctttg

SEQ ID NO: 3941 - RNA, 20 nt, synthetic construct
  source 1..20: mol_type = other RNA
agaaccaaaggtagataaac

SEQ ID NO: 3942 - RNA, 20 nt, synthetic construct
  source 1..20: mol_type = other RNA
tcaagaaccaaaggtagata

SEQ ID NO: 3943 - RNA, 20 nt, synthetic construct
  source 1..20: mol_type = other RNA
acctttggttcttgatgatg

SEQ ID NO: 3944 - RNA, 20 nt, synthetic construct
  source 1..20: mol_type = other RNA
ccatcatcaagaaccaaagg

SEQ ID NO: 3945 - RNA, 20 nt, synthetic construct
  source 1..20: mol_type = other RNA
gtacatcaccatcatcaaga

SEQ ID NO: 3946 - RNA, 20 nt, synthetic construct
  source 1..20: mol_type = other RNA
acaccaaaaccccatctgta

SEQ ID NO: 3947 - RNA, 20 nt, synthetic construct
  source 1..20: mol_type = other RNA
ggcagcaacatttgctgttc

SEQ ID NO: 3948 - RNA, 20 nt, synthetic construct
  source 1..20: mol_type = other RNA
cagaggggcacccagctgta

SEQ ID NO: 3949 - RNA, 20 nt, synthetic construct
  source 1..20: mol_type = other RNA
gagaatggacagactgcctc

SEQ ID NO: 3950 - RNA, 20 nt, synthetic construct
  source 1..20: mol_type = other RNA
caaactctctgctgggagaa

SEQ ID NO: 3951 - RNA, 20 nt, synthetic construct
  source 1..20: mol_type = other RNA
ctgtctgacagctttgaaga

SEQ ID NO: 3952 - RNA, 20 nt, synthetic construct
  source 1..20: mol_type = other RNA
cagactgctgtactagcagt

SEQ ID NO: 3953 - RNA, 20 nt, synthetic construct
  source 1..20: mol_type = other RNA
tgcacatggctcagagggtc

SEQ ID NO: 3954 - RNA, 20 nt, synthetic construct
  source 1..20: mol_type = other RNA
cctggtgtgccgtttgctaa

SEQ ID NO: 3955 - RNA, 20 nt, synthetic construct
  source 1..20: mol_type = other RNA
ggacactcccaccctaatat

SEQ ID NO: 3956 - RNA, 20 nt, synthetic construct
  source 1..20: mol_type = other RNA
gtcatggcttcccttggcta

SEQ ID NO: 3957 - RNA, 20 nt, synthetic construct
  source 1..20: mol_type = other RNA
cgccttgcttcggctcactc

SEQ ID NO: 3958 - RNA, 20 nt, synthetic construct
  source 1..20: mol_type = other RNA
caccggggcttgtcagacag

SEQ ID NO: 3959 - RNA, 20 nt, synthetic construct
  source 1..20: mol_type = other RNA
tctgctttgctcatgctggg

SEQ ID NO: 3960 - RNA, 20 nt, synthetic construct
  source 1..20: mol_type = other RNA
tgagagaggggaggtttcaa

SEQ ID NO: 3961 - RNA, 20 nt, synthetic construct
  source 1..20: mol_type = other RNA
tgaaacctcccctctctcac

SEQ ID NO: 3962 - RNA, 20 nt, synthetic construct
  source 1..20: mol_type = other RNA
caaggtcccacaataggccg

SEQ ID NO: 3963 - RNA, 20 nt, synthetic construct
  source 1..20: mol_type = other RNA
gactccaatttcttcagttt

SEQ ID NO: 3964 - RNA, 20 nt, synthetic construct
  source 1..20: mol_type = other RNA
ttctttggcactggatgttt

SEQ ID NO: 3965 - RNA, 20 nt, synthetic construct
  source 1..20: mol_type = other RNA
agtgccaaagaaagatgtag

SEQ ID NO: 3966 - RNA, 20 nt, synthetic construct
  source 1..20: mol_type = other RNA
agccaaactaagctttataa

SEQ ID NO: 3967 - RNA, 20 nt, synthetic construct
  source 1..20: mol_type = other RNA
tttacaaacaagcaaatgct

SEQ ID NO: 3968 - RNA, 20 nt, synthetic construct
  source 1..20: mol_type = other RNA
acactataaagaaactgcat

SEQ ID NO: 3969 - RNA, 20 nt, synthetic construct
  source 1..20: mol_type = other RNA
actaatgggcaaaatagcca

SEQ ID NO: 3970 - RNA, 20 nt, synthetic construct
  source 1..20: mol_type = other RNA
tgtcattatgatgctagctg

SEQ ID NO: 3971 - RNA, 20 nt, synthetic construct
  source 1..20: mol_type = other RNA
taatgacaggatcaaattca

SEQ ID NO: 3972 - RNA, 20 nt, synthetic construct
  source 1..20: mol_type = other RNA
aattcacacataacaatatt

SEQ ID NO: 3973 - RNA, 20 nt, synthetic construct
  source 1..20: mol_type = other RNA
cagggtgaaaagacatacat

SEQ ID NO: 3974 - RNA, 20 nt, synthetic construct
  source 1..20: mol_type = other RNA
aagactaagattgcaaccgc

SEQ ID NO: 3975 - RNA, 20 nt, synthetic construct
  source 1..20: mol_type = other RNA
tagtctttgatgaaacagac

SEQ ID NO: 3976 - RNA, 20 nt, synthetic construct
  source 1..20: mol_type = other RNA
ttgatggtttaaagtctgtt

SEQ ID NO: 3977 - RNA, 20 nt, synthetic construct
  source 1..20: mol_type = other RNA
aagatcaaaagagacaaagg

SEQ ID NO: 3978 - RNA, 20 nt, synthetic construct
  source 1..20: mol_type = other RNA
aaagagacaaaggagggcat

SEQ ID NO: 3979 - RNA, 20 nt, synthetic construct
  source 1..20: mol_type = other RNA
tcttgttgcattgatacttt

SEQ ID NO: 3980 - RNA, 20 nt, synthetic construct
  source 1..20: mol_type = other RNA
atgcaacaagaagatctgac

SEQ ID NO: 3981 - RNA, 20 nt, synthetic construct
  source 1..20: mol_type = other RNA
gactgtcctacttatatatg

SEQ ID NO: 3982 - RNA, 20 nt, synthetic construct
  source 1..20: mol_type = other RNA
gggtgctcctgtattgggtg

SEQ ID NO: 3983 - RNA, 20 nt, synthetic construct
  source 1..20: mol_type = other RNA
aatattggctgtggggtgtt

SEQ ID NO: 3984 - RNA, 20 nt, synthetic construct
  source 1..20: mol_type = other RNA
ttgttaattttctgtcacgt

SEQ ID NO: 3985 - RNA, 20 nt, synthetic construct
  source 1..20: mol_type = other RNA
acgtgacagaaaattaacaa

SEQ ID NO: 3986 - RNA, 20 nt, synthetic construct
  source 1..20: mol_type = other RNA
acagaactcgacaccacaaa

SEQ ID NO: 3987 - RNA, 20 nt, synthetic construct
  source 1..20: mol_type = other RNA
acagaatatacattcttctc

SEQ ID NO: 3988 - RNA, 20 nt, synthetic construct
  source 1..20: mol_type = other RNA
taacaaacagtctctcagac

SEQ ID NO: 3989 - RNA, 20 nt, synthetic construct
  source 1..20: mol_type = other RNA
tgagttctagtttgattgca

SEQ ID NO: 3990 - RNA, 20 nt, synthetic construct
  source 1..20: mol_type = other RNA
aactagaactcaggattaat

SEQ ID NO: 3991 - RNA, 20 nt, synthetic construct
  source 1..20: mol_type = other RNA
acttctgccttaattttgtt

SEQ ID NO: 3992 - RNA, 20 nt, synthetic construct
  source 1..20: mol_type = other RNA
ctggtacacagctaaagcca

SEQ ID NO: 3993 - RNA, 20 nt, synthetic construct
  source 1..20: mol_type = other RNA
ttcccgctttctcctgtggg

SEQ ID NO: 3994 - RNA, 20 nt, synthetic construct
  source 1..20: mol_type = other RNA
aaaatcaacaccctaacatc

SEQ ID NO: 3995 - RNA, 20 nt, synthetic construct
  source 1..20: mol_type = other RNA
acaccctaacatcacaattc

SEQ ID NO: 3996 - RNA, 20 nt, synthetic construct
  source 1..20: mol_type = other RNA
caattcaaagaaccagagaa

SEQ ID NO: 3997 - RNA, 20 nt, synthetic construct
  source 1..20: mol_type = other RNA
tagttatttcttgtcttctg

SEQ ID NO: 3998 - RNA, 20 nt, synthetic construct
  source 1..20: mol_type = other RNA
ccttcagttctgctctgatc

SEQ ID NO: 3999 - RNA, 20 nt, synthetic construct
  source 1..20: mol_type = other RNA
gagcagaactgaaggggata

SEQ ID NO: 4000 - RNA, 20 nt, synthetic construct
  source 1..20: mol_type = other RNA
tttcaaaaaaccagctcttg

SEQ ID NO: 4001 - RNA, 20 nt, synthetic construct
  source 1..20: mol_type = other RNA
aagagctggttttttgaaaa

SEQ ID NO: 4002 - RNA, 20 nt, synthetic construct
  source 1..20: mol_type = other RNA
aatagacacaataaagaata

SEQ ID NO: 4003 - RNA, 20 nt, synthetic construct
  source 1..20: mol_type = other RNA
cctttattattctttattgt

SEQ ID NO: 4004 - RNA, 20 nt, synthetic construct
  source 1..20: mol_type = other RNA
ttggtgatatcccctttatt

SEQ ID NO: 4005 - RNA, 20 nt, synthetic construct
  source 1..20: mol_type = other RNA
ccaatgatgccacagaaata

SEQ ID NO: 4006 - RNA, 20 nt, synthetic construct
  source 1..20: mol_type = other RNA
gagaatactttaaacacctc

SEQ ID NO: 4007 - RNA, 20 nt, synthetic construct
  source 1..20: mol_type = other RNA
atttcttttagattttctat

SEQ ID NO: 4008 - RNA, 20 nt, synthetic construct
  source 1..20: mol_type = other RNA
aaaagaaatggataaattcc

SEQ ID NO: 4009 - RNA, 20 nt, synthetic construct
  source 1..20: mol_type = other RNA
ctgaatagaccaataacaag

SEQ ID NO: 4010 - RNA, 20 nt, synthetic construct
  source 1..20: mol_type = other RNA
aggcagtaattaatagctta

SEQ ID NO: 4011 - RNA, 20 nt, synthetic construct
  source 1..20: mol_type = other RNA
ctctggtctgggcttttttt

SEQ ID NO: 4012 - RNA, 20 nt, synthetic construct
  source 1..20: mol_type = other RNA
taacagaggtacaaagaaga

SEQ ID NO: 4013 - RNA, 20 nt, synthetic construct
  source 1..20: mol_type = other RNA
gaatgatgctggcctcataa

SEQ ID NO: 4014 - RNA, 20 nt, synthetic construct
  source 1..20: mol_type = other RNA
ttctgataccaaaacctggc

SEQ ID NO: 4015 - RNA, 20 nt, synthetic construct
  source 1..20: mol_type = other RNA
gggatgttggcctgaaattt

SEQ ID NO: 4016 - RNA, 20 nt, synthetic construct
  source 1..20: mol_type = other RNA
ctgatgaacatcaatgtgaa

SEQ ID NO: 4017 - RNA, 20 nt, synthetic construct
  source 1..20: mol_type = other RNA
atgtgaaaatcctcaataaa

SEQ ID NO: 4018 - RNA, 20 nt, synthetic construct
  source 1..20: mol_type = other RNA
tcaataaaatactggcaaac

SEQ ID NO: 4019 - RNA, 20 nt, synthetic construct
  source 1..20: mol_type = other RNA
agcagcacatcaaaaagctt

SEQ ID NO: 4020 - RNA, 20 nt, synthetic construct
  source 1..20: mol_type = other RNA
tggtggataagctttttgat

SEQ ID NO: 4021 - RNA, 20 nt, synthetic construct
  source 1..20: mol_type = other RNA
aaaagcttatccaccatgat

SEQ ID NO: 4022 - RNA, 20 nt, synthetic construct
  source 1..20: mol_type = other RNA
accatgatcaagttggcttc

SEQ ID NO: 4023 - RNA, 20 nt, synthetic construct
  source 1..20: mol_type = other RNA
cagggatgaagccaacttga

SEQ ID NO: 4024 - RNA, 20 nt, synthetic construct
  source 1..20: mol_type = other RNA
agttggcttcatccctggga

SEQ ID NO: 4025 - RNA, 20 nt, synthetic construct
  source 1..20: mol_type = other RNA
ctgggatgcaaggctggttc

SEQ ID NO: 4026 - RNA, 20 nt, synthetic construct
  source 1..20: mol_type = other RNA
ataaacataatccatcacat

SEQ ID NO: 4027 - RNA, 20 nt, synthetic construct
  source 1..20: mol_type = other RNA
atcacataaacagaaccaat

SEQ ID NO: 4028 - RNA, 20 nt, synthetic construct
  source 1..20: mol_type = other RNA
cataaacagaaccaatgaca

SEQ ID NO: 4029 - RNA, 20 nt, synthetic construct
  source 1..20: mol_type = other RNA
tacggtttttgtcattggtt

SEQ ID NO: 4030 - RNA, 20 nt, synthetic construct
  source 1..20: mol_type = other RNA
caatagacgcagaaaaggcc

SEQ ID NO: 4031 - RNA, 20 nt, synthetic construct
  source 1..20: mol_type = other RNA
aaggccttttctgcgtctat

SEQ ID NO: 4032 - RNA, 20 nt, synthetic construct
  source 1..20: mol_type = other RNA
tgctaaaaactcttaataaa

SEQ ID NO: 4033 - RNA, 20 nt, synthetic construct
  source 1..20: mol_type = other RNA
atacctagtttattaagagt

SEQ ID NO: 4034 - RNA, 20 nt, synthetic construct
  source 1..20: mol_type = other RNA
tactgaatgagcagaagctg

SEQ ID NO: 4035 - RNA, 20 nt, synthetic construct
  source 1..20: mol_type = other RNA
ttgtcttgtgctggttttca

SEQ ID NO: 4036 - RNA, 20 nt, synthetic construct
  source 1..20: mol_type = other RNA
ggcaagagaaagaaataaag

SEQ ID NO: 4037 - RNA, 20 nt, synthetic construct
  source 1..20: mol_type = other RNA
gcaaagagaaataatttgac

SEQ ID NO: 4038 - RNA, 20 nt, synthetic construct
  source 1..20: mol_type = other RNA
tgtcatctgcaaagagaaat

SEQ ID NO: 4039 - RNA, 20 nt, synthetic construct
  source 1..20: mol_type = other RNA
tctcagcccaaaatctcctt

SEQ ID NO: 4040 - RNA, 20 nt, synthetic construct
  source 1..20: mol_type = other RNA
cagcccaaaatctccttaag

SEQ ID NO: 4041 - RNA, 20 nt, synthetic construct
  source 1..20: mol_type = other RNA
gcttaaggagattttgggct

SEQ ID NO: 4042 - RNA, 20 nt, synthetic construct
  source 1..20: mol_type = other RNA
ccttaagctgataagcaact

SEQ ID NO: 4043 - RNA, 20 nt, synthetic construct
  source 1..20: mol_type = other RNA
tgagactttgctgaagttgc

SEQ ID NO: 4044 - RNA, 20 nt, synthetic construct
  source 1..20: mol_type = other RNA
atgtgcaaaaatcacaagca

SEQ ID NO: 4045 - RNA, 20 nt, synthetic construct
  source 1..20: mol_type = other RNA
caagcattcctatacaccaa

SEQ ID NO: 4046 - RNA, 20 nt, synthetic construct
  source 1..20: mol_type = other RNA
tgagtgaattcccattcaca

SEQ ID NO: 4047 - RNA, 20 nt, synthetic construct
  source 1..20: mol_type = other RNA
cttgtaagttggattcctag

SEQ ID NO: 4048 - RNA, 20 nt, synthetic construct
  source 1..20: mol_type = other RNA
aacttacaagggatgtgaag

SEQ ID NO: 4049 - RNA, 20 nt, synthetic construct
  source 1..20: mol_type = other RNA
tatttccttgagcagtggtt

SEQ ID NO: 4050 - RNA, 20 nt, synthetic construct
  source 1..20: mol_type = other RNA
attagcatggaatgtttttc

SEQ ID NO: 4051 - RNA, 20 nt, synthetic construct
  source 1..20: mol_type = other RNA
atattgtgaaaattgccata

SEQ ID NO: 4052 - RNA, 20 nt, synthetic construct
  source 1..20: mol_type = other RNA
ctttgggcagtatggcaatt

SEQ ID NO: 4053 - RNA, 20 nt, synthetic construct
  source 1..20: mol_type = other RNA
ataaatcactttgggcagta

SEQ ID NO: 4054 - RNA, 20 nt, synthetic construct
  source 1..20: mol_type = other RNA
atggtagcttgatggggata

SEQ ID NO: 4055 - RNA, 20 nt, synthetic construct
  source 1..20: mol_type = other RNA
ccatcaagctaccattgatt

SEQ ID NO: 4056 - RNA, 20 nt, synthetic construct
  source 1..20: mol_type = other RNA
agctaccattgatttcttca

SEQ ID NO: 4057 - RNA, 20 nt, synthetic construct
  source 1..20: mol_type = other RNA
aagacaacctaagcaaaaag

SEQ ID NO: 4058 - RNA, 20 nt, synthetic construct
  source 1..20: mol_type = other RNA
tgctatctgacttcaaaata

SEQ ID NO: 4059 - RNA, 20 nt, synthetic construct
  source 1..20: mol_type = other RNA
gacttcaaaatatactacaa

SEQ ID NO: 4060 - RNA, 20 nt, synthetic construct
  source 1..20: mol_type = other RNA
gttttggtaccagtaccata

SEQ ID NO: 4061 - RNA, 20 nt, synthetic construct
  source 1..20: mol_type = other RNA
aatagttgtagatgtgtggt

SEQ ID NO: 4062 - RNA, 20 nt, synthetic construct
  source 1..20: mol_type = other RNA
acaactattggatctttgac

SEQ ID NO: 4063 - RNA, 20 nt, synthetic construct
  source 1..20: mol_type = other RNA
ttgacaaactggacaaaaat

SEQ ID NO: 4064 - RNA, 20 nt, synthetic construct
  source 1..20: mol_type = other RNA
tttccccattgcttattttt

SEQ ID NO: 4065 - RNA, 20 nt, synthetic construct
  source 1..20: mol_type = other RNA
agtttcagttttctgcatat

SEQ ID NO: 4066 - RNA, 20 nt, synthetic construct
  source 1..20: mol_type = other RNA
cttccttacaccttatacac

SEQ ID NO: 4067 - RNA, 20 nt, synthetic construct
  source 1..20: mol_type = other RNA
tgagttaatttgtgtataag

SEQ ID NO: 4068 - RNA, 20 nt, synthetic construct
  source 1..20: mol_type = other RNA
atcttgagttaatttgtgta

SEQ ID NO: 4069 - RNA, 20 nt, synthetic construct
  source 1..20: mol_type = other RNA
acctcggcctcccaaagtgt

SEQ ID NO: 4070 - RNA, 20 nt, synthetic construct
  source 1..20: mol_type = other RNA
atccacctcggcctcccaaa

SEQ ID NO: 4071 - RNA, 20 nt, synthetic construct
  source 1..20: mol_type = other RNA
cctgacctcgtgatccatcc

SEQ ID NO: 4072 - RNA, 20 nt, synthetic construct
  source 1..20: mol_type = other RNA
cgaggtcaggagatcgagac

SEQ ID NO: 4073 - RNA, 20 nt, synthetic construct
  source 1..20: mol_type = other RNA
agaccatcttggctaacaca

SEQ ID NO: 4074 - RNA, 20 nt, synthetic construct
  source 1..20: mol_type = other RNA
tggctaacacagtgaaagcc

SEQ ID NO: 4075 - RNA, 20 nt, synthetic construct
  source 1..20: mol_type = other RNA
ctactaaaaatacaaaaaat

SEQ ID NO: 4076 - RNA, 20 nt, synthetic construct
  source 1..20: mol_type = other RNA
tggcttgctgcaagctcaac

SEQ ID NO: 4077 - RNA, 20 nt, synthetic construct
  source 1..20: mol_type = other RNA
aaaaaacaaaaacaaaaaca

SEQ ID NO: 4078 - RNA, 20 nt, synthetic construct
  source 1..20: mol_type = other RNA
aaccctagaagaaaacatag

SEQ ID NO: 4079 - RNA, 20 nt, synthetic construct
  source 1..20: mol_type = other RNA
gatttgtaaattttggcttt

SEQ ID NO: 4080 - RNA, 20 nt, synthetic construct
  source 1..20: mol_type = other RNA
gatctaattaaaataaagag

SEQ ID NO: 4081 - RNA, 20 nt, synthetic construct
  source 1..20: mol_type = other RNA
aattaaaataaagagcttct

SEQ ID NO: 4082 - RNA, 20 nt, synthetic construct
  source 1..20: mol_type = other RNA
gagtgaaaaagcaacctatg

SEQ ID NO: 4083 - RNA, 20 nt, synthetic construct
  source 1..20: mol_type = other RNA
gacaaagggctaatgtttag

SEQ ID NO: 4084 - RNA, 20 nt, synthetic construct
  source 1..20: mol_type = other RNA
tttgcccactttttgatggg

SEQ ID NO: 4085 - RNA, 20 nt, synthetic construct
  source 1..20: mol_type = other RNA
aaaagtgggcaaaggatatg

SEQ ID NO: 4086 - RNA, 20 nt, synthetic construct
  source 1..20: mol_type = other RNA
tcactgttaattagagaaat

SEQ ID NO: 4087 - RNA, 20 nt, synthetic construct
  source 1..20: mol_type = other RNA
ctgttaattagagaaatgca

SEQ ID NO: 4088 - RNA, 20 nt, synthetic construct
  source 1..20: mol_type = other RNA
cattgtggtttcgatttgca

SEQ ID NO: 4089 - RNA, 20 nt, synthetic construct
  source 1..20: mol_type = other RNA
aaaccacaatgagataccat

SEQ ID NO: 4090 - RNA, 20 nt, synthetic construct
  source 1..20: mol_type = other RNA
ccattctaacgggcatgaga

SEQ ID NO: 4091 - RNA, 20 nt, synthetic construct
  source 1..20: mol_type = other RNA
catgcccgttagaatggcga

SEQ ID NO: 4092 - RNA, 20 nt, synthetic construct
  source 1..20: mol_type = other RNA
gttgtttcctgactttttaa

SEQ ID NO: 4093 - RNA, 20 nt, synthetic construct
  source 1..20: mol_type = other RNA
ttaaaaagtcaggaaacaac

SEQ ID NO: 4094 - RNA, 20 nt, synthetic construct
  source 1..20: mol_type = other RNA
tcttcagcatctgttgtttc

SEQ ID NO: 4095 - RNA, 20 nt, synthetic construct
  source 1..20: mol_type = other RNA
ccgcactgtcttccacaatg

SEQ ID NO: 4096 - RNA, 20 nt, synthetic construct
  source 1..20: mol_type = other RNA
ttgaggaatcaccgcactgt

SEQ ID NO: 4097 - RNA, 20 nt, synthetic construct
  source 1..20: mol_type = other RNA
agaaccagaagtaccatttg

SEQ ID NO: 4098 - RNA, 20 nt, synthetic construct
  source 1..20: mol_type = other RNA
cattactgggtatataccca

SEQ ID NO: 4099 - RNA, 20 nt, synthetic construct
  source 1..20: mol_type = other RNA
tttgggtatatacccagtaa

SEQ ID NO: 4100 - RNA, 20 nt, synthetic construct
  source 1..20: mol_type = other RNA
ttctacaataaagacacatg

SEQ ID NO: 4101 - RNA, 20 nt, synthetic construct
  source 1..20: mol_type = other RNA
ttgatgggcatttcagttgg

SEQ ID NO: 4102 - RNA, 20 nt, synthetic construct
  source 1..20: mol_type = other RNA
agtctatcattgatgggcat

SEQ ID NO: 4103 - RNA, 20 nt, synthetic construct
  source 1..20: mol_type = other RNA
atgatagactggataaagaa

SEQ ID NO: 4104 - RNA, 20 nt, synthetic construct
  source 1..20: mol_type = other RNA
tgttttatggctgcatagta

SEQ ID NO: 4105 - RNA, 20 nt, synthetic construct
  source 1..20: mol_type = other RNA
atgtccctgcaaaagacatg

SEQ ID NO: 4106 - RNA, 20 nt, synthetic construct
  source 1..20: mol_type = other RNA
ttctcagcaaactaacacaa

SEQ ID NO: 4107 - RNA, 20 nt, synthetic construct
  source 1..20: mol_type = other RNA
cacacaggggcctgttgggg

SEQ ID NO: 4108 - RNA, 20 nt, synthetic construct
  source 1..20: mol_type = other RNA
ctcccctagcctcaactccc

SEQ ID NO: 4109 - RNA, 20 nt, synthetic construct
  source 1..20: mol_type = other RNA
aatccctcccctagcctcaa

SEQ ID NO: 4110 - RNA, 20 nt, synthetic construct
  source 1..20: mol_type = other RNA
acattaggtatttctcctaa

SEQ ID NO: 4111 - RNA, 20 nt, synthetic construct
  source 1..20: mol_type = other RNA
tctacattaggtatttctcc

SEQ ID NO: 4112 - RNA, 20 nt, synthetic construct
  source 1..20: mol_type = other RNA
cagaacttaaagtataataa

SEQ ID NO: 4113 - RNA, 20 nt, synthetic construct
  source 1..20: mol_type = other RNA
tattattattatactttaag

SEQ ID NO: 4114 - RNA, 20 nt, synthetic construct
  source 1..20: mol_type = other RNA
gctgccttcaggagactcat

SEQ ID NO: 4115 - RNA, 20 nt, synthetic construct
  source 1..20: mol_type = other RNA
gtgacaccacttattattat

SEQ ID NO: 4116 - RNA, 20 nt, synthetic construct
  source 1..20: mol_type = other RNA
acctccacatcagtgacacc

SEQ ID NO: 4117 - RNA, 20 nt, synthetic construct
  source 1..20: mol_type = other RNA
tccaccagcatatgataaga

SEQ ID NO: 4118 - RNA, 20 nt, synthetic construct
  source 1..20: mol_type = other RNA
tatgctggtggaagatcaaa

SEQ ID NO: 4119 - RNA, 20 nt, synthetic construct
  source 1..20: mol_type = other RNA
ttttgatcttccaccagcat

SEQ ID NO: 4120 - RNA, 20 nt, synthetic construct
  source 1..20: mol_type = other RNA
aaatgataaaacgaattaaa

SEQ ID NO: 4121 - RNA, 20 nt, synthetic construct
  source 1..20: mol_type = other RNA
gactgattttttaattcgtt

SEQ ID NO: 4122 - RNA, 20 nt, synthetic construct
  source 1..20: mol_type = other RNA
gtcagatggtttcttaaaaa

SEQ ID NO: 4123 - RNA, 20 nt, synthetic construct
  source 1..20: mol_type = other RNA
atatgcctctatcttacaaa

SEQ ID NO: 4124 - RNA, 20 nt, synthetic construct
  source 1..20: mol_type = other RNA
tacaaacctgcaattctatt

SEQ ID NO: 4125 - RNA, 20 nt, synthetic construct
  source 1..20: mol_type = other RNA
ttatcccaaggaaatgaaaa

SEQ ID NO: 4126 - RNA, 20 nt, synthetic construct
  source 1..20: mol_type = other RNA
caaggaaatgaaaaagtaag

SEQ ID NO: 4127 - RNA, 20 nt, synthetic construct
  source 1..20: mol_type = other RNA
ataacaaaatgaaaaaataa

SEQ ID NO: 4128 - RNA, 20 nt, synthetic construct
  source 1..20: mol_type = other RNA
ccacacggaacatttctgtg

SEQ ID NO: 4129 - RNA, 20 nt, synthetic construct
  source 1..20: mol_type = other RNA
acacctatacctgtggagcc

SEQ ID NO: 4130 - RNA, 20 nt, synthetic construct
  source 1..20: mol_type = other RNA
aaaatcatcaaaaaaacaac

SEQ ID NO: 4131 - RNA, 20 nt, synthetic construct
  source 1..20: mol_type = other RNA
gcaatgttgtttttttgatg

SEQ ID NO: 4132 - RNA, 20 nt, synthetic construct
  source 1..20: mol_type = other RNA
tcaaaaaaacaacattgcag

SEQ ID NO: 4133 - RNA, 20 nt, synthetic construct
  source 1..20: mol_type = other RNA
aaaaaacaacattgcagatc

SEQ ID NO: 4134 - RNA, 20 nt, synthetic construct
  source 1..20: mol_type = other RNA
gtgcatctcactctgtggga

SEQ ID NO: 4135 - RNA, 20 nt, synthetic construct
  source 1..20: mol_type = other RNA
cactctgtgggaaagtatat

SEQ ID NO: 4136 - RNA, 20 nt, synthetic construct
  source 1..20: mol_type = other RNA
caactgtaaaaagggcagaa

SEQ ID NO: 4137 - RNA, 20 nt, synthetic construct
  source 1..20: mol_type = other RNA
agttgcttggagaaccagct

SEQ ID NO: 4138 - RNA, 20 nt, synthetic construct
  source 1..20: mol_type = other RNA
tcagattactaacctgcagc

SEQ ID NO: 4139 - RNA, 20 nt, synthetic construct
  source 1..20: mol_type = other RNA
gaggattctgacaagttggg

SEQ ID NO: 4140 - RNA, 20 nt, synthetic construct
  source 1..20: mol_type = other RNA
tagagaatgcactcccattc

SEQ ID NO: 4141 - RNA, 20 nt, synthetic construct
  source 1..20: mol_type = other RNA
ctccaccccagggtccttgc

SEQ ID NO: 4142 - RNA, 20 nt, synthetic construct
  source 1..20: mol_type = other RNA
gaagaggtcgagtggctaca

SEQ ID NO: 4143 - RNA, 20 nt, synthetic construct
  source 1..20: mol_type = other RNA
cattgtctacccagccatcg

SEQ ID NO: 4144 - RNA, 20 nt, synthetic construct
  source 1..20: mol_type = other RNA
ccctttatgacttgggtccc

SEQ ID NO: 4145 - RNA, 20 nt, synthetic construct
  source 1..20: mol_type = other RNA
catcctccattccctcagtt

SEQ ID NO: 4146 - RNA, 20 nt, synthetic construct
  source 1..20: mol_type = other RNA
tccattccctcagtttcgga

SEQ ID NO: 4147 - RNA, 20 nt, synthetic construct
  source 1..20: mol_type = other RNA
tctgctagcggcagccactc

SEQ ID NO: 4148 - RNA, 20 nt, synthetic construct
  source 1..20: mol_type = other RNA
tagagaaatggcatcctgtc

SEQ ID NO: 4149 - RNA, 20 nt, synthetic construct
  source 1..20: mol_type = other RNA
tgtctgggagctagtttttt

SEQ ID NO: 4150 - RNA, 20 nt, synthetic construct
  source 1..20: mol_type = other RNA
agtgtgtctggctttacaag

SEQ ID NO: 4151 - RNA, 20 nt, synthetic construct
  source 1..20: mol_type = other RNA
acctggtatgttatttacag

SEQ ID NO: 4152 - RNA, 20 nt, synthetic construct
  source 1..20: mol_type = other RNA
aacatgataccattcccagg

SEQ ID NO: 4153 - RNA, 20 nt, synthetic construct
  source 1..20: mol_type = other RNA
tgttggatgttgtttcttcc

SEQ ID NO: 4154 - RNA, 20 nt, synthetic construct
  source 1..20: mol_type = other RNA
gttacaatttacatgttact

SEQ ID NO: 4155 - RNA, 20 nt, synthetic construct
  source 1..20: mol_type = other RNA
gtctcattctctgtgtctct

SEQ ID NO: 4156 - RNA, 20 nt, synthetic construct
  source 1..20: mol_type = other RNA
aaggccaggcgcagtggctc

SEQ ID NO: 4157 - RNA, 20 nt, synthetic construct
  source 1..20: mol_type = other RNA
cagcactttgggaggccgag

SEQ ID NO: 4158 - RNA, 20 nt, synthetic construct
  source 1..20: mol_type = other RNA
acccacctcggcctcccaaa

SEQ ID NO: 4159 - RNA, 20 nt, synthetic construct
  source 1..20: mol_type = other RNA
cctgacctcgtgatccaccc

SEQ ID NO: 4160 - RNA, 20 nt, synthetic construct
  source 1..20: mol_type = other RNA
cgaggtcaggagattgagac

SEQ ID NO: 4161 - RNA, 20 nt, synthetic construct
  source 1..20: mol_type = other RNA
tggctaacacggtgaaaccc

SEQ ID NO: 4162 - RNA, 20 nt, synthetic construct
  source 1..20: mol_type = other RNA
cggctcactgcaaggtctgc

SEQ ID NO: 4163 - RNA, 20 nt, synthetic construct
  source 1..20: mol_type = other RNA
aaaatgcactcttcaaaatc

SEQ ID NO: 4164 - RNA, 20 nt, synthetic construct
  source 1..20: mol_type = other RNA
atgtcatttattctggagga

SEQ ID NO: 4165 - RNA, 20 nt, synthetic construct
  source 1..20: mol_type = other RNA
tcctccttctgccaactgca

SEQ ID NO: 4166 - RNA, 20 nt, synthetic construct
  source 1..20: mol_type = other RNA
tacataaatgtatacaagaa

SEQ ID NO: 4167 - RNA, 20 nt, synthetic construct
  source 1..20: mol_type = other RNA
ataaaaaaactgagatcata

SEQ ID NO: 4168 - RNA, 20 nt, synthetic construct
  source 1..20: mol_type = other RNA
cagtttttttatggatcata

SEQ ID NO: 4169 - RNA, 20 nt, synthetic construct
  source 1..20: mol_type = other RNA
aaattggtctatgatccata

SEQ ID NO: 4170 - RNA, 20 nt, synthetic construct
  source 1..20: mol_type = other RNA
tagaccaattttgatatttt

SEQ ID NO: 4171 - RNA, 20 nt, synthetic construct
  source 1..20: mol_type = other RNA
atcttggaaatttacatggt

SEQ ID NO: 4172 - RNA, 20 nt, synthetic construct
  source 1..20: mol_type = other RNA
tggaaatttacatggttctt

SEQ ID NO: 4173 - RNA, 20 nt, synthetic construct
  source 1..20: mol_type = other RNA
agattctgggaaacaaccct

SEQ ID NO: 4174 - RNA, 20 nt, synthetic construct
  source 1..20: mol_type = other RNA
gttgtgtaacaccagggttg

SEQ ID NO: 4175 - RNA, 20 nt, synthetic construct
  source 1..20: mol_type = other RNA
gtgtgtgaggtgggagtact

SEQ ID NO: 4176 - RNA, 20 nt, synthetic construct
  source 1..20: mol_type = other RNA
caatgttcaaatgtgtagat

SEQ ID NO: 4177 - RNA, 20 nt, synthetic construct
  source 1..20: mol_type = other RNA
acacatttgaacattgggat

SEQ ID NO: 4178 - RNA, 20 nt, synthetic construct
  source 1..20: mol_type = other RNA
cttttcatcccaatgttcaa

SEQ ID NO: 4179 - RNA, 20 nt, synthetic construct
  source 1..20: mol_type = other RNA
gtcagattttccatctcttt

SEQ ID NO: 4180 - RNA, 20 nt, synthetic construct
  source 1..20: mol_type = other RNA
gactgatgcagaagccttcc

SEQ ID NO: 4181 - RNA, 20 nt, synthetic construct
  source 1..20: mol_type = other RNA
cggtgttccagacaaaattc

SEQ ID NO: 4182 - RNA, 20 nt, synthetic construct
  source 1..20: mol_type = other RNA
ggccaaatttgtgccaaatt

SEQ ID NO: 4183 - RNA, 20 nt, synthetic construct
  source 1..20: mol_type = other RNA
tcagcattgcagttgctgag

SEQ ID NO: 4184 - RNA, 20 nt, synthetic construct
  source 1..20: mol_type = other RNA
tattaggtttccccaggatg

SEQ ID NO: 4185 - RNA, 20 nt, synthetic construct
  source 1..20: mol_type = other RNA
tcatattaggtttccccagg

SEQ ID NO: 4186 - RNA, 20 nt, synthetic construct
  source 1..20: mol_type = other RNA
tggggaaacctaatatgatg

SEQ ID NO: 4187 - RNA, 20 nt, synthetic construct
  source 1..20: mol_type = other RNA
aatcctggggctatttggca

SEQ ID NO: 4188 - RNA, 20 nt, synthetic construct
  source 1..20: mol_type = other RNA
tggggctatttggcagtaaa

SEQ ID NO: 4189 - RNA, 20 nt, synthetic construct
  source 1..20: mol_type = other RNA
ttggtgtgtgttgagaggaa

SEQ ID NO: 4190 - RNA, 20 nt, synthetic construct
  source 1..20: mol_type = other RNA
tgcattgcaacaaagcagaa

SEQ ID NO: 4191 - RNA, 20 nt, synthetic construct
  source 1..20: mol_type = other RNA
tcttgttccagcatcctgca

SEQ ID NO: 4192 - RNA, 20 nt, synthetic construct
  source 1..20: mol_type = other RNA
tattcccttacagtagagac

SEQ ID NO: 4193 - RNA, 20 nt, synthetic construct
  source 1..20: mol_type = other RNA
ttctctaagaagcaatgtgt

SEQ ID NO: 4194 - RNA, 20 nt, synthetic construct
  source 1..20: mol_type = other RNA
agtacttggaggcaaagaca

SEQ ID NO: 4195 - RNA, 20 nt, synthetic construct
  source 1..20: mol_type = other RNA
tctagggaactgtgcagggt

SEQ ID NO: 4196 - RNA, 20 nt, synthetic construct
  source 1..20: mol_type = other RNA
agggaactgtgcagggtttt

SEQ ID NO: 4197 - RNA, 20 nt, synthetic construct
  source 1..20: mol_type = other RNA
ccatacagcctgcataacct

SEQ ID NO: 4198 - RNA, 20 nt, synthetic construct
  source 1..20: mol_type = other RNA
atcatcgtctggtttcctgc

SEQ ID NO: 4199 - RNA, 20 nt, synthetic construct
  source 1..20: mol_type = other RNA
tcgtctggtttcctgcctca

SEQ ID NO: 4200 - RNA, 20 nt, synthetic construct
  source 1..20: mol_type = other RNA
tctggtttcctgcctcattg

SEQ ID NO: 4201 - RNA, 20 nt, synthetic construct
  source 1..20: mol_type = other RNA
gtgctcttacaattggaaca

SEQ ID NO: 4202 - RNA, 20 nt, synthetic construct
  source 1..20: mol_type = other RNA
attgtttttgcttcagcatg

SEQ ID NO: 4203 - RNA, 20 nt, synthetic construct
  source 1..20: mol_type = other RNA
agctgagtaactactagtat

SEQ ID NO: 4204 - RNA, 20 nt, synthetic construct
  source 1..20: mol_type = other RNA
aggcacattctccaccactg

SEQ ID NO: 4205 - RNA, 20 nt, synthetic construct
  source 1..20: mol_type = other RNA
tggtcatccatgacaccaca

SEQ ID NO: 4206 - RNA, 20 nt, synthetic construct
  source 1..20: mol_type = other RNA
atgacaccacaccggcatca

SEQ ID NO: 4207 - RNA, 20 nt, synthetic construct
  source 1..20: mol_type = other RNA
gaggaccccagaaaactacc

SEQ ID NO: 4208 - RNA, 20 nt, synthetic construct
  source 1..20: mol_type = other RNA
aagacatactcatttgggta

SEQ ID NO: 4209 - RNA, 20 nt, synthetic construct
  source 1..20: mol_type = other RNA
aaagcaaagttgtctggaca

SEQ ID NO: 4210 - RNA, 20 nt, synthetic construct
  source 1..20: mol_type = other RNA
aagagtctgagagaataggt

SEQ ID NO: 4211 - RNA, 20 nt, synthetic construct
  source 1..20: mol_type = other RNA
gactattagaaaagatagca

SEQ ID NO: 4212 - RNA, 20 nt, synthetic construct
  source 1..20: mol_type = other RNA
tttctaatagtctgatggaa

SEQ ID NO: 4213 - RNA, 20 nt, synthetic construct
  source 1..20: mol_type = other RNA
gctccatgtagccttctgct

SEQ ID NO: 4214 - RNA, 20 nt, synthetic construct
  source 1..20: mol_type = other RNA
cttgagctttatattaaaaa

SEQ ID NO: 4215 - RNA, 20 nt, synthetic construct
  source 1..20: mol_type = other RNA
tttgatctcttgagctttat

SEQ ID NO: 4216 - RNA, 20 nt, synthetic construct
  source 1..20: mol_type = other RNA
aatgatcaaatacttagagt

SEQ ID NO: 4217 - RNA, 20 nt, synthetic construct
  source 1..20: mol_type = other RNA
aatacttagagtgccattct

SEQ ID NO: 4218 - RNA, 20 nt, synthetic construct
  source 1..20: mol_type = other RNA
tttatgagccttgtagaatg

SEQ ID NO: 4219 - RNA, 20 nt, synthetic construct
  source 1..20: mol_type = other RNA
atgcactctttcacccatgc

SEQ ID NO: 4220 - RNA, 20 nt, synthetic construct
  source 1..20: mol_type = other RNA
ttctaacctcccttctctga

SEQ ID NO: 4221 - RNA, 20 nt, synthetic construct
  source 1..20: mol_type = other RNA
gtcagggacagacataaaaa

SEQ ID NO: 4222 - RNA, 20 nt, synthetic construct
  source 1..20: mol_type = other RNA
cttcagaaaactggagctta

SEQ ID NO: 4223 - RNA, 20 nt, synthetic construct
  source 1..20: mol_type = other RNA
acattcttgcttttgctctt

SEQ ID NO: 4224 - RNA, 20 nt, synthetic construct
  source 1..20: mol_type = other RNA
gtttacttcctaattctcat

SEQ ID NO: 4225 - RNA, 20 nt, synthetic construct
  source 1..20: mol_type = other RNA
ccatatctgtttacttccta

SEQ ID NO: 4226 - RNA, 20 nt, synthetic construct
  source 1..20: mol_type = other RNA
tttatagtcatttatggcag

SEQ ID NO: 4227 - RNA, 20 nt, synthetic construct
  source 1..20: mol_type = other RNA
cagtcctgtactgtctcttg

SEQ ID NO: 4228 - RNA, 20 nt, synthetic construct
  source 1..20: mol_type = other RNA
caaactccagtctctttcct

SEQ ID NO: 4229 - RNA, 20 nt, synthetic construct
  source 1..20: mol_type = other RNA
cccagtgctacgtgagctct

SEQ ID NO: 4230 - RNA, 20 nt, synthetic construct
  source 1..20: mol_type = other RNA
gaaccccggtatcccccagt

SEQ ID NO: 4231 - RNA, 20 nt, synthetic construct
  source 1..20: mol_type = other RNA
gcccgaggagagacacctca

SEQ ID NO: 4232 - RNA, 20 nt, synthetic construct
  source 1..20: mol_type = other RNA
cgggcattcagtagagaccc

SEQ ID NO: 4233 - RNA, 20 nt, synthetic construct
  source 1..20: mol_type = other RNA
tactcctaaagtatgacttt

SEQ ID NO: 4234 - RNA, 20 nt, synthetic construct
  source 1..20: mol_type = other RNA
tttgggtccttttagacttg

SEQ ID NO: 4235 - RNA, 20 nt, synthetic construct
  source 1..20: mol_type = other RNA
ccaagtaaattaactgcctg

SEQ ID NO: 4236 - RNA, 20 nt, synthetic construct
  source 1..20: mol_type = other RNA
tgttatttacctccagtgat

SEQ ID NO: 4237 - RNA, 20 nt, synthetic construct
  source 1..20: mol_type = other RNA
ctggaggtaaataacatgat

SEQ ID NO: 4238 - RNA, 20 nt, synthetic construct
  source 1..20: mol_type = other RNA
tttaaaaatttatgaggcag

SEQ ID NO: 4239 - RNA, 20 nt, synthetic construct
  source 1..20: mol_type = other RNA
cactaattgctttttcctgc

SEQ ID NO: 4240 - RNA, 20 nt, synthetic construct
  source 1..20: mol_type = other RNA
ataactaggagaaaaaccag

SEQ ID NO: 4241 - RNA, 20 nt, synthetic construct
  source 1..20: mol_type = other RNA
tttctactatttcttggtct

SEQ ID NO: 4242 - RNA, 20 nt, synthetic construct
  source 1..20: mol_type = other RNA
tatatacagttttaatttct

SEQ ID NO: 4243 - RNA, 20 nt, synthetic construct
  source 1..20: mol_type = other RNA
ttgaacacaattatcatata

SEQ ID NO: 4244 - RNA, 20 nt, synthetic construct
  source 1..20: mol_type = other RNA
agtgagtattttattaaggt

SEQ ID NO: 4245 - RNA, 20 nt, synthetic construct
  source 1..20: mol_type = other RNA
tctggttcactttttcttct

SEQ ID NO: 4246 - RNA, 20 nt, synthetic construct
  source 1..20: mol_type = other RNA
gtaagacacacacacacgca

SEQ ID NO: 4247 - RNA, 20 nt, synthetic construct
  source 1..20: mol_type = other RNA
ttaaggttctatttattttt

SEQ ID NO: 4248 - RNA, 20 nt, synthetic construct
  source 1..20: mol_type = other RNA
tttgctattttcactgatat

SEQ ID NO: 4249 - RNA, 20 nt, synthetic construct
  source 1..20: mol_type = other RNA
gtgaaaatagcaaaagattt

SEQ ID NO: 4250 - RNA, 20 nt, synthetic construct
  source 1..20: mol_type = other RNA
ccttcccgtccttctgtgac

SEQ ID NO: 4251 - RNA, 20 nt, synthetic construct
  source 1..20: mol_type = other RNA
ttgctttgagtatttttttc

SEQ ID NO: 4252 - RNA, 20 nt, synthetic construct
  source 1..20: mol_type = other RNA
ttttcttcatacgtgtaaag

SEQ ID NO: 4253 - RNA, 20 nt, synthetic construct
  source 1..20: mol_type = other RNA
gaaatagtatttttaaaagc

SEQ ID NO: 4254 - RNA, 20 nt, synthetic construct
  source 1..20: mol_type = other RNA
tagagttttgcttttaaaaa

SEQ ID NO: 4255 - RNA, 20 nt, synthetic construct
  source 1..20: mol_type = other RNA
ataatgtacccaagtaaatc

SEQ ID NO: 4256 - RNA, 20 nt, synthetic construct
  source 1..20: mol_type = other RNA
ttgatgttggacgatttatc

SEQ ID NO: 4257 - RNA, 20 nt, synthetic construct
  source 1..20: mol_type = other RNA
ttgttatctttgatgttgga

SEQ ID NO: 4258 - RNA, 20 nt, synthetic construct
  source 1..20: mol_type = other RNA
tccaacatcaaagataacaa

SEQ ID NO: 4259 - RNA, 20 nt, synthetic construct
  source 1..20: mol_type = other RNA
aagataacaaggataatctt

SEQ ID NO: 4260 - RNA, 20 nt, synthetic construct
  source 1..20: mol_type = other RNA
tataagccagaggaaaacaa

SEQ ID NO: 4261 - RNA, 20 nt, synthetic construct
  source 1..20: mol_type = other RNA
tttacatagagggacagtaa

SEQ ID NO: 4262 - RNA, 20 nt, synthetic construct
  source 1..20: mol_type = other RNA
gtcactttcattactgtccc

SEQ ID NO: 4263 - RNA, 20 nt, synthetic construct
  source 1..20: mol_type = other RNA
ctttaaagatgttatgccat

SEQ ID NO: 4264 - RNA, 20 nt, synthetic construct
  source 1..20: mol_type = other RNA
ttaaagtgataaagagaaat

SEQ ID NO: 4265 - RNA, 20 nt, synthetic construct
  source 1..20: mol_type = other RNA
gtttttatttctctttatca

SEQ ID NO: 4266 - RNA, 20 nt, synthetic construct
  source 1..20: mol_type = other RNA
acctaggacgacatgtccag

SEQ ID NO: 4267 - RNA, 20 nt, synthetic construct
  source 1..20: mol_type = other RNA
cgtttattttaaagggtttt

SEQ ID NO: 4268 - RNA, 20 nt, synthetic construct
  source 1..20: mol_type = other RNA
tttaatacagaagcctgcct

SEQ ID NO: 4269 - RNA, 20 nt, synthetic construct
  source 1..20: mol_type = other RNA
ggtattatttttcttctacc

SEQ ID NO: 4270 - RNA, 20 nt, synthetic construct
  source 1..20: mol_type = other RNA
atactaagtaatgaagagcc

SEQ ID NO: 4271 - RNA, 20 nt, synthetic construct
  source 1..20: mol_type = other RNA
aatttttaaatgtatttaaa

SEQ ID NO: 4272 - RNA, 20 nt, synthetic construct
  source 1..20: mol_type = other RNA
caaattgtcctttaaataca

SEQ ID NO: 4273 - RNA, 20 nt, synthetic construct
  source 1..20: mol_type = other RNA
gcattatttgtgctactgtt

SEQ ID NO: 4274 - RNA, 20 nt, synthetic construct
  source 1..20: mol_type = other RNA
tctgcattatttgtgctact

SEQ ID NO: 4275 - RNA, 20 nt, synthetic construct
  source 1..20: mol_type = other RNA
atgaagttatataatattaa

SEQ ID NO: 4276 - RNA, 20 nt, synthetic construct
  source 1..20: mol_type = other RNA
attaatattatataacttca

SEQ ID NO: 4277 - RNA, 20 nt, synthetic construct
  source 1..20: mol_type = other RNA
cattcaaccatctattaata

SEQ ID NO: 4278 - RNA, 20 nt, synthetic construct
  source 1..20: mol_type = other RNA
caccttaaactatcacattc

SEQ ID NO: 4279 - RNA, 20 nt, synthetic construct
  source 1..20: mol_type = other RNA
taggacaaccaaaaaaattt

SEQ ID NO: 4280 - RNA, 20 nt, synthetic construct
  source 1..20: mol_type = other RNA
attcctctcagtttaaattt

SEQ ID NO: 4281 - RNA, 20 nt, synthetic construct
  source 1..20: mol_type = other RNA
tttatattctttattcctct

SEQ ID NO: 4282 - RNA, 20 nt, synthetic construct
  source 1..20: mol_type = other RNA
ttttatatttaatatactca

SEQ ID NO: 4283 - RNA, 20 nt, synthetic construct
  source 1..20: mol_type = other RNA
ctgccttttatttgtaatgc

SEQ ID NO: 4284 - RNA, 20 nt, synthetic construct
  source 1..20: mol_type = other RNA
ttacacttaaagagtattta

SEQ ID NO: 4285 - RNA, 20 nt, synthetic construct
  source 1..20: mol_type = other RNA
actttaaacaccaaaatatg

SEQ ID NO: 4286 - RNA, 20 nt, synthetic construct
  source 1..20: mol_type = other RNA
tttttcatattttggtgttt

SEQ ID NO: 4287 - RNA, 20 nt, synthetic construct
  source 1..20: mol_type = other RNA
ccactccagcttatttatga

SEQ ID NO: 4288 - RNA, 20 nt, synthetic construct
  source 1..20: mol_type = other RNA
taaataagctggagtggtga

SEQ ID NO: 4289 - RNA, 20 nt, synthetic construct
  source 1..20: mol_type = other RNA
attaatcaccactccagctt

SEQ ID NO: 4290 - RNA, 20 nt, synthetic construct
  source 1..20: mol_type = other RNA
tagcatgtatacagaaaaag

SEQ ID NO: 4291 - RNA, 20 nt, synthetic construct
  source 1..20: mol_type = other RNA
tttggaaaattaaagtttta

SEQ ID NO: 4292 - RNA, 20 nt, synthetic construct
  source 1..20: mol_type = other RNA
ctgacaatagtatcaaaacc

SEQ ID NO: 4293 - RNA, 20 nt, synthetic construct
  source 1..20: mol_type = other RNA
ctaaatattttttggttttg

SEQ ID NO: 4294 - RNA, 20 nt, synthetic construct
  source 1..20: mol_type = other RNA
aaaccaaaaaatatttagtg

SEQ ID NO: 4295 - RNA, 20 nt, synthetic construct
  source 1..20: mol_type = other RNA
tttaattctttcctcaacat

SEQ ID NO: 4296 - RNA, 20 nt, synthetic construct
  source 1..20: mol_type = other RNA
ataagcatggtgtatattta

SEQ ID NO: 4297 - RNA, 20 nt, synthetic construct
  source 1..20: mol_type = other RNA
aaatatacaccatgcttata

SEQ ID NO: 4298 - RNA, 20 nt, synthetic construct
  source 1..20: mol_type = other RNA
atttcacgagaactgatatg

SEQ ID NO: 4299 - RNA, 20 nt, synthetic construct
  source 1..20: mol_type = other RNA
gttctcgtgaaattgatctt

SEQ ID NO: 4300 - RNA, 20 nt, synthetic construct
  source 1..20: mol_type = other RNA
aaagatcaatttcacgagaa

SEQ ID NO: 4301 - RNA, 20 nt, synthetic construct
  source 1..20: mol_type = other RNA
ttggatgaaacccacaccca

SEQ ID NO: 4302 - RNA, 20 nt, synthetic construct
  source 1..20: mol_type = other RNA
agacatgtggtattggcctg

SEQ ID NO: 4303 - RNA, 20 nt, synthetic construct
  source 1..20: mol_type = other RNA
tccagactcagcctcccaaa

SEQ ID NO: 4304 - RNA, 20 nt, synthetic construct
  source 1..20: mol_type = other RNA
gggctcaagccatcctccag

SEQ ID NO: 4305 - RNA, 20 nt, synthetic construct
  source 1..20: mol_type = other RNA
aattgtttattttttgtaga

SEQ ID NO: 4306 - RNA, 20 nt, synthetic construct
  source 1..20: mol_type = other RNA
atctaattgtttattttttg

SEQ ID NO: 4307 - RNA, 20 nt, synthetic construct
  source 1..20: mol_type = other RNA
catcgatctaattgtttatt

SEQ ID NO: 4308 - RNA, 20 nt, synthetic construct
  source 1..20: mol_type = other RNA
atgtgatgacttgcacatgt

SEQ ID NO: 4309 - RNA, 20 nt, synthetic construct
  source 1..20: mol_type = other RNA
tctcacctcagcattccgag

SEQ ID NO: 4310 - RNA, 20 nt, synthetic construct
  source 1..20: mol_type = other RNA
atgctcactcatggctagac

SEQ ID NO: 4311 - RNA, 20 nt, synthetic construct
  source 1..20: mol_type = other RNA
aggctggaatgcagaggcat

SEQ ID NO: 4312 - RNA, 20 nt, synthetic construct
  source 1..20: mol_type = other RNA
tgcctctgcattccagcctg

SEQ ID NO: 4313 - RNA, 20 nt, synthetic construct
  source 1..20: mol_type = other RNA
tccaggctggaatgcagagg

SEQ ID NO: 4314 - RNA, 20 nt, synthetic construct
  source 1..20: mol_type = other RNA
ttttttttttttttttttga

SEQ ID NO: 4315 - RNA, 20 nt, synthetic construct
  source 1..20: mol_type = other RNA
ctttttaggtttgcatactt

SEQ ID NO: 4316 - RNA, 20 nt, synthetic construct
  source 1..20: mol_type = other RNA
atttaccatatatgtatgtg

SEQ ID NO: 4317 - RNA, 20 nt, synthetic construct
  source 1..20: mol_type = other RNA
atacggaaaatccatttacc

SEQ ID NO: 4318 - RNA, 20 nt, synthetic construct
  source 1..20: mol_type = other RNA
aaatggttcagaatgatttt

SEQ ID NO: 4319 - RNA, 20 nt, synthetic construct
  source 1..20: mol_type = other RNA
ttctgaaccatttggatatc

SEQ ID NO: 4320 - RNA, 20 nt, synthetic construct
  source 1..20: mol_type = other RNA
tggatatccaaatggttcag

SEQ ID NO: 4321 - RNA, 20 nt, synthetic construct
  source 1..20: mol_type = other RNA
atgatacaaaacaaaagcag

SEQ ID NO: 4322 - RNA, 20 nt, synthetic construct
  source 1..20: mol_type = other RNA
aaataatttgagatgaaaag

SEQ ID NO: 4323 - RNA, 20 nt, synthetic construct
  source 1..20: mol_type = other RNA
caaattattttgatatctct

SEQ ID NO: 4324 - RNA, 20 nt, synthetic construct
  source 1..20: mol_type = other RNA
cttccacctaagtgtcagag

SEQ ID NO: 4325 - RNA, 20 nt, synthetic construct
  source 1..20: mol_type = other RNA
tcacaaccttggagaaggca

SEQ ID NO: 4326 - RNA, 20 nt, synthetic construct
  source 1..20: mol_type = other RNA
gacaaatggcttgtgtccag

SEQ ID NO: 4327 - RNA, 20 nt, synthetic construct
  source 1..20: mol_type = other RNA
gttgcccattagttgtttgt

SEQ ID NO: 4328 - RNA, 20 nt, synthetic construct
  source 1..20: mol_type = other RNA
ccaagaaatgcctattcaat

SEQ ID NO: 4329 - RNA, 20 nt, synthetic construct
  source 1..20: mol_type = other RNA
atccccaagaaatgcctatt

SEQ ID NO: 4330 - RNA, 20 nt, synthetic construct
  source 1..20: mol_type = other RNA
atctatccccaagaaatgcc

SEQ ID NO: 4331 - RNA, 20 nt, synthetic construct
  source 1..20: mol_type = other RNA
cagccatgaaaaataaagag

SEQ ID NO: 4332 - RNA, 20 nt, synthetic construct
  source 1..20: mol_type = other RNA
catgatgattataactcttt

SEQ ID NO: 4333 - RNA, 20 nt, synthetic construct
  source 1..20: mol_type = other RNA
tcatgagatgtcaccaaaca

SEQ ID NO: 4334 - RNA, 20 nt, synthetic construct
  source 1..20: mol_type = other RNA
tgagatgtcaccaaacaccc

SEQ ID NO: 4335 - RNA, 20 nt, synthetic construct
  source 1..20: mol_type = other RNA
atgtccattgggtgtttggt

SEQ ID NO: 4336 - RNA, 20 nt, synthetic construct
  source 1..20: mol_type = other RNA
gttactgtggtgtcttctta

SEQ ID NO: 4337 - RNA, 20 nt, synthetic construct
  source 1..20: mol_type = other RNA
gtgacatcagttactgtggt

SEQ ID NO: 4338 - RNA, 20 nt, synthetic construct
  source 1..20: mol_type = other RNA
ttgctctacatcagtgacat

SEQ ID NO: 4339 - RNA, 20 nt, synthetic construct
  source 1..20: mol_type = other RNA
ttttgcactttcaccagcat

SEQ ID NO: 4340 - RNA, 20 nt, synthetic construct
  source 1..20: mol_type = other RNA
gactgatttcaaaagtggtt

SEQ ID NO: 4341 - RNA, 20 nt, synthetic construct
  source 1..20: mol_type = other RNA
gtctgatagtttctccaaaa

SEQ ID NO: 4342 - RNA, 20 nt, synthetic construct
  source 1..20: mol_type = other RNA
tgtttgtgaatatttacccc

SEQ ID NO: 4343 - RNA, 20 nt, synthetic construct
  source 1..20: mol_type = other RNA
ccaagaatattcatagcagc

SEQ ID NO: 4344 - RNA, 20 nt, synthetic construct
  source 1..20: mol_type = other RNA
ataagaaaatgaataaataa

SEQ ID NO: 4345 - RNA, 20 nt, synthetic construct
  source 1..20: mol_type = other RNA
aaaacatgctcccttttatt

SEQ ID NO: 4346 - RNA, 20 nt, synthetic construct
  source 1..20: mol_type = other RNA
tccatactatttgagagtat

SEQ ID NO: 4347 - RNA, 20 nt, synthetic construct
  source 1..20: mol_type = other RNA
ttctttaatgtaatattttt

SEQ ID NO: 4348 - RNA, 20 nt, synthetic construct
  source 1..20: mol_type = other RNA
ggcatctttctttaatgtaa

SEQ ID NO: 4349 - RNA, 20 nt, synthetic construct
  source 1..20: mol_type = other RNA
atagactcatacataatgtt

SEQ ID NO: 4350 - RNA, 20 nt, synthetic construct
  source 1..20: mol_type = other RNA
tttgcctctggccatgggaa

SEQ ID NO: 4351 - RNA, 20 nt, synthetic construct
  source 1..20: mol_type = other RNA
ctgctactctcttcccatgg

SEQ ID NO: 4352 - RNA, 20 nt, synthetic construct
  source 1..20: mol_type = other RNA
atctctgctactctcttccc

SEQ ID NO: 4353 - RNA, 20 nt, synthetic construct
  source 1..20: mol_type = other RNA
ccccagaaaaaaacttcgtt

SEQ ID NO: 4354 - RNA, 20 nt, synthetic construct
  source 1..20: mol_type = other RNA
caatacaggacatttacatc

SEQ ID NO: 4355 - RNA, 20 nt, synthetic construct
  source 1..20: mol_type = other RNA
gaagtcatcaaactacatct

SEQ ID NO: 4356 - RNA, 20 nt, synthetic construct
  source 1..20: mol_type = other RNA
tagatgtagtttgatgactt

SEQ ID NO: 4357 - RNA, 20 nt, synthetic construct
  source 1..20: mol_type = other RNA
aactacatctaagatctgtg

SEQ ID NO: 4358 - RNA, 20 nt, synthetic construct
  source 1..20: mol_type = other RNA
aagatctgtgcatttgacta

SEQ ID NO: 4359 - RNA, 20 nt, synthetic construct
  source 1..20: mol_type = other RNA
gtgcatttgactatacatga

SEQ ID NO: 4360 - RNA, 20 nt, synthetic construct
  source 1..20: mol_type = other RNA
attttcaactgaggtatatt

SEQ ID NO: 4361 - RNA, 20 nt, synthetic construct
  source 1..20: mol_type = other RNA
ataacctccctcatatacta

SEQ ID NO: 4362 - RNA, 20 nt, synthetic construct
  source 1..20: mol_type = other RNA
gggcttgagactgggtcaca

SEQ ID NO: 4363 - RNA, 20 nt, synthetic construct
  source 1..20: mol_type = other RNA
tcacattcatgacatgtggc

SEQ ID NO: 4364 - RNA, 20 nt, synthetic construct
  source 1..20: mol_type = other RNA
tggagaatgtgctccccttc

SEQ ID NO: 4365 - RNA, 20 nt, synthetic construct
  source 1..20: mol_type = other RNA
cccaccaccggggtcctcac

SEQ ID NO: 4366 - RNA, 20 nt, synthetic construct
  source 1..20: mol_type = other RNA
gccgagattgggccattaca

SEQ ID NO: 4367 - RNA, 20 nt, synthetic construct
  source 1..20: mol_type = other RNA
cggctgattgcagcctccaa

SEQ ID NO: 4368 - RNA, 20 nt, synthetic construct
  source 1..20: mol_type = other RNA
cttgaaccctggagttggag

SEQ ID NO: 4369 - RNA, 20 nt, synthetic construct
  source 1..20: mol_type = other RNA
gtagtcccagctactcatga

SEQ ID NO: 4370 - RNA, 20 nt, synthetic construct
  source 1..20: mol_type = other RNA
tggccaacatggcaaaaccc

SEQ ID NO: 4371 - RNA, 20 nt, synthetic construct
  source 1..20: mol_type = other RNA
cgaggtcaacagagcgagac

SEQ ID NO: 4372 - RNA, 20 nt, synthetic construct
  source 1..20: mol_type = other RNA
acccgccttggcttcccaaa

SEQ ID NO: 4373 - RNA, 20 nt, synthetic construct
  source 1..20: mol_type = other RNA
cagcactttgggaagccaag

SEQ ID NO: 4374 - RNA, 20 nt, synthetic construct
  source 1..20: mol_type = other RNA
gaaaaggtccaccagctatg

SEQ ID NO: 4375 - RNA, 20 nt, synthetic construct
  source 1..20: mol_type = other RNA
catagtctagccagccctct

SEQ ID NO: 4376 - RNA, 20 nt, synthetic construct
  source 1..20: mol_type = other RNA
catcccccttctgtcagtcc

SEQ ID NO: 4377 - RNA, 20 nt, synthetic construct
  source 1..20: mol_type = other RNA
cccttctgtcagtcccgcag

SEQ ID NO: 4378 - RNA, 20 nt, synthetic construct
  source 1..20: mol_type = other RNA
tctactggccacagccactg

SEQ ID NO: 4379 - RNA, 20 nt, synthetic construct
  source 1..20: mol_type = other RNA
tagagaaacagcatcctgcc

SEQ ID NO: 4380 - RNA, 20 nt, synthetic construct
  source 1..20: mol_type = other RNA
tgcctgggacctagtcttcc

SEQ ID NO: 4381 - RNA, 20 nt, synthetic construct
  source 1..20: mol_type = other RNA
ttcccaggccagcctccctt

SEQ ID NO: 4382 - RNA, 20 nt, synthetic construct
  source 1..20: mol_type = other RNA
aagatgatatcattcccagg

SEQ ID NO: 4383 - RNA, 20 nt, synthetic construct
  source 1..20: mol_type = other RNA
tcttggatggcatttcctcc

SEQ ID NO: 4384 - RNA, 20 nt, synthetic construct
  source 1..20: mol_type = other RNA
tggatggcatttcctccttg

SEQ ID NO: 4385 - RNA, 20 nt, synthetic construct
  source 1..20: mol_type = other RNA
ctttctacaggactgtatag

SEQ ID NO: 4386 - RNA, 20 nt, synthetic construct
  source 1..20: mol_type = other RNA
ataagacacacatcaaaatc

SEQ ID NO: 4387 - RNA, 20 nt, synthetic construct
  source 1..20: mol_type = other RNA
aaatccgtataccggttcct

SEQ ID NO: 4388 - RNA, 20 nt, synthetic construct
  source 1..20: mol_type = other RNA
gtataccggttcctctaggg

SEQ ID NO: 4389 - RNA, 20 nt, synthetic construct
  source 1..20: mol_type = other RNA
tacataaatgtgcaaaagaa

SEQ ID NO: 4390 - RNA, 20 nt, synthetic construct
  source 1..20: mol_type = other RNA
atgctccatataaaaactga

SEQ ID NO: 4391 - RNA, 20 nt, synthetic construct
  source 1..20: mol_type = other RNA
cagtttttatatggagcatt

SEQ ID NO: 4392 - RNA, 20 nt, synthetic construct
  source 1..20: mol_type = other RNA
catcttgacttgtaatctct

SEQ ID NO: 4393 - RNA, 20 nt, synthetic construct
  source 1..20: mol_type = other RNA
tgacttgtaatctctataat

SEQ ID NO: 4394 - RNA, 20 nt, synthetic construct
  source 1..20: mol_type = other RNA
ggattatagagattacaagt

SEQ ID NO: 4395 - RNA, 20 nt, synthetic construct
  source 1..20: mol_type = other RNA
ctataatcctgataatcccc

SEQ ID NO: 4396 - RNA, 20 nt, synthetic construct
  source 1..20: mol_type = other RNA
tgataatccccatgtgtcaa

SEQ ID NO: 4397 - RNA, 20 nt, synthetic construct
  source 1..20: mol_type = other RNA
ccatgtgtcaagggcaggac

SEQ ID NO: 4398 - RNA, 20 nt, synthetic construct
  source 1..20: mol_type = other RNA
agttacctccacctggtcct

SEQ ID NO: 4399 - RNA, 20 nt, synthetic construct
  source 1..20: mol_type = other RNA
tgggggcagtttctcccagg

SEQ ID NO: 4400 - RNA, 20 nt, synthetic construct
  source 1..20: mol_type = other RNA
caggagactctctcactgtc

SEQ ID NO: 4401 - RNA, 20 nt, synthetic construct
  source 1..20: mol_type = other RNA
gatctcaggagactctctca

SEQ ID NO: 4402 - RNA, 20 nt, synthetic construct
  source 1..20: mol_type = other RNA
gatggttttgtaagtgtctg

SEQ ID NO: 4403 - RNA, 20 nt, synthetic construct
  source 1..20: mol_type = other RNA
aaagtagtatatgcttgtat

SEQ ID NO: 4404 - RNA, 20 nt, synthetic construct
  source 1..20: mol_type = other RNA
tctatctttgaaaggcatgc

SEQ ID NO: 4405 - RNA, 20 nt, synthetic construct
  source 1..20: mol_type = other RNA
atctttgaaaggcatgcaca

SEQ ID NO: 4406 - RNA, 20 nt, synthetic construct
  source 1..20: mol_type = other RNA
ttgaaaggcatgcacaaatg

SEQ ID NO: 4407 - RNA, 20 nt, synthetic construct
  source 1..20: mol_type = other RNA
tacaattgccacaacacaaa

SEQ ID NO: 4408 - RNA, 20 nt, synthetic construct
  source 1..20: mol_type = other RNA
agcaccctctacattttgtt

SEQ ID NO: 4409 - RNA, 20 nt, synthetic construct
  source 1..20: mol_type = other RNA
ggattcctgcagtagttcat

SEQ ID NO: 4410 - RNA, 20 nt, synthetic construct
  source 1..20: mol_type = other RNA
gcatctggattcctgcagta

SEQ ID NO: 4411 - RNA, 20 nt, synthetic construct
  source 1..20: mol_type = other RNA
agatgccgatacaggccctt

SEQ ID NO: 4412 - RNA, 20 nt, synthetic construct
  source 1..20: mol_type = other RNA
ggtgggagtactgcaacctg

SEQ ID NO: 4413 - RNA, 20 nt, synthetic construct
  source 1..20: mol_type = other RNA
cgtcaggttgcagtactccc

SEQ ID NO: 4414 - RNA, 20 nt, synthetic construct
  source 1..20: mol_type = other RNA
cgttgtccaagcacatagag

SEQ ID NO: 4415 - RNA, 20 nt, synthetic construct
  source 1..20: mol_type = other RNA
gtgtggtttttcatgtcttt

SEQ ID NO: 4416 - RNA, 20 nt, synthetic construct
  source 1..20: mol_type = other RNA
cagctctggctttcccaggg

SEQ ID NO: 4417 - RNA, 20 nt, synthetic construct
  source 1..20: mol_type = other RNA
cacagttgacagcatgttag

SEQ ID NO: 4418 - RNA, 20 nt, synthetic construct
  source 1..20: mol_type = other RNA
ctcaggagccacaacgctga

SEQ ID NO: 4419 - RNA, 20 nt, synthetic construct
  source 1..20: mol_type = other RNA
ggggccacatccctcaggag

SEQ ID NO: 4420 - RNA, 20 nt, synthetic construct
  source 1..20: mol_type = other RNA
atgcagtcatgtcaggcttc

SEQ ID NO: 4421 - RNA, 20 nt, synthetic construct
  source 1..20: mol_type = other RNA
tcctgggtctatgtggctgc

SEQ ID NO: 4422 - RNA, 20 nt, synthetic construct
  source 1..20: mol_type = other RNA
tctgttttatttttattttt

SEQ ID NO: 4423 - RNA, 20 nt, synthetic construct
  source 1..20: mol_type = other RNA
gttttatttttatttttttc

SEQ ID NO: 4424 - RNA, 20 nt, synthetic construct
  source 1..20: mol_type = other RNA
tttcccattcccaaacatac

SEQ ID NO: 4425 - RNA, 20 nt, synthetic construct
  source 1..20: mol_type = other RNA
aagtggcttacatttttttc

SEQ ID NO: 4426 - RNA, 20 nt, synthetic construct
  source 1..20: mol_type = other RNA
tttcaaacagaagaggggca

SEQ ID NO: 4427 - RNA, 20 nt, synthetic construct
  source 1..20: mol_type = other RNA
gtggcctgttaggaactggg

SEQ ID NO: 4428 - RNA, 20 nt, synthetic construct
  source 1..20: mol_type = other RNA
gtattttctgctgcttccca

SEQ ID NO: 4429 - RNA, 20 nt, synthetic construct
  source 1..20: mol_type = other RNA
ctctcatagctgcctgagct

SEQ ID NO: 4430 - RNA, 20 nt, synthetic construct
  source 1..20: mol_type = other RNA
gacagctggcagagctcagg

SEQ ID NO: 4431 - RNA, 20 nt, synthetic construct
  source 1..20: mol_type = other RNA
aatgctgcctctgatctgac

SEQ ID NO: 4432 - RNA, 20 nt, synthetic construct
  source 1..20: mol_type = other RNA
gaggcagcattagattatca

SEQ ID NO: 4433 - RNA, 20 nt, synthetic construct
  source 1..20: mol_type = other RNA
tagcacaaaccctattgtga

SEQ ID NO: 4434 - RNA, 20 nt, synthetic construct
  source 1..20: mol_type = other RNA
agattcctcacatgtgcagt

SEQ ID NO: 4435 - RNA, 20 nt, synthetic construct
  source 1..20: mol_type = other RNA
agattgcatgctccttatga

SEQ ID NO: 4436 - RNA, 20 nt, synthetic construct
  source 1..20: mol_type = other RNA
ggcattagattctcataagg

SEQ ID NO: 4437 - RNA, 20 nt, synthetic construct
  source 1..20: mol_type = other RNA
tcaggcattagattctcata

SEQ ID NO: 4438 - RNA, 20 nt, synthetic construct
  source 1..20: mol_type = other RNA
aatgcctgatgatctgtcat

SEQ ID NO: 4439 - RNA, 20 nt, synthetic construct
  source 1..20: mol_type = other RNA
gggggtgatggaagcatgac

SEQ ID NO: 4440 - RNA, 20 nt, synthetic construct
  source 1..20: mol_type = other RNA
gtcatgcttccatcaccccc

SEQ ID NO: 4441 - RNA, 20 nt, synthetic construct
  source 1..20: mol_type = other RNA
cccccagatgggaccaccta

SEQ ID NO: 4442 - RNA, 20 nt, synthetic construct
  source 1..20: mol_type = other RNA
gtgggagccctgagctaatt

SEQ ID NO: 4443 - RNA, 20 nt, synthetic construct
  source 1..20: mol_type = other RNA
caccataaggtaaaatcagt

SEQ ID NO: 4444 - RNA, 20 nt, synthetic construct
  source 1..20: mol_type = other RNA
tgcactttatttcaattatt

SEQ ID NO: 4445 - RNA, 20 nt, synthetic construct
  source 1..20: mol_type = other RNA
tttaaccatcgccccctcac

SEQ ID NO: 4446 - RNA, 20 nt, synthetic construct
  source 1..20: mol_type = other RNA
ccccctcaccccaggtgcac

SEQ ID NO: 4447 - RNA, 20 nt, synthetic construct
  source 1..20: mol_type = other RNA
ctgactactagaacccagag

SEQ ID NO: 4448 - RNA, 20 nt, synthetic construct
  source 1..20: mol_type = other RNA
gacttaagcctcatagaggg

SEQ ID NO: 4449 - RNA, 20 nt, synthetic construct
  source 1..20: mol_type = other RNA
tttctagaaaaatctgactt

SEQ ID NO: 4450 - RNA, 20 nt, synthetic construct
  source 1..20: mol_type = other RNA
aaatcttttctagaaaaatc

SEQ ID NO: 4451 - RNA, 20 nt, synthetic construct
  source 1..20: mol_type = other RNA
ggtcaccatgagacttccct

SEQ ID NO: 4452 - RNA, 20 nt, synthetic construct
  source 1..20: mol_type = other RNA
cagagaatgcatgaggctaa

SEQ ID NO: 4453 - RNA, 20 nt, synthetic construct
  source 1..20: mol_type = other RNA
cagtcttccctattcatagg

SEQ ID NO: 4454 - RNA, 20 nt, synthetic construct
  source 1..20: mol_type = other RNA
ggtgtgagaagtgttatgtt

SEQ ID NO: 4455 - RNA, 20 nt, synthetic construct
  source 1..20: mol_type = other RNA
ccccatatctggtgtgagaa

SEQ ID NO: 4456 - RNA, 20 nt, synthetic construct
  source 1..20: mol_type = other RNA
gctggagactcgcttggggt

SEQ ID NO: 4457 - RNA, 20 nt, synthetic construct
  source 1..20: mol_type = other RNA
gacactgtctccagatagag

SEQ ID NO: 4458 - RNA, 20 nt, synthetic construct
  source 1..20: mol_type = other RNA
ggagacagtgtcagatccca

SEQ ID NO: 4459 - RNA, 20 nt, synthetic construct
  source 1..20: mol_type = other RNA
cacaagttaaggctcagtcc

SEQ ID NO: 4460 - RNA, 20 nt, synthetic construct
  source 1..20: mol_type = other RNA
gcagtggggcagtcttgtag

SEQ ID NO: 4461 - RNA, 20 nt, synthetic construct
  source 1..20: mol_type = other RNA
caagttgcaggctgtgacct

SEQ ID NO: 4462 - RNA, 20 nt, synthetic construct
  source 1..20: mol_type = other RNA
agctgggcagaagtacaggt

SEQ ID NO: 4463 - RNA, 20 nt, synthetic construct
  source 1..20: mol_type = other RNA
ttatccagctgggcagaagt

SEQ ID NO: 4464 - RNA, 20 nt, synthetic construct
  source 1..20: mol_type = other RNA
gtttttctatatgaccctcc

SEQ ID NO: 4465 - RNA, 20 nt, synthetic construct
  source 1..20: mol_type = other RNA
aacccatggagggtcatata

SEQ ID NO: 4466 - RNA, 20 nt, synthetic construct
  source 1..20: mol_type = other RNA
tttataataaatgggtaaat

SEQ ID NO: 4467 - RNA, 20 nt, synthetic construct
  source 1..20: mol_type = other RNA
tttttaatatcttttataat

SEQ ID NO: 4468 - RNA, 20 nt, synthetic construct
  source 1..20: mol_type = other RNA
tggtgaacagccaggtggaa

SEQ ID NO: 4469 - RNA, 20 nt, synthetic construct
  source 1..20: mol_type = other RNA
cttccacctggctgttcacc

SEQ ID NO: 4470 - RNA, 20 nt, synthetic construct
  source 1..20: mol_type = other RNA
actgtgcctctgtaatgaag

SEQ ID NO: 4471 - RNA, 20 nt, synthetic construct
  source 1..20: mol_type = other RNA
ccgatggccaatgatgtaat

SEQ ID NO: 4472 - RNA, 20 nt, synthetic construct
  source 1..20: mol_type = other RNA
ttggccatcggtgatcggct

SEQ ID NO: 4473 - RNA, 20 nt, synthetic construct
  source 1..20: mol_type = other RNA
gtgatcggctcaccttcggc

SEQ ID NO: 4474 - RNA, 20 nt, synthetic construct
  source 1..20: mol_type = other RNA
gctcaccttcggcccctctt

SEQ ID NO: 4475 - RNA, 20 nt, synthetic construct
  source 1..20: mol_type = other RNA
aggaacccaccaagagttgc

SEQ ID NO: 4476 - RNA, 20 nt, synthetic construct
  source 1..20: mol_type = other RNA
cttggagtttcctgggtgaa

SEQ ID NO: 4477 - RNA, 20 nt, synthetic construct
  source 1..20: mol_type = other RNA
ttagcttcctgtgatattgt

SEQ ID NO: 4478 - RNA, 20 nt, synthetic construct
  source 1..20: mol_type = other RNA
caatatcacaggaagctaag

SEQ ID NO: 4479 - RNA, 20 nt, synthetic construct
  source 1..20: mol_type = other RNA
tccttagcttcctgtgatat

SEQ ID NO: 4480 - RNA, 20 nt, synthetic construct
  source 1..20: mol_type = other RNA
caggaagctaaggatgatac

SEQ ID NO: 4481 - RNA, 20 nt, synthetic construct
  source 1..20: mol_type = other RNA
acagccaagacacacaaagg

SEQ ID NO: 4482 - RNA, 20 nt, synthetic construct
  source 1..20: mol_type = other RNA
acagcaaacaggctttatca

SEQ ID NO: 4483 - RNA, 20 nt, synthetic construct
  source 1..20: mol_type = other RNA
ggtagaagacccctcagcgc

SEQ ID NO: 4484 - RNA, 20 nt, synthetic construct
  source 1..20: mol_type = other RNA
ttgatgagctttgtccctgg

SEQ ID NO: 4485 - RNA, 20 nt, synthetic construct
  source 1..20: mol_type = other RNA
atgatgtcccactgtcctct

SEQ ID NO: 4486 - RNA, 20 nt, synthetic construct
  source 1..20: mol_type = other RNA
gtcatagtcaaaaggagtta

SEQ ID NO: 4487 - RNA, 20 nt, synthetic construct
  source 1..20: mol_type = other RNA
ttattatattttttgacaaa

SEQ ID NO: 4488 - RNA, 20 nt, synthetic construct
  source 1..20: mol_type = other RNA
attcttagaagacaaaaggg

SEQ ID NO: 4489 - RNA, 20 nt, synthetic construct
  source 1..20: mol_type = other RNA
tctccctctcctgctccacg

SEQ ID NO: 4490 - RNA, 20 nt, synthetic construct
  source 1..20: mol_type = other RNA
gggttacggcagtactgaaa

SEQ ID NO: 4491 - RNA, 20 nt, synthetic construct
  source 1..20: mol_type = other RNA
atggtccctggtgctacaca

SEQ ID NO: 4492 - RNA, 20 nt, synthetic construct
  source 1..20: mol_type = other RNA
aagaaaactttttgactact

SEQ ID NO: 4493 - RNA, 20 nt, synthetic construct
  source 1..20: mol_type = other RNA
cagtagtcaaaaagttttct

SEQ ID NO: 4494 - RNA, 20 nt, synthetic construct
  source 1..20: mol_type = other RNA
ctctctgtggtaagttgcct

SEQ ID NO: 4495 - RNA, 20 nt, synthetic construct
  source 1..20: mol_type = other RNA
atattaaggaagcagtttcc

SEQ ID NO: 4496 - RNA, 20 nt, synthetic construct
  source 1..20: mol_type = other RNA
cctccccagaagcactcagc

SEQ ID NO: 4497 - RNA, 20 nt, synthetic construct
  source 1..20: mol_type = other RNA
tggccaccttgaacctgccc

SEQ ID NO: 4498 - RNA, 20 nt, synthetic construct
  source 1..20: mol_type = other RNA
cctctaagtttgccctttgg

SEQ ID NO: 4499 - RNA, 20 nt, synthetic construct
  source 1..20: mol_type = other RNA
cgggctgattagatcacctc

SEQ ID NO: 4500 - RNA, 20 nt, synthetic construct
  source 1..20: mol_type = other RNA
aatcagcccgggatagtccc

SEQ ID NO: 4501 - RNA, 20 nt, synthetic construct
  source 1..20: mol_type = other RNA
gcccgggatagtcccaccga

SEQ ID NO: 4502 - RNA, 20 nt, synthetic construct
  source 1..20: mol_type = other RNA
taatgactctaaatttgttt

SEQ ID NO: 4503 - RNA, 20 nt, synthetic construct
  source 1..20: mol_type = other RNA
gaggtttacaatgtgcatta

SEQ ID NO: 4504 - RNA, 20 nt, synthetic construct
  source 1..20: mol_type = other RNA
ggggctaaagagctgcacta

SEQ ID NO: 4505 - RNA, 20 nt, synthetic construct
  source 1..20: mol_type = other RNA
aagcctcatactcccaataa

SEQ ID NO: 4506 - RNA, 20 nt, synthetic construct
  source 1..20: mol_type = other RNA
ggggaaggggaattgacatt

SEQ ID NO: 4507 - RNA, 20 nt, synthetic construct
  source 1..20: mol_type = other RNA
tttaagatctaatgtcaatt

SEQ ID NO: 4508 - RNA, 20 nt, synthetic construct
  source 1..20: mol_type = other RNA
taaatgattggggtaacaaa

SEQ ID NO: 4509 - RNA, 20 nt, synthetic construct
  source 1..20: mol_type = other RNA
atgggggaaaaaaagccact

SEQ ID NO: 4510 - RNA, 20 nt, synthetic construct
  source 1..20: mol_type = other RNA
acttgtctgtccgagttaca

SEQ ID NO: 4511 - RNA, 20 nt, synthetic construct
  source 1..20: mol_type = other RNA
caggatgctggtcttcagtg

SEQ ID NO: 4512 - RNA, 20 nt, synthetic construct
  source 1..20: mol_type = other RNA
tgagattgcctggggaggtg

SEQ ID NO: 4513 - RNA, 20 nt, synthetic construct
  source 1..20: mol_type = other RNA
ctgccctgtaccacctcccc

SEQ ID NO: 4514 - RNA, 20 nt, synthetic construct
  source 1..20: mol_type = other RNA
tcatcactgccctgtaccac

SEQ ID NO: 4515 - RNA, 20 nt, synthetic construct
  source 1..20: mol_type = other RNA
tgggagccacactgcccatc

SEQ ID NO: 4516 - RNA, 20 nt, synthetic construct
  source 1..20: mol_type = other RNA
tcacatttgggccactcctg

SEQ ID NO: 4517 - RNA, 20 nt, synthetic construct
  source 1..20: mol_type = other RNA
ccctaacctctccttcttcc

SEQ ID NO: 4518 - RNA, 20 nt, synthetic construct
  source 1..20: mol_type = other RNA
ttcctatcaccctaacctct

SEQ ID NO: 4519 - RNA, 20 nt, synthetic construct
  source 1..20: mol_type = other RNA
agagaccacaatgccacatt

SEQ ID NO: 4520 - RNA, 20 nt, synthetic construct
  source 1..20: mol_type = other RNA
actcacactaaatccagaga

SEQ ID NO: 4521 - RNA, 20 nt, synthetic construct
  source 1..20: mol_type = other RNA
tggtggttcctctacctcaa

SEQ ID NO: 4522 - RNA, 20 nt, synthetic construct
  source 1..20: mol_type = other RNA
agagactttgaggtagagga

SEQ ID NO: 4523 - RNA, 20 nt, synthetic construct
  source 1..20: mol_type = other RNA
agtacacgccactgcctctc

SEQ ID NO: 4524 - RNA, 20 nt, synthetic construct
  source 1..20: mol_type = other RNA
ttgacaggctgccttgaatt

SEQ ID NO: 4525 - RNA, 20 nt, synthetic construct
  source 1..20: mol_type = other RNA
tcaatgtgggtgaggacagc

SEQ ID NO: 4526 - RNA, 20 nt, synthetic construct
  source 1..20: mol_type = other RNA
ctaagaacctgattctcata

SEQ ID NO: 4527 - RNA, 20 nt, synthetic construct
  source 1..20: mol_type = other RNA
ggttcttagagattggagaa

SEQ ID NO: 4528 - RNA, 20 nt, synthetic construct
  source 1..20: mol_type = other RNA
tgttcccattcttccttctt

SEQ ID NO: 4529 - RNA, 20 nt, synthetic construct
  source 1..20: mol_type = other RNA
aagtaaggtggggaacctca

SEQ ID NO: 4530 - RNA, 20 nt, synthetic construct
  source 1..20: mol_type = other RNA
gacacttggaaatcctgagg

SEQ ID NO: 4531 - RNA, 20 nt, synthetic construct
  source 1..20: mol_type = other RNA
tgaggactgtttcctgcaga

SEQ ID NO: 4532 - RNA, 20 nt, synthetic construct
  source 1..20: mol_type = other RNA
ttctgcaggaaacagtcctc

SEQ ID NO: 4533 - RNA, 20 nt, synthetic construct
  source 1..20: mol_type = other RNA
caccaaccacatccttctgc

SEQ ID NO: 4534 - RNA, 20 nt, synthetic construct
  source 1..20: mol_type = other RNA
tgagtcaaacctgaatatcc

SEQ ID NO: 4535 - RNA, 20 nt, synthetic construct
  source 1..20: mol_type = other RNA
ttgtactaaaagagtaacta

SEQ ID NO: 4536 - RNA, 20 nt, synthetic construct
  source 1..20: mol_type = other RNA
tttctagtgctgagctcaat

SEQ ID NO: 4537 - RNA, 20 nt, synthetic construct
  source 1..20: mol_type = other RNA
tcttttctagtgctgagctc

SEQ ID NO: 4538 - RNA, 20 nt, synthetic construct
  source 1..20: mol_type = other RNA
atagaagtcttttgtaaaaa

SEQ ID NO: 4539 - RNA, 20 nt, synthetic construct
  source 1..20: mol_type = other RNA
atctatagaagtcttttgta

SEQ ID NO: 4540 - RNA, 20 nt, synthetic construct
  source 1..20: mol_type = other RNA
ggaacctgagttttccaaat

SEQ ID NO: 4541 - RNA, 20 nt, synthetic construct
  source 1..20: mol_type = other RNA
ctggttggttggggaggaat

SEQ ID NO: 4542 - RNA, 20 nt, synthetic construct
  source 1..20: mol_type = other RNA
atgcctacaacagtgcaggg

SEQ ID NO: 4543 - RNA, 20 nt, synthetic construct
  source 1..20: mol_type = other RNA
ttggtaccacccatcaatgc

SEQ ID NO: 4544 - RNA, 20 nt, synthetic construct
  source 1..20: mol_type = other RNA
ttgctacataaaatcacata

SEQ ID NO: 4545 - RNA, 20 nt, synthetic construct
  source 1..20: mol_type = other RNA
catacacacatgcacatatg

SEQ ID NO: 4546 - RNA, 20 nt, synthetic construct
  source 1..20: mol_type = other RNA
tttgtgcctttcagtaaact

SEQ ID NO: 4547 - RNA, 20 nt, synthetic construct
  source 1..20: mol_type = other RNA
taaacactctttagattttt

SEQ ID NO: 4548 - RNA, 20 nt, synthetic construct
  source 1..20: mol_type = other RNA
aaagagtgtttatgatttta

SEQ ID NO: 4549 - RNA, 20 nt, synthetic construct
  source 1..20: mol_type = other RNA
caaaggtgaaattaaatggt

SEQ ID NO: 4550 - RNA, 20 nt, synthetic construct
  source 1..20: mol_type = other RNA
aatgaagaggatgctgtggc

SEQ ID NO: 4551 - RNA, 20 nt, synthetic construct
  source 1..20: mol_type = other RNA
tcttcatttgattgtgggaa

SEQ ID NO: 4552 - RNA, 20 nt, synthetic construct
  source 1..20: mol_type = other RNA
atactgtccttccatgtaag

SEQ ID NO: 4553 - RNA, 20 nt, synthetic construct
  source 1..20: mol_type = other RNA
gctgtgtgggttctgtgtaa

SEQ ID NO: 4554 - RNA, 20 nt, synthetic construct
  source 1..20: mol_type = other RNA
atacctgcctctctgttttc

SEQ ID NO: 4555 - RNA, 20 nt, synthetic construct
  source 1..20: mol_type = other RNA
agaaaaagatttgtattttg

SEQ ID NO: 4556 - RNA, 20 nt, synthetic construct
  source 1..20: mol_type = other RNA
ttttcttgatctgggcagtt

SEQ ID NO: 4557 - RNA, 20 nt, synthetic construct
  source 1..20: mol_type = other RNA
gggcagttccatcaaaatct

SEQ ID NO: 4558 - RNA, 20 nt, synthetic construct
  source 1..20: mol_type = other RNA
ctgtgcctacagattttgat

SEQ ID NO: 4559 - RNA, 20 nt, synthetic construct
  source 1..20: mol_type = other RNA
aaatctgtaggcacagtgat

SEQ ID NO: 4560 - RNA, 20 nt, synthetic construct
  source 1..20: mol_type = other RNA
gtaggcacagtgatttgcac

SEQ ID NO: 4561 - RNA, 20 nt, synthetic construct
  source 1..20: mol_type = other RNA
tcaatattttccaaaagtat

SEQ ID NO: 4562 - RNA, 20 nt, synthetic construct
  source 1..20: mol_type = other RNA
atagaaaccctcagagcatc

SEQ ID NO: 4563 - RNA, 20 nt, synthetic construct
  source 1..20: mol_type = other RNA
gacagtgagacaatggatat

SEQ ID NO: 4564 - RNA, 20 nt, synthetic construct
  source 1..20: mol_type = other RNA
attgtctcactgtcagatga

SEQ ID NO: 4565 - RNA, 20 nt, synthetic construct
  source 1..20: mol_type = other RNA
gtgcctgtgatagactgtag

SEQ ID NO: 4566 - RNA, 20 nt, synthetic construct
  source 1..20: mol_type = other RNA
caggcacagattttttttta

SEQ ID NO: 4567 - RNA, 20 nt, synthetic construct
  source 1..20: mol_type = other RNA
ttgaattcaatgccgaggct

SEQ ID NO: 4568 - RNA, 20 nt, synthetic construct
  source 1..20: mol_type = other RNA
attcacaaacacatgaacaa

SEQ ID NO: 4569 - RNA, 20 nt, synthetic construct
  source 1..20: mol_type = other RNA
caacccataatttgttcatg

SEQ ID NO: 4570 - RNA, 20 nt, synthetic construct
  source 1..20: mol_type = other RNA
ccataaatgaagagtaatca

SEQ ID NO: 4571 - RNA, 20 nt, synthetic construct
  source 1..20: mol_type = other RNA
gtccgaacccacagaacctg

SEQ ID NO: 4572 - RNA, 20 nt, synthetic construct
  source 1..20: mol_type = other RNA
tttcagtggaacatgcaatt

SEQ ID NO: 4573 - RNA, 20 nt, synthetic construct
  source 1..20: mol_type = other RNA
gcctgcatgttttgcttcct

SEQ ID NO: 4574 - RNA, 20 nt, synthetic construct
  source 1..20: mol_type = other RNA
cctttctacaccagggcacc

SEQ ID NO: 4575 - RNA, 20 nt, synthetic construct
  source 1..20: mol_type = other RNA
ggtttgtcgatggcatttca

SEQ ID NO: 4576 - RNA, 20 nt, synthetic construct
  source 1..20: mol_type = other RNA
acaaacctgatcgcatcgca

SEQ ID NO: 4577 - RNA, 20 nt, synthetic construct
  source 1..20: mol_type = other RNA
catcgcatttcactctgctg

SEQ ID NO: 4578 - RNA, 20 nt, synthetic construct
  source 1..20: mol_type = other RNA
catttcactctgctgttgag

SEQ ID NO: 4579 - RNA, 20 nt, synthetic construct
  source 1..20: mol_type = other RNA
actcaacagcagagtgaaat

SEQ ID NO: 4580 - RNA, 20 nt, synthetic construct
  source 1..20: mol_type = other RNA
tttgtaacttcttgctctac

SEQ ID NO: 4581 - RNA, 20 nt, synthetic construct
  source 1..20: mol_type = other RNA
gaaatatgtggaaggtgaaa

SEQ ID NO: 4582 - RNA, 20 nt, synthetic construct
  source 1..20: mol_type = other RNA
acatactgccatcatgcact

SEQ ID NO: 4583 - RNA, 20 nt, synthetic construct
  source 1..20: mol_type = other RNA
tgcacttcctatctctattc

SEQ ID NO: 4584 - RNA, 20 nt, synthetic construct
  source 1..20: mol_type = other RNA
ctattcctcttcgttgcaat

SEQ ID NO: 4585 - RNA, 20 nt, synthetic construct
  source 1..20: mol_type = other RNA
ggctccaagtggctcacacc

SEQ ID NO: 4586 - RNA, 20 nt, synthetic construct
  source 1..20: mol_type = other RNA
gaataatggtgtgagccact

SEQ ID NO: 4587 - RNA, 20 nt, synthetic construct
  source 1..20: mol_type = other RNA
atcaactgcctacacagtcc

SEQ ID NO: 4588 - RNA, 20 nt, synthetic construct
  source 1..20: mol_type = other RNA
actgcctacacagtcctaga

SEQ ID NO: 4589 - RNA, 20 nt, synthetic construct
  source 1..20: mol_type = other RNA
cccaaaagtaaacttttcag

SEQ ID NO: 4590 - RNA, 20 nt, synthetic construct
  source 1..20: mol_type = other RNA
tacctgaaaagtttactttt

SEQ ID NO: 4591 - RNA, 20 nt, synthetic construct
  source 1..20: mol_type = other RNA
gaagaccctcatgagtcact

SEQ ID NO: 4592 - RNA, 20 nt, synthetic construct
  source 1..20: mol_type = other RNA
tgagcagcagtgactcatga

SEQ ID NO: 4593 - RNA, 20 nt, synthetic construct
  source 1..20: mol_type = other RNA
tatctggctccttgaagagt

SEQ ID NO: 4594 - RNA, 20 nt, synthetic construct
  source 1..20: mol_type = other RNA
ggctccttgaagagtgacct

SEQ ID NO: 4595 - RNA, 20 nt, synthetic construct
  source 1..20: mol_type = other RNA
atgcaaggtcactcttcaag

SEQ ID NO: 4596 - RNA, 20 nt, synthetic construct
  source 1..20: mol_type = other RNA
tgtcataaaaaatgaaagag

SEQ ID NO: 4597 - RNA, 20 nt, synthetic construct
  source 1..20: mol_type = other RNA
gtgccactttttttgatgcc

SEQ ID NO: 4598 - RNA, 20 nt, synthetic construct
  source 1..20: mol_type = other RNA
aaaaaagtggcacagatggg

SEQ ID NO: 4599 - RNA, 20 nt, synthetic construct
  source 1..20: mol_type = other RNA
cactactggagcacagctcg

SEQ ID NO: 4600 - RNA, 20 nt, synthetic construct
  source 1..20: mol_type = other RNA
tgacgttgggcggtagtcct

SEQ ID NO: 4601 - RNA, 20 nt, synthetic construct
  source 1..20: mol_type = other RNA
tgttcatattcccaaagcaa

SEQ ID NO: 4602 - RNA, 20 nt, synthetic construct
  source 1..20: mol_type = other RNA
aaactgagtgaacttgtctt

SEQ ID NO: 4603 - RNA, 20 nt, synthetic construct
  source 1..20: mol_type = other RNA
aatttgaccaaagccttggc

SEQ ID NO: 4604 - RNA, 20 nt, synthetic construct
  source 1..20: mol_type = other RNA
ccagagtgggtgctgactgc

SEQ ID NO: 4605 - RNA, 20 nt, synthetic construct
  source 1..20: mol_type = other RNA
tcaagacttttttcctccct

SEQ ID NO: 4606 - RNA, 20 nt, synthetic construct
  source 1..20: mol_type = other RNA
cttctttcttcccaccctcc

SEQ ID NO: 4607 - RNA, 20 nt, synthetic construct
  source 1..20: mol_type = other RNA
tgaggcagaatttccagggc

SEQ ID NO: 4608 - RNA, 20 nt, synthetic construct
  source 1..20: mol_type = other RNA
aattgccctggaaattctgc

SEQ ID NO: 4609 - RNA, 20 nt, synthetic construct
  source 1..20: mol_type = other RNA
gcagagggaagacccagtgc

SEQ ID NO: 4610 - RNA, 20 nt, synthetic construct
  source 1..20: mol_type = other RNA
cttgcactgggtcttccctc

SEQ ID NO: 4611 - RNA, 20 nt, synthetic construct
  source 1..20: mol_type = other RNA
atctgtattgcattgctcta

SEQ ID NO: 4612 - RNA, 20 nt, synthetic construct
  source 1..20: mol_type = other RNA
gtattgcattgctctagagc

SEQ ID NO: 4613 - RNA, 20 nt, synthetic construct
  source 1..20: mol_type = other RNA
gaggctgaataatttataaa

SEQ ID NO: 4614 - RNA, 20 nt, synthetic construct
  source 1..20: mol_type = other RNA
tgcttcctgtaaagcctgca

SEQ ID NO: 4615 - RNA, 20 nt, synthetic construct
  source 1..20: mol_type = other RNA
cctctgcttctgtgtgggcc

SEQ ID NO: 4616 - RNA, 20 nt, synthetic construct
  source 1..20: mol_type = other RNA
tccttaggcccacacagaag

SEQ ID NO: 4617 - RNA, 20 nt, synthetic construct
  source 1..20: mol_type = other RNA
tggtggagggcaaagtggga

SEQ ID NO: 4618 - RNA, 20 nt, synthetic construct
  source 1..20: mol_type = other RNA
ctctctgtctcttgctcctg

SEQ ID NO: 4619 - RNA, 20 nt, synthetic construct
  source 1..20: mol_type = other RNA
gtgagctctcactcttagtt

SEQ ID NO: 4620 - RNA, 20 nt, synthetic construct
  source 1..20: mol_type = other RNA
tcatggtgatcagtgagctc

SEQ ID NO: 4621 - RNA, 20 nt, synthetic construct
  source 1..20: mol_type = other RNA
ccatgaagatgtggcccaag

SEQ ID NO: 4622 - RNA, 20 nt, synthetic construct
  source 1..20: mol_type = other RNA
ctcttgaatggcttgggcca

SEQ ID NO: 4623 - RNA, 20 nt, synthetic construct
  source 1..20: mol_type = other RNA
tagaggtgcatccctcttga

SEQ ID NO: 4624 - RNA, 20 nt, synthetic construct
  source 1..20: mol_type = other RNA
aaacccctttcacaggccat

SEQ ID NO: 4625 - RNA, 20 nt, synthetic construct
  source 1..20: mol_type = other RNA
ctggggactacagttgaaca

SEQ ID NO: 4626 - RNA, 20 nt, synthetic construct
  source 1..20: mol_type = other RNA
cgtgttcaactgtagtcccc

SEQ ID NO: 4627 - RNA, 20 nt, synthetic construct
  source 1..20: mol_type = other RNA
gagactgtgatatagtttgt

SEQ ID NO: 4628 - RNA, 20 nt, synthetic construct
  source 1..20: mol_type = other RNA
gtttcatcagagactgtgat

SEQ ID NO: 4629 - RNA, 20 nt, synthetic construct
  source 1..20: mol_type = other RNA
cagtctctgatgaaacagat

SEQ ID NO: 4630 - RNA, 20 nt, synthetic construct
  source 1..20: mol_type = other RNA
gtgacttatgagtggcaaga

SEQ ID NO: 4631 - RNA, 20 nt, synthetic construct
  source 1..20: mol_type = other RNA
tctgtgccatgaacttggcg

SEQ ID NO: 4632 - RNA, 20 nt, synthetic construct
  source 1..20: mol_type = other RNA
tttctaggtcctcaaggcct

SEQ ID NO: 4633 - RNA, 20 nt, synthetic construct
  source 1..20: mol_type = other RNA
tacaaggtcatcctgggtgc

SEQ ID NO: 4634 - RNA, 20 nt, synthetic construct
  source 1..20: mol_type = other RNA
tgggtgcacaccaagaagtg

SEQ ID NO: 4635 - RNA, 20 nt, synthetic construct
  source 1..20: mol_type = other RNA
tcaccagcgtggggtgaaga

SEQ ID NO: 4636 - RNA, 20 nt, synthetic construct
  source 1..20: mol_type = other RNA
catgaaaggctcaagggctt

SEQ ID NO: 4637 - RNA, 20 nt, synthetic construct
  source 1..20: mol_type = other RNA
atcttcaaccccagccctgc

SEQ ID NO: 4638 - RNA, 20 nt, synthetic construct
  source 1..20: mol_type = other RNA
tcaaccccagccctgccaca

SEQ ID NO: 4639 - RNA, 20 nt, synthetic construct
  source 1..20: mol_type = other RNA
ttctgcctttttaaagagca

SEQ ID NO: 4640 - RNA, 20 nt, synthetic construct
  source 1..20: mol_type = other RNA
ctttttccacgtgaggaaac

SEQ ID NO: 4641 - RNA, 20 nt, synthetic construct
  source 1..20: mol_type = other RNA
tgaatgtggatgaactggtg

SEQ ID NO: 4642 - RNA, 20 nt, synthetic construct
  source 1..20: mol_type = other RNA
acattcatgatcagggaaag

SEQ ID NO: 4643 - RNA, 20 nt, synthetic construct
  source 1..20: mol_type = other RNA
gggaaaggttgttattccag

SEQ ID NO: 4644 - RNA, 20 nt, synthetic construct
  source 1..20: mol_type = other RNA
catttgattctctccagcat

SEQ ID NO: 4645 - RNA, 20 nt, synthetic construct
  source 1..20: mol_type = other RNA
aatgagattgcatttcaaag

SEQ ID NO: 4646 - RNA, 20 nt, synthetic construct
  source 1..20: mol_type = other RNA
agccatgcttagtgtgggcg

SEQ ID NO: 4647 - RNA, 20 nt, synthetic construct
  source 1..20: mol_type = other RNA
ctgctattcaggaggctgac

SEQ ID NO: 4648 - RNA, 20 nt, synthetic construct
  source 1..20: mol_type = other RNA
tagctgcctacagccttgaa

SEQ ID NO: 4649 - RNA, 20 nt, synthetic construct
  source 1..20: mol_type = other RNA
gtcacccagcctggagtgca

SEQ ID NO: 4650 - RNA, 20 nt, synthetic construct
  source 1..20: mol_type = other RNA
agaccctgtctcaacaaaag

SEQ ID NO: 4651 - RNA, 20 nt, synthetic construct
  source 1..20: mol_type = other RNA
aagaagacaacaataatatt

SEQ ID NO: 4652 - RNA, 20 nt, synthetic construct
  source 1..20: mol_type = other RNA
ctttgtcaggcttaataaaa

SEQ ID NO: 4653 - RNA, 20 nt, synthetic construct
  source 1..20: mol_type = other RNA
cttaaagttagtctatttgg

SEQ ID NO: 4654 - RNA, 20 nt, synthetic construct
  source 1..20: mol_type = other RNA
gctaagaaacagtatttgta

SEQ ID NO: 4655 - RNA, 20 nt, synthetic construct
  source 1..20: mol_type = other RNA
ctgtctgcattgacaccctg

SEQ ID NO: 4656 - RNA, 20 nt, synthetic construct
  source 1..20: mol_type = other RNA
cccctcagttcacagaccca

SEQ ID NO: 4657 - RNA, 20 nt, synthetic construct
  source 1..20: mol_type = other RNA
tctgacactctaggaaggag

SEQ ID NO: 4658 - RNA, 20 nt, synthetic construct
  source 1..20: mol_type = other RNA
gctactgtttataaaggctg

SEQ ID NO: 4659 - RNA, 20 nt, synthetic construct
  source 1..20: mol_type = other RNA
ccctcttgctccccagggtc

SEQ ID NO: 4660 - RNA, 20 nt, synthetic construct
  source 1..20: mol_type = other RNA
tgtatttgcacatttgctgg

SEQ ID NO: 4661 - RNA, 20 nt, synthetic construct
  source 1..20: mol_type = other RNA
cagcaaatgtgcaaatacaa

SEQ ID NO: 4662 - RNA, 20 nt, synthetic construct
  source 1..20: mol_type = other RNA
ctgctcctcatggtcctcag

SEQ ID NO: 4663 - RNA, 20 nt, synthetic construct
  source 1..20: mol_type = other RNA
gaacaccccagctctctgag

SEQ ID NO: 4664 - RNA, 20 nt, synthetic construct
  source 1..20: mol_type = other RNA
gagaatgcctccaaaacccc

SEQ ID NO: 4665 - RNA, 20 nt, synthetic construct
  source 1..20: mol_type = other RNA
gcctatcagagaatgcctcc

SEQ ID NO: 4666 - RNA, 20 nt, synthetic construct
  source 1..20: mol_type = other RNA
ccacacccctagagtctagg

SEQ ID NO: 4667 - RNA, 20 nt, synthetic construct
  source 1..20: mol_type = other RNA
gcatcacaggctgggccttc

SEQ ID NO: 4668 - RNA, 20 nt, synthetic construct
  source 1..20: mol_type = other RNA
caggctgggccttctagtgt

SEQ ID NO: 4669 - RNA, 20 nt, synthetic construct
  source 1..20: mol_type = other RNA
ttagcaccaactttgaagca

SEQ ID NO: 4670 - RNA, 20 nt, synthetic construct
  source 1..20: mol_type = other RNA
tcattagcaccaactttgaa

SEQ ID NO: 4671 - RNA, 20 nt, synthetic construct
  source 1..20: mol_type = other RNA
ccttgaacttactaaagtag

SEQ ID NO: 4672 - RNA, 20 nt, synthetic construct
  source 1..20: mol_type = other RNA
ggtctaaaaaccagagttct

SEQ ID NO: 4673 - RNA, 20 nt, synthetic construct
  source 1..20: mol_type = other RNA
cagggactcttaaagattag

SEQ ID NO: 4674 - RNA, 20 nt, synthetic construct
  source 1..20: mol_type = other RNA
ttaagagtccctgggattct

SEQ ID NO: 4675 - RNA, 20 nt, synthetic construct
  source 1..20: mol_type = other RNA
aatgaaagaggatgggaaat

SEQ ID NO: 4676 - RNA, 20 nt, synthetic construct
  source 1..20: mol_type = other RNA
tctttcatttgatgtctagc

SEQ ID NO: 4677 - RNA, 20 nt, synthetic construct
  source 1..20: mol_type = other RNA
tccacttcctcctcgtgaat

SEQ ID NO: 4678 - RNA, 20 nt, synthetic construct
  source 1..20: mol_type = other RNA
ggatcctccacttcctcctc

SEQ ID NO: 4679 - RNA, 20 nt, synthetic construct
  source 1..20: mol_type = other RNA
agatggagcaacttgctctg

SEQ ID NO: 4680 - RNA, 20 nt, synthetic construct
  source 1..20: mol_type = other RNA
agagggtataaaattgcaaa

SEQ ID NO: 4681 - RNA, 20 nt, synthetic construct
  source 1..20: mol_type = other RNA
tcaagagggtataaaattgc

SEQ ID NO: 4682 - RNA, 20 nt, synthetic construct
  source 1..20: mol_type = other RNA
atgccctcttcaattaatat

SEQ ID NO: 4683 - RNA, 20 nt, synthetic construct
  source 1..20: mol_type = other RNA
catgccaagtgtgtcctttc

SEQ ID NO: 4684 - RNA, 20 nt, synthetic construct
  source 1..20: mol_type = other RNA
tgcacagaatatacatgaga

SEQ ID NO: 4685 - RNA, 20 nt, synthetic construct
  source 1..20: mol_type = other RNA
ctactttcaaaggctaaggc

SEQ ID NO: 4686 - RNA, 20 nt, synthetic construct
  source 1..20: mol_type = other RNA
gttgcatgcaagaaactgag

SEQ ID NO: 4687 - RNA, 20 nt, synthetic construct
  source 1..20: mol_type = other RNA
gtgtagtccataggcaacca

SEQ ID NO: 4688 - RNA, 20 nt, synthetic construct
  source 1..20: mol_type = other RNA
ctgccttgaagccccagagc

SEQ ID NO: 4689 - RNA, 20 nt, synthetic construct
  source 1..20: mol_type = other RNA
ctgacaaagtaatgccagct

SEQ ID NO: 4690 - RNA, 20 nt, synthetic construct
  source 1..20: mol_type = other RNA
ctggctggggagaaacccaa

SEQ ID NO: 4691 - RNA, 20 nt, synthetic construct
  source 1..20: mol_type = other RNA
caccttgggtttctccccag

SEQ ID NO: 4692 - RNA, 20 nt, synthetic construct
  source 1..20: mol_type = other RNA
attccattgcccacgtaaca

SEQ ID NO: 4693 - RNA, 20 nt, synthetic construct
  source 1..20: mol_type = other RNA
ccaaaatgctcattttgtaa

SEQ ID NO: 4694 - RNA, 20 nt, synthetic construct
  source 1..20: mol_type = other RNA
gtcttcaagggacttgggca

SEQ ID NO: 4695 - RNA, 20 nt, synthetic construct
  source 1..20: mol_type = other RNA
ttacaaaaaaaattaaaaga

SEQ ID NO: 4696 - RNA, 20 nt, synthetic construct
  source 1..20: mol_type = other RNA
tttaattttttttgtaatga

SEQ ID NO: 4697 - RNA, 20 nt, synthetic construct
  source 1..20: mol_type = other RNA
taatttcagcattcatattg

SEQ ID NO: 4698 - RNA, 20 nt, synthetic construct
  source 1..20: mol_type = other RNA
aacacccttaacttgagggc

SEQ ID NO: 4699 - RNA, 20 nt, synthetic construct
  source 1..20: mol_type = other RNA
tagacttggggccatgggaa

SEQ ID NO: 4700 - RNA, 20 nt, synthetic construct
  source 1..20: mol_type = other RNA
accaataccaaatgccatcc

SEQ ID NO: 4701 - RNA, 20 nt, synthetic construct
  source 1..20: mol_type = other RNA
tgcacaaaaatattccctct

SEQ ID NO: 4702 - RNA, 20 nt, synthetic construct
  source 1..20: mol_type = other RNA
ataaaatgtagtacaggtgc

SEQ ID NO: 4703 - RNA, 20 nt, synthetic construct
  source 1..20: mol_type = other RNA
gcacctgtactacattttat

SEQ ID NO: 4704 - RNA, 20 nt, synthetic construct
  source 1..20: mol_type = other RNA
gtcagccttacccccttggc

SEQ ID NO: 4705 - RNA, 20 nt, synthetic construct
  source 1..20: mol_type = other RNA
ggcaagtggcagagtcagaa

SEQ ID NO: 4706 - RNA, 20 nt, synthetic construct
  source 1..20: mol_type = other RNA
cttatctgtaaaaccagcat

SEQ ID NO: 4707 - RNA, 20 nt, synthetic construct
  source 1..20: mol_type = other RNA
gtaaaaccagcattttcaaa

SEQ ID NO: 4708 - RNA, 20 nt, synthetic construct
  source 1..20: mol_type = other RNA
aagcttatgcaaaaggctga

SEQ ID NO: 4709 - RNA, 20 nt, synthetic construct
  source 1..20: mol_type = other RNA
gccttttgcataagctttga

SEQ ID NO: 4710 - RNA, 20 nt, synthetic construct
  source 1..20: mol_type = other RNA
aatcaaagcttatgcaaaag

SEQ ID NO: 4711 - RNA, 20 nt, synthetic construct
  source 1..20: mol_type = other RNA
ttttaaaaacacaaaaaaca

SEQ ID NO: 4712 - RNA, 20 nt, synthetic construct
  source 1..20: mol_type = other RNA
aaacctgtggtttttaatct

SEQ ID NO: 4713 - RNA, 20 nt, synthetic construct
  source 1..20: mol_type = other RNA
gcgagagctcacgacttttc

SEQ ID NO: 4714 - RNA, 20 nt, synthetic construct
  source 1..20: mol_type = other RNA
gctgaggaaacaatcagcga

SEQ ID NO: 4715 - RNA, 20 nt, synthetic construct
  source 1..20: mol_type = other RNA
agtgctgagcacatcctaag

SEQ ID NO: 4716 - RNA, 20 nt, synthetic construct
  source 1..20: mol_type = other RNA
taagcactccatcatggcag

SEQ ID NO: 4717 - RNA, 20 nt, synthetic construct
  source 1..20: mol_type = other RNA
tggcagctcctactactaat

SEQ ID NO: 4718 - RNA, 20 nt, synthetic construct
  source 1..20: mol_type = other RNA
tgttagatataattctattc

SEQ ID NO: 4719 - RNA, 20 nt, synthetic construct
  source 1..20: mol_type = other RNA
aacatgattctttcttgcaa

SEQ ID NO: 4720 - RNA, 20 nt, synthetic construct
  source 1..20: mol_type = other RNA
aatttgagttggattttctg

SEQ ID NO: 4721 - RNA, 20 nt, synthetic construct
  source 1..20: mol_type = other RNA
aactcaaattggattaagca

SEQ ID NO: 4722 - RNA, 20 nt, synthetic construct
  source 1..20: mol_type = other RNA
tgtgagcctgaaaactttgc

SEQ ID NO: 4723 - RNA, 20 nt, synthetic construct
  source 1..20: mol_type = other RNA
caggtcctcccaatcatgga

SEQ ID NO: 4724 - RNA, 20 nt, synthetic construct
  source 1..20: mol_type = other RNA
tggagtaggcactatttggg

SEQ ID NO: 4725 - RNA, 20 nt, synthetic construct
  source 1..20: mol_type = other RNA
gcagccatgggaatgtcacc

SEQ ID NO: 4726 - RNA, 20 nt, synthetic construct
  source 1..20: mol_type = other RNA
ctgactggctctgacctgca

SEQ ID NO: 4727 - RNA, 20 nt, synthetic construct
  source 1..20: mol_type = other RNA
aacttttgccccttatgggt

SEQ ID NO: 4728 - RNA, 20 nt, synthetic construct
  source 1..20: mol_type = other RNA
atctaacttttgccccttat

SEQ ID NO: 4729 - RNA, 20 nt, synthetic construct
  source 1..20: mol_type = other RNA
tcttgaaggatctatctaac

SEQ ID NO: 4730 - RNA, 20 nt, synthetic construct
  source 1..20: mol_type = other RNA
ttcaagaggattatgggagg

SEQ ID NO: 4731 - RNA, 20 nt, synthetic construct
  source 1..20: mol_type = other RNA
tagaggctctgtttgctttc

SEQ ID NO: 4732 - RNA, 20 nt, synthetic construct
  source 1..20: mol_type = other RNA
gttgaggtatcatagaggct

SEQ ID NO: 4733 - RNA, 20 nt, synthetic construct
  source 1..20: mol_type = other RNA
ttatgattttagcttcatgc

SEQ ID NO: 4734 - RNA, 20 nt, synthetic construct
  source 1..20: mol_type = other RNA
taaggatctgggtgtgagtt

SEQ ID NO: 4735 - RNA, 20 nt, synthetic construct
  source 1..20: mol_type = other RNA
gggtgtgagttctggctctc

SEQ ID NO: 4736 - RNA, 20 nt, synthetic construct
  source 1..20: mol_type = other RNA
tccatgtgacattgggcagt

SEQ ID NO: 4737 - RNA, 20 nt, synthetic construct
  source 1..20: mol_type = other RNA
cttttagcctccgctttctc

SEQ ID NO: 4738 - RNA, 20 nt, synthetic construct
  source 1..20: mol_type = other RNA
catatgtaagatgagaaagc

SEQ ID NO: 4739 - RNA, 20 nt, synthetic construct
  source 1..20: mol_type = other RNA
tcacaattatctcatatgta

SEQ ID NO: 4740 - RNA, 20 nt, synthetic construct
  source 1..20: mol_type = other RNA
tacatatgagataattgtga

SEQ ID NO: 4741 - RNA, 20 nt, synthetic construct
  source 1..20: mol_type = other RNA
taatcctcacaattatctca

SEQ ID NO: 4742 - RNA, 20 nt, synthetic construct
  source 1..20: mol_type = other RNA
tcatcatcaccgtccaccac

SEQ ID NO: 4743 - RNA, 20 nt, synthetic construct
  source 1..20: mol_type = other RNA
tcatcaccgtccaccactac

SEQ ID NO: 4744 - RNA, 20 nt, synthetic construct
  source 1..20: mol_type = other RNA
tcaccgtccaccactaccac

SEQ ID NO: 4745 - RNA, 20 nt, synthetic construct
  source 1..20: mol_type = other RNA
ccgtccaccactaccaccat

SEQ ID NO: 4746 - RNA, 20 nt, synthetic construct
  source 1..20: mol_type = other RNA
tccccatcaacatcatcgcc

SEQ ID NO: 4747 - RNA, 20 nt, synthetic construct
  source 1..20: mol_type = other RNA
ccatcaacatcatcgccacc

SEQ ID NO: 4748 - RNA, 20 nt, synthetic construct
  source 1..20: mol_type = other RNA
acatcatcgccaccactatc

SEQ ID NO: 4749 - RNA, 20 nt, synthetic construct
  source 1..20: mol_type = other RNA
tcgccaccactatcatcatt

SEQ ID NO: 4750 - RNA, 20 nt, synthetic construct
  source 1..20: mol_type = other RNA
ccaccactatcatcattctt

SEQ ID NO: 4751 - RNA, 20 nt, synthetic construct
  source 1..20: mol_type = other RNA
tcattcttactggcactacc

SEQ ID NO: 4752 - RNA, 20 nt, synthetic construct
  source 1..20: mol_type = other RNA
ttcttactggcactaccatc

SEQ ID NO: 4753 - RNA, 20 nt, synthetic construct
  source 1..20: mol_type = other RNA
ccatcaccaccattccacca

SEQ ID NO: 4754 - RNA, 20 nt, synthetic construct
  source 1..20: mol_type = other RNA
ccaccattccaccaccatca

SEQ ID NO: 4755 - RNA, 20 nt, synthetic construct
  source 1..20: mol_type = other RNA
ccaatatcatcactgtcaac

SEQ ID NO: 4756 - RNA, 20 nt, synthetic construct
  source 1..20: mol_type = other RNA
tcactgtcaacatcattacc

SEQ ID NO: 4757 - RNA, 20 nt, synthetic construct
  source 1..20: mol_type = other RNA
ctgtcaacatcattaccacc

SEQ ID NO: 4758 - RNA, 20 nt, synthetic construct
  source 1..20: mol_type = other RNA
ttaccaccatcaccatcacc

SEQ ID NO: 4759 - RNA, 20 nt, synthetic construct
  source 1..20: mol_type = other RNA
ccatcaccaccaccatcatc

SEQ ID NO: 4760 - RNA, 20 nt, synthetic construct
  source 1..20: mol_type = other RNA
ccaccaccatcatcattact

SEQ ID NO: 4761 - RNA, 20 nt, synthetic construct
  source 1..20: mol_type = other RNA
tcattactaccactaccact

SEQ ID NO: 4762 - RNA, 20 nt, synthetic construct
  source 1..20: mol_type = other RNA
ttactaccactaccactact

SEQ ID NO: 4763 - RNA, 20 nt, synthetic construct
  source 1..20: mol_type = other RNA
ccatcaccaccattccacca

SEQ ID NO: 4764 - RNA, 20 nt, synthetic construct
  source 1..20: mol_type = other RNA
ccaccattccaccaccatca

SEQ ID NO: 4765 - RNA, 20 nt, synthetic construct
  source 1..20: mol_type = other RNA
ccaatatcatcactctcaac

SEQ ID NO: 4766 - RNA, 20 nt, synthetic construct
  source 1..20: mol_type = other RNA
tcactctcaacatcatcacc

SEQ ID NO: 4767 - RNA, 20 nt, synthetic construct
  source 1..20: mol_type = other RNA
ctctcaacatcatcaccatc

SEQ ID NO: 4768 - RNA, 20 nt, synthetic construct
  source 1..20: mol_type = other RNA
tcaccatcaccatcaccacc

SEQ ID NO: 4769 - RNA, 20 nt, synthetic construct
  source 1..20: mol_type = other RNA
ccatcaccatcaccaccacc

SEQ ID NO: 4770 - RNA, 20 nt, synthetic construct
  source 1..20: mol_type = other RNA
ccatcaccaccaccatcatc

SEQ ID NO: 4771 - RNA, 20 nt, synthetic construct
  source 1..20: mol_type = other RNA
ccaccaccatcatcatcatt

SEQ ID NO: 4772 - RNA, 20 nt, synthetic construct
  source 1..20: mol_type = other RNA
tcatcattactaccactacc

SEQ ID NO: 4773 - RNA, 20 nt, synthetic construct
  source 1..20: mol_type = other RNA
tcattactaccactaccact

SEQ ID NO: 4774 - RNA, 20 nt, synthetic construct
  source 1..20: mol_type = other RNA
ttactaccactaccactact

SEQ ID NO: 4775 - RNA, 20 nt, synthetic construct
  source 1..20: mol_type = other RNA
ccatcaccactgtcccacta

SEQ ID NO: 4776 - RNA, 20 nt, synthetic construct
  source 1..20: mol_type = other RNA
ccactgtcccactactatca

SEQ ID NO: 4777 - RNA, 20 nt, synthetic construct
  source 1..20: mol_type = other RNA
gcatgacatcaccatcacca

SEQ ID NO: 4778 - RNA, 20 nt, synthetic construct
  source 1..20: mol_type = other RNA
ccatcaccaccaccatcatc

SEQ ID NO: 4779 - RNA, 20 nt, synthetic construct
  source 1..20: mol_type = other RNA
ccaccaccatcatcattacc

SEQ ID NO: 4780 - RNA, 20 nt, synthetic construct
  source 1..20: mol_type = other RNA
tcattaccaccgctactacc

SEQ ID NO: 4781 - RNA, 20 nt, synthetic construct
  source 1..20: mol_type = other RNA
ttaccaccgctactaccaac

SEQ ID NO: 4782 - RNA, 20 nt, synthetic construct
  source 1..20: mol_type = other RNA
ccatcaccacaattctactg

SEQ ID NO: 4783 - RNA, 20 nt, synthetic construct
  source 1..20: mol_type = other RNA
ccacaattctactgccatca

SEQ ID NO: 4784 - RNA, 20 nt, synthetic construct
  source 1..20: mol_type = other RNA
ccattaacattaccaccacc

SEQ ID NO: 4785 - RNA, 20 nt, synthetic construct
  source 1..20: mol_type = other RNA
tcactatcaccatcaccacc

SEQ ID NO: 4786 - RNA, 20 nt, synthetic construct
  source 1..20: mol_type = other RNA
ctatcaccatcaccaccatc

SEQ ID NO: 4787 - RNA, 20 nt, synthetic construct
  source 1..20: mol_type = other RNA
ccatcaccaccatcatcacc

SEQ ID NO: 4788 - RNA, 20 nt, synthetic construct
  source 1..20: mol_type = other RNA
ccaccatcatcaccactgcc

SEQ ID NO: 4789 - RNA, 20 nt, synthetic construct
  source 1..20: mol_type = other RNA
tcaccactgccattatcact

SEQ ID NO: 4790 - RNA, 20 nt, synthetic construct
  source 1..20: mol_type = other RNA
ccactgccattatcactgcc

SEQ ID NO: 4791 - RNA, 20 nt, synthetic construct
  source 1..20: mol_type = other RNA
ctgccaccatcatcactatc

SEQ ID NO: 4792 - RNA, 20 nt, synthetic construct
  source 1..20: mol_type = other RNA
tcactatcctctatatttcc

SEQ ID NO: 4793 - RNA, 20 nt, synthetic construct
  source 1..20: mol_type = other RNA
ctatcctctatatttcctca

SEQ ID NO: 4794 - RNA, 20 nt, synthetic construct
  source 1..20: mol_type = other RNA
tctatatttcctcatctgta

SEQ ID NO: 4795 - RNA, 20 nt, synthetic construct
  source 1..20: mol_type = other RNA
gtattatcattactaccacc

SEQ ID NO: 4796 - RNA, 20 nt, synthetic construct
  source 1..20: mol_type = other RNA
ttactaccaccatcactatc

SEQ ID NO: 4797 - RNA, 20 nt, synthetic construct
  source 1..20: mol_type = other RNA
ctatcaccaccatcgtcacc

SEQ ID NO: 4798 - RNA, 20 nt, synthetic construct
  source 1..20: mol_type = other RNA
ccaccatcgtcaccatcata

SEQ ID NO: 4799 - RNA, 20 nt, synthetic construct
  source 1..20: mol_type = other RNA
tcaccatcataatcaccatc

SEQ ID NO: 4800 - RNA, 20 nt, synthetic construct
  source 1..20: mol_type = other RNA
taatcaccatcaacaccatc

SEQ ID NO: 4801 - RNA, 20 nt, synthetic construct
  source 1..20: mol_type = other RNA
ccatcaacaccatctccaat

SEQ ID NO: 4802 - RNA, 20 nt, synthetic construct
  source 1..20: mol_type = other RNA
acaccatctccaataccacc

SEQ ID NO: 4803 - RNA, 20 nt, synthetic construct
  source 1..20: mol_type = other RNA
ccaataccaccatcactgta

SEQ ID NO: 4804 - RNA, 20 nt, synthetic construct
  source 1..20: mol_type = other RNA
ctgtaaccatcatcaccacc

SEQ ID NO: 4805 - RNA, 20 nt, synthetic construct
  source 1..20: mol_type = other RNA
tggtggtggtgatgatggtt

SEQ ID NO: 4806 - RNA, 20 nt, synthetic construct
  source 1..20: mol_type = other RNA
tcaccaccaccatgatcact

SEQ ID NO: 4807 - RNA, 20 nt, synthetic construct
  source 1..20: mol_type = other RNA
ccaccaccatgatcactatc

SEQ ID NO: 4808 - RNA, 20 nt, synthetic construct
  source 1..20: mol_type = other RNA
ttgtgatgatggtgatagtg

SEQ ID NO: 4809 - RNA, 20 nt, synthetic construct
  source 1..20: mol_type = other RNA
ctatcaccatcatcacaatg

SEQ ID NO: 4810 - RNA, 20 nt, synthetic construct
  source 1..20: mol_type = other RNA
ccatcatcacaatgatcact

SEQ ID NO: 4811 - RNA, 20 nt, synthetic construct
  source 1..20: mol_type = other RNA
tcacaatgatcactgtaacc

SEQ ID NO: 4812 - RNA, 20 nt, synthetic construct
  source 1..20: mol_type = other RNA
caatgatcactgtaaccatc

SEQ ID NO: 4813 - RNA, 20 nt, synthetic construct
  source 1..20: mol_type = other RNA
ctgtaaccatcattactacc

SEQ ID NO: 4814 - RNA, 20 nt, synthetic construct
  source 1..20: mol_type = other RNA
ttactacccaccaccatcac

SEQ ID NO: 4815 - RNA, 20 nt, synthetic construct
  source 1..20: mol_type = other RNA
ccactactccaccaccatca

SEQ ID NO: 4816 - RNA, 20 nt, synthetic construct
  source 1..20: mol_type = other RNA
ccattatcattaccatcacc

SEQ ID NO: 4817 - RNA, 20 nt, synthetic construct
  source 1..20: mol_type = other RNA
ttaccatcaccattatcacc

SEQ ID NO: 4818 - RNA, 20 nt, synthetic construct
  source 1..20: mol_type = other RNA
ccattatcaccaccatcatc

SEQ ID NO: 4819 - RNA, 20 nt, synthetic construct
  source 1..20: mol_type = other RNA
ccaccatcatcatcaccagc

SEQ ID NO: 4820 - RNA, 20 nt, synthetic construct
  source 1..20: mol_type = other RNA
tcatcaccagcaccaccatc

SEQ ID NO: 4821 - RNA, 20 nt, synthetic construct
  source 1..20: mol_type = other RNA
tcaccagcaccaccatcatc

SEQ ID NO: 4822 - RNA, 20 nt, synthetic construct
  source 1..20: mol_type = other RNA
ccagcaccaccatcatcacc

SEQ ID NO: 4823 - RNA, 20 nt, synthetic construct
  source 1..20: mol_type = other RNA
tcaccagcaccaccatcacc

SEQ ID NO: 4824 - RNA, 20 nt, synthetic construct
  source 1..20: mol_type = other RNA
ccagcaccaccatcaccatc

SEQ ID NO: 4825 - RNA, 20 nt, synthetic construct
  source 1..20: mol_type = other RNA
ccatcaccatcattaacacc

SEQ ID NO: 4826 - RNA, 20 nt, synthetic construct
  source 1..20: mol_type = other RNA
ccatcattaacaccatcact

SEQ ID NO: 4827 - RNA, 20 nt, synthetic construct
  source 1..20: mol_type = other RNA
ttaacaccatcactatcacc

SEQ ID NO: 4828 - RNA, 20 nt, synthetic construct
  source 1..20: mol_type = other RNA
ctatcaccattggtttaatc

SEQ ID NO: 4829 - RNA, 20 nt, synthetic construct
  source 1..20: mol_type = other RNA
ccattggtttaatcatcacc

SEQ ID NO: 4830 - RNA, 20 nt, synthetic construct
  source 1..20: mol_type = other RNA
tcaccaccatcatcataaat

SEQ ID NO: 4831 - RNA, 20 nt, synthetic construct
  source 1..20: mol_type = other RNA
ccaccatcatcataaataaa

SEQ ID NO: 4832 - RNA, 20 nt, synthetic construct
  source 1..20: mol_type = other RNA
tcataaataaacatcacata

SEQ ID NO: 4833 - RNA, 20 nt, synthetic construct
  source 1..20: mol_type = other RNA
taaataaacatcacataacc

SEQ ID NO: 4834 - RNA, 20 nt, synthetic construct
  source 1..20: mol_type = other RNA
cataaccagggtgtagctgg

SEQ ID NO: 4835 - RNA, 20 nt, synthetic construct
  source 1..20: mol_type = other RNA
acacatttctaaccaccatc

SEQ ID NO: 4836 - RNA, 20 nt, synthetic construct
  source 1..20: mol_type = other RNA
tgcactgggctcccagtctc

SEQ ID NO: 4837 - RNA, 20 nt, synthetic construct
  source 1..20: mol_type = other RNA
ttttctcagtggacatgtgg

SEQ ID NO: 4838 - RNA, 20 nt, synthetic construct
  source 1..20: mol_type = other RNA
actttctacatgttaataat

SEQ ID NO: 4839 - RNA, 20 nt, synthetic construct
  source 1..20: mol_type = other RNA
gatgtcattattaacatgta

SEQ ID NO: 4840 - RNA, 20 nt, synthetic construct
  source 1..20: mol_type = other RNA
gatcaatgggtgttctcagc

SEQ ID NO: 4841 - RNA, 20 nt, synthetic construct
  source 1..20: mol_type = other RNA
atgggtgttctcagcttctc

SEQ ID NO: 4842 - RNA, 20 nt, synthetic construct
  source 1..20: mol_type = other RNA
gggaaggtctggacacatga

SEQ ID NO: 4843 - RNA, 20 nt, synthetic construct
  source 1..20: mol_type = other RNA
aaatccgggaaggtctggac

SEQ ID NO: 4844 - RNA, 20 nt, synthetic construct
  source 1..20: mol_type = other RNA
gagagggcttcaatcctcag

SEQ ID NO: 4845 - RNA, 20 nt, synthetic construct
  source 1..20: mol_type = other RNA
cgtggccaatgtagagatgg

SEQ ID NO: 4846 - RNA, 20 nt, synthetic construct
  source 1..20: mol_type = other RNA
ggatgtttgccttgctcaga

SEQ ID NO: 4847 - RNA, 20 nt, synthetic construct
  source 1..20: mol_type = other RNA
gagagcagtgacacctaact

SEQ ID NO: 4848 - RNA, 20 nt, synthetic construct
  source 1..20: mol_type = other RNA
ggagtttacatgagcagcgt

SEQ ID NO: 4849 - RNA, 20 nt, synthetic construct
  source 1..20: mol_type = other RNA
aagtgcagtcaagggctttg

SEQ ID NO: 4850 - RNA, 20 nt, synthetic construct
  source 1..20: mol_type = other RNA
ctgggcatgtccatctggaa

SEQ ID NO: 4851 - RNA, 20 nt, synthetic construct
  source 1..20: mol_type = other RNA
ggaaaaacagcatttcctct

SEQ ID NO: 4852 - RNA, 20 nt, synthetic construct
  source 1..20: mol_type = other RNA
ggacaatttccacctactat

SEQ ID NO: 4853 - RNA, 20 nt, synthetic construct
  source 1..20: mol_type = other RNA
caagggtgaggcaaagtaat

SEQ ID NO: 4854 - RNA, 20 nt, synthetic construct
  source 1..20: mol_type = other RNA
cacagtaacattgccaaatt

SEQ ID NO: 4855 - RNA, 20 nt, synthetic construct
  source 1..20: mol_type = other RNA
tcacaacggtcctatgaaac

SEQ ID NO: 4856 - RNA, 20 nt, synthetic construct
  source 1..20: mol_type = other RNA
cacttaatcctcacaacggt

SEQ ID NO: 4857 - RNA, 20 nt, synthetic construct
  source 1..20: mol_type = other RNA
acctttccaggcacaagctc

SEQ ID NO: 4858 - RNA, 20 nt, synthetic construct
  source 1..20: mol_type = other RNA
tttactaagaatcaaccttt

SEQ ID NO: 4859 - RNA, 20 nt, synthetic construct
  source 1..20: mol_type = other RNA
ccaaaggaaacctcatgccc

SEQ ID NO: 4860 - RNA, 20 nt, synthetic construct
  source 1..20: mol_type = other RNA
tgagtttttaaaaaaatgct

SEQ ID NO: 4861 - RNA, 20 nt, synthetic construct
  source 1..20: mol_type = other RNA
atgttatatcatgagttttt

SEQ ID NO: 4862 - RNA, 20 nt, synthetic construct
  source 1..20: mol_type = other RNA
taatgcacaatttcctatac

SEQ ID NO: 4863 - RNA, 20 nt, synthetic construct
  source 1..20: mol_type = other RNA
gtataggaaattgtgcatta

SEQ ID NO: 4864 - RNA, 20 nt, synthetic construct
  source 1..20: mol_type = other RNA
gaaaaaagtatataaaaaga

SEQ ID NO: 4865 - RNA, 20 nt, synthetic construct
  source 1..20: mol_type = other RNA
aaatgatttttacaatgtaa

SEQ ID NO: 4866 - RNA, 20 nt, synthetic construct
  source 1..20: mol_type = other RNA
ttttgatagcttcaaaagaa

SEQ ID NO: 4867 - RNA, 20 nt, synthetic construct
  source 1..20: mol_type = other RNA
gggctttgtcatgctgcttt

SEQ ID NO: 4868 - RNA, 20 nt, synthetic construct
  source 1..20: mol_type = other RNA
aggtcttgggaacataaaat

SEQ ID NO: 4869 - RNA, 20 nt, synthetic construct
  source 1..20: mol_type = other RNA
tatatgacatttgcacttta

SEQ ID NO: 4870 - RNA, 20 nt, synthetic construct
  source 1..20: mol_type = other RNA
ttttaaacacaggtaccttt

SEQ ID NO: 4871 - RNA, 20 nt, synthetic construct
  source 1..20: mol_type = other RNA
tttcttacctggcaactgtc

SEQ ID NO: 4872 - RNA, 20 nt, synthetic construct
  source 1..20: mol_type = other RNA
atagatcaaagtcttgtgct

SEQ ID NO: 4873 - RNA, 20 nt, synthetic construct
  source 1..20: mol_type = other RNA
aagtcttgtgctctcccgtc

SEQ ID NO: 4874 - RNA, 20 nt, synthetic construct
  source 1..20: mol_type = other RNA
ggggagtttctgagcaacac

SEQ ID NO: 4875 - RNA, 20 nt, synthetic construct
  source 1..20: mol_type = other RNA
gaatatgcattcagggacag

SEQ ID NO: 4876 - RNA, 20 nt, synthetic construct
  source 1..20: mol_type = other RNA
gtccctgaatgcatattcag

SEQ ID NO: 4877 - RNA, 20 nt, synthetic construct
  source 1..20: mol_type = other RNA
tctaaggagacgtcttgggg

SEQ ID NO: 4878 - RNA, 20 nt, synthetic construct
  source 1..20: mol_type = other RNA
aaggagacgtcttggggctt

SEQ ID NO: 4879 - RNA, 20 nt, synthetic construct
  source 1..20: mol_type = other RNA
ggaactcaagccccaagacg

SEQ ID NO: 4880 - RNA, 20 nt, synthetic construct
  source 1..20: mol_type = other RNA
atagcaagggagccgtaagt

SEQ ID NO: 4881 - RNA, 20 nt, synthetic construct
  source 1..20: mol_type = other RNA
ttgttaagtgtgtgtaattt

SEQ ID NO: 4882 - RNA, 20 nt, synthetic construct
  source 1..20: mol_type = other RNA
tgcatgcattgcttcctaac

SEQ ID NO: 4883 - RNA, 20 nt, synthetic construct
  source 1..20: mol_type = other RNA
cttgtgaatcctgcatgcat

SEQ ID NO: 4884 - RNA, 20 nt, synthetic construct
  source 1..20: mol_type = other RNA
cttagttttttcctgggaaa

SEQ ID NO: 4885 - RNA, 20 nt, synthetic construct
  source 1..20: mol_type = other RNA
gcagtgcttaagtacttagc

SEQ ID NO: 4886 - RNA, 20 nt, synthetic construct
  source 1..20: mol_type = other RNA
gaaaggaacttatgagcata

SEQ ID NO: 4887 - RNA, 20 nt, synthetic construct
  source 1..20: mol_type = other RNA
atatgtacattttcccagta

SEQ ID NO: 4888 - RNA, 20 nt, synthetic construct
  source 1..20: mol_type = other RNA
ttctcttatccatatgtaca

SEQ ID NO: 4889 - RNA, 20 nt, synthetic construct
  source 1..20: mol_type = other RNA
catattaaaaggttggcagc

SEQ ID NO: 4890 - RNA, 20 nt, synthetic construct
  source 1..20: mol_type = other RNA
aagtaacaaaccttgaaaca

SEQ ID NO: 4891 - RNA, 20 nt, synthetic construct
  source 1..20: mol_type = other RNA
ttccctcaatccaagtaaca

SEQ ID NO: 4892 - RNA, 20 nt, synthetic construct
  source 1..20: mol_type = other RNA
aacgaagacactgttcccag

SEQ ID NO: 4893 - RNA, 20 nt, synthetic construct
  source 1..20: mol_type = other RNA
aaataagtgcagagtttatt

SEQ ID NO: 4894 - RNA, 20 nt, synthetic construct
  source 1..20: mol_type = other RNA
catctatttttatttttatt

SEQ ID NO: 4895 - RNA, 20 nt, synthetic construct
  source 1..20: mol_type = other RNA
atttttatttttatttttta

SEQ ID NO: 4896 - RNA, 20 nt, synthetic construct
  source 1..20: mol_type = other RNA
atgtaacaaacctgcacatt

SEQ ID NO: 4897 - RNA, 20 nt, synthetic construct
  source 1..20: mol_type = other RNA
acctgtcatctaattcggta

SEQ ID NO: 4898 - RNA, 20 nt, synthetic construct
  source 1..20: mol_type = other RNA
aattcggtatttcttttagt

SEQ ID NO: 4899 - RNA, 20 nt, synthetic construct
  source 1..20: mol_type = other RNA
ctcccctagccctccacccc

SEQ ID NO: 4900 - RNA, 20 nt, synthetic construct
  source 1..20: mol_type = other RNA
cacacctgggcctgtcaagg

SEQ ID NO: 4901 - RNA, 20 nt, synthetic construct
  source 1..20: mol_type = other RNA
ttctcagcaaactaacacaa

SEQ ID NO: 4902 - RNA, 20 nt, synthetic construct
  source 1..20: mol_type = other RNA
atgtccctgcaaaggacatg

SEQ ID NO: 4903 - RNA, 20 nt, synthetic construct
  source 1..20: mol_type = other RNA
ttttttatggctgcatagaa

SEQ ID NO: 4904 - RNA, 20 nt, synthetic construct
  source 1..20: mol_type = other RNA
atgttagattggataaaatg

SEQ ID NO: 4905 - RNA, 20 nt, synthetic construct
  source 1..20: mol_type = other RNA
aatctaacattgatgggcaa

SEQ ID NO: 4906 - RNA, 20 nt, synthetic construct
  source 1..20: mol_type = other RNA
aacattgatgggcaattggg

SEQ ID NO: 4907 - RNA, 20 nt, synthetic construct
  source 1..20: mol_type = other RNA
ttctgctatgaaaacacatg

SEQ ID NO: 4908 - RNA, 20 nt, synthetic construct
  source 1..20: mol_type = other RNA
tctgggtatatacccagtaa

SEQ ID NO: 4909 - RNA, 20 nt, synthetic construct
  source 1..20: mol_type = other RNA
cattactgggtatataccca

SEQ ID NO: 4910 - RNA, 20 nt, synthetic construct
  source 1..20: mol_type = other RNA
agcaccagaaacaccatttg

SEQ ID NO: 4911 - RNA, 20 nt, synthetic construct
  source 1..20: mol_type = other RNA
ttgaggaatcaccacactgt

SEQ ID NO: 4912 - RNA, 20 nt, synthetic construct
  source 1..20: mol_type = other RNA
ccacactgtcttccacaatg

SEQ ID NO: 4913 - RNA, 20 nt, synthetic construct
  source 1..20: mol_type = other RNA
aggcattcctatttctccac

SEQ ID NO: 4914 - RNA, 20 nt, synthetic construct
  source 1..20: mol_type = other RNA
tctccagcatctgttgtttc

SEQ ID NO: 4915 - RNA, 20 nt, synthetic construct
  source 1..20: mol_type = other RNA
ttaaaaagtcaggaaacaac

SEQ ID NO: 4916 - RNA, 20 nt, synthetic construct
  source 1..20: mol_type = other RNA
gttgtttcctgactttttaa

SEQ ID NO: 4917 - RNA, 20 nt, synthetic construct
  source 1..20: mol_type = other RNA
catgccagttagaatggcga

SEQ ID NO: 4918 - RNA, 20 nt, synthetic construct
  source 1..20: mol_type = other RNA
ccattctaactggcatgaga

SEQ ID NO: 4919 - RNA, 20 nt, synthetic construct
  source 1..20: mol_type = other RNA
aaaccacaatgagataccat

SEQ ID NO: 4920 - RNA, 20 nt, synthetic construct
  source 1..20: mol_type = other RNA
cattgtggttttgatttgca

SEQ ID NO: 4921 - RNA, 20 nt, synthetic construct
  source 1..20: mol_type = other RNA
ttagagaaatgcaaatcaaa

SEQ ID NO: 4922 - RNA, 20 nt, synthetic construct
  source 1..20: mol_type = other RNA
ctgatcattagagaaatgca

SEQ ID NO: 4923 - RNA, 20 nt, synthetic construct
  source 1..20: mol_type = other RNA
tcactgatcattagagaaat

SEQ ID NO: 4924 - RNA, 20 nt, synthetic construct
  source 1..20: mol_type = other RNA
gtgatgatgagcttttctca

SEQ ID NO: 4925 - RNA, 20 nt, synthetic construct
  source 1..20: mol_type = other RNA
gttcatatcctttgcccact

SEQ ID NO: 4926 - RNA, 20 nt, synthetic construct
  source 1..20: mol_type = other RNA
aaaagtgggcaaaggatatg

SEQ ID NO: 4927 - RNA, 20 nt, synthetic construct
  source 1..20: mol_type = other RNA
tttgcccactttttgatggt

SEQ ID NO: 4928 - RNA, 20 nt, synthetic construct
  source 1..20: mol_type = other RNA
acaaagaacttaaacaaatt

SEQ ID NO: 4929 - RNA, 20 nt, synthetic construct
  source 1..20: mol_type = other RNA
agaatctacaaagaacttaa

SEQ ID NO: 4930 - RNA, 20 nt, synthetic construct
  source 1..20: mol_type = other RNA
gacaaaaggctaatatccag

SEQ ID NO: 4931 - RNA, 20 nt, synthetic construct
  source 1..20: mol_type = other RNA
atctgacaaaaggctaatat

SEQ ID NO: 4932 - RNA, 20 nt, synthetic construct
  source 1..20: mol_type = other RNA
atccatctgacaaaaggcta

SEQ ID NO: 4933 - RNA, 20 nt, synthetic construct
  source 1..20: mol_type = other RNA
tattatgtaggttgcctgtt

SEQ ID NO: 4934 - RNA, 20 nt, synthetic construct
  source 1..20: mol_type = other RNA
gagtgaacaggcaacctaca

SEQ ID NO: 4935 - RNA, 20 nt, synthetic construct
  source 1..20: mol_type = other RNA
tcggagtgaacaggcaacct

SEQ ID NO: 4936 - RNA, 20 nt, synthetic construct
  source 1..20: mol_type = other RNA
aattaaaccaaagagcttct

SEQ ID NO: 4937 - RNA, 20 nt, synthetic construct
  source 1..20: mol_type = other RNA
catttgtctattttggcttt

SEQ ID NO: 4938 - RNA, 20 nt, synthetic construct
  source 1..20: mol_type = other RNA
atcttgagttaatttttgta

SEQ ID NO: 4939 - RNA, 20 nt, synthetic construct
  source 1..20: mol_type = other RNA
tgagttaatttttgtataag

SEQ ID NO: 4940 - RNA, 20 nt, synthetic construct
  source 1..20: mol_type = other RNA
aaagagacaaagaagggcat

SEQ ID NO: 4941 - RNA, 20 nt, synthetic construct
  source 1..20: mol_type = other RNA
ttgttggcttaaagtatatt

SEQ ID NO: 4942 - RNA, 20 nt, synthetic construct
  source 1..20: mol_type = other RNA
gagactagaattgcaatccc

SEQ ID NO: 4943 - RNA, 20 nt, synthetic construct
  source 1..20: mol_type = other RNA
ctgcttttttttttcttttt

SEQ ID NO: 4944 - RNA, 20 nt, synthetic construct
  source 1..20: mol_type = other RNA
ctttattttgagcctatgta

SEQ ID NO: 4945 - RNA, 20 nt, synthetic construct
  source 1..20: mol_type = other RNA
catgtgcagacatacatagg

SEQ ID NO: 4946 - RNA, 20 nt, synthetic construct
  source 1..20: mol_type = other RNA
aattcacacataacaatatt

SEQ ID NO: 4947 - RNA, 20 nt, synthetic construct
  source 1..20: mol_type = other RNA
taatgacaggatcaaattca

SEQ ID NO: 4948 - RNA, 20 nt, synthetic construct
  source 1..20: mol_type = other RNA
tgtcattatgatgctagcgg

SEQ ID NO: 4949 - RNA, 20 nt, synthetic construct
  source 1..20: mol_type = other RNA
actaatgggcaaaataaccc

SEQ ID NO: 4950 - RNA, 20 nt, synthetic construct
  source 1..20: mol_type = other RNA
acactatgaagaaactgcat

SEQ ID NO: 4951 - RNA, 20 nt, synthetic construct
  source 1..20: mol_type = other RNA
ttcagcatttgcttgtctgt

SEQ ID NO: 4952 - RNA, 20 nt, synthetic construct
  source 1..20: mol_type = other RNA
tttacagacaagcaaatgct

SEQ ID NO: 4953 - RNA, 20 nt, synthetic construct
  source 1..20: mol_type = other RNA
ctctgcagaaacccaacaag

SEQ ID NO: 4954 - RNA, 20 nt, synthetic construct
  source 1..20: mol_type = other RNA
gactaacagtggatctctct

SEQ ID NO: 4955 - RNA, 20 nt, synthetic construct
  source 1..20: mol_type = other RNA
actgttagtctgattggctt

SEQ ID NO: 4956 - RNA, 20 nt, synthetic construct
  source 1..20: mol_type = other RNA
tcagattcaccaaggttgaa

SEQ ID NO: 4957 - RNA, 20 nt, synthetic construct
  source 1..20: mol_type = other RNA
gacgattatgtcttgaggtg

SEQ ID NO: 4958 - RNA, 20 nt, synthetic construct
  source 1..20: mol_type = other RNA
ttgtggtgttctctgtattt

SEQ ID NO: 4959 - RNA, 20 nt, synthetic construct
  source 1..20: mol_type = other RNA
aggagagcttccccaaccta

SEQ ID NO: 4960 - RNA, 20 nt, synthetic construct
  source 1..20: mol_type = other RNA
tgaagagtgttttccaactt

SEQ ID NO: 4961 - RNA, 20 nt, synthetic construct
  source 1..20: mol_type = other RNA
ctttcaggtacatcaatcaa

SEQ ID NO: 4962 - RNA, 20 nt, synthetic construct
  source 1..20: mol_type = other RNA
acatttgattgatgtacctg

SEQ ID NO: 4963 - RNA, 20 nt, synthetic construct
  source 1..20: mol_type = other RNA
atcaaatgtagatttggtct

SEQ ID NO: 4964 - RNA, 20 nt, synthetic construct
  source 1..20: mol_type = other RNA
aatgtagatttggtcttttc

SEQ ID NO: 4965 - RNA, 20 nt, synthetic construct
  source 1..20: mol_type = other RNA
tctattcttgtcttcttgct

SEQ ID NO: 4966 - RNA, 20 nt, synthetic construct
  source 1..20: mol_type = other RNA
acttaatgaaataaagcaag

SEQ ID NO: 4967 - RNA, 20 nt, synthetic construct
  source 1..20: mol_type = other RNA
gagattgaagatcaacttaa

SEQ ID NO: 4968 - RNA, 20 nt, synthetic construct
  source 1..20: mol_type = other RNA
tcaatctctgatatcctttc

SEQ ID NO: 4969 - RNA, 20 nt, synthetic construct
  source 1..20: mol_type = other RNA
agcaaaagaaaggatatcag

SEQ ID NO: 4970 - RNA, 20 nt, synthetic construct
  source 1..20: mol_type = other RNA
ctgatatcctttcttttgct

SEQ ID NO: 4971 - RNA, 20 nt, synthetic construct
  source 1..20: mol_type = other RNA
atcaagcaaaagaaaggata

SEQ ID NO: 4972 - RNA, 20 nt, synthetic construct
  source 1..20: mol_type = other RNA
tttcttttgcttgatcgatt

SEQ ID NO: 4973 - RNA, 20 nt, synthetic construct
  source 1..20: mol_type = other RNA
atagccaaatcgatcaagca

SEQ ID NO: 4974 - RNA, 20 nt, synthetic construct
  source 1..20: mol_type = other RNA
atttggctattgatacttgt

SEQ ID NO: 4975 - RNA, 20 nt, synthetic construct
  source 1..20: mol_type = other RNA
gactgaaaaacacagcataa

SEQ ID NO: 4976 - RNA, 20 nt, synthetic construct
  source 1..20: mol_type = other RNA
ggtcatttatgttcttctct

SEQ ID NO: 4977 - RNA, 20 nt, synthetic construct
  source 1..20: mol_type = other RNA
tccgagctaaagcagcatgt

SEQ ID NO: 4978 - RNA, 20 nt, synthetic construct
  source 1..20: mol_type = other RNA
ggctattatataaggtgtat

SEQ ID NO: 4979 - RNA, 20 nt, synthetic construct
  source 1..20: mol_type = other RNA
tatagttatatcaggctatt

SEQ ID NO: 4980 - RNA, 20 nt, synthetic construct
  source 1..20: mol_type = other RNA
taaccacaaagcaaaaacct

SEQ ID NO: 4981 - RNA, 20 nt, synthetic construct
  source 1..20: mol_type = other RNA
actttaggtttttgctttgt

SEQ ID NO: 4982 - RNA, 20 nt, synthetic construct
  source 1..20: mol_type = other RNA
tttgtatatctactttaggt

SEQ ID NO: 4983 - RNA, 20 nt, synthetic construct
  source 1..20: mol_type = other RNA
aagcataccactagagaaaa

SEQ ID NO: 4984 - RNA, 20 nt, synthetic construct
  source 1..20: mol_type = other RNA
ttatttgtgattaagtgatt

SEQ ID NO: 4985 - RNA, 20 nt, synthetic construct
  source 1..20: mol_type = other RNA
cttaatcacaaataaagata

SEQ ID NO: 4986 - RNA, 20 nt, synthetic construct
  source 1..20: mol_type = other RNA
caaataaagatacgaagagt

SEQ ID NO: 4987 - RNA, 20 nt, synthetic construct
  source 1..20: mol_type = other RNA
ccattttgttaattgctttc

SEQ ID NO: 4988 - RNA, 20 nt, synthetic construct
  source 1..20: mol_type = other RNA
gctatcaccattttgttaat

SEQ ID NO: 4989 - RNA, 20 nt, synthetic construct
  source 1..20: mol_type = other RNA
tacctataaataattatctt

SEQ ID NO: 4990 - RNA, 20 nt, synthetic construct
  source 1..20: mol_type = other RNA
atttccattcaagataatta

SEQ ID NO: 4991 - RNA, 20 nt, synthetic construct
  source 1..20: mol_type = other RNA
tgaatggaaatggattaaat

SEQ ID NO: 4992 - RNA, 20 nt, synthetic construct
  source 1..20: mol_type = other RNA
atttggccactgtatgtctt

SEQ ID NO: 4993 - RNA, 20 nt, synthetic construct
  source 1..20: mol_type = other RNA
tattttttaatctatttggc

SEQ ID NO: 4994 - RNA, 20 nt, synthetic construct
  source 1..20: mol_type = other RNA
tatagttggatcttattttt

SEQ ID NO: 4995 - RNA, 20 nt, synthetic construct
  source 1..20: mol_type = other RNA
aactatatgatgcctataac

SEQ ID NO: 4996 - RNA, 20 nt, synthetic construct
  source 1..20: mol_type = other RNA
ctttactttcagtctgtttg

SEQ ID NO: 4997 - RNA, 20 nt, synthetic construct
  source 1..20: mol_type = other RNA
tcttgtttccatttgcatag

SEQ ID NO: 4998 - RNA, 20 nt, synthetic construct
  source 1..20: mol_type = other RNA
gtataactacccctctatct

SEQ ID NO: 4999 - RNA, 20 nt, synthetic construct
  source 1..20: mol_type = other RNA
ctaatccaaacatctgaaat

SEQ ID NO: 5000 - RNA, 20 nt, synthetic construct
  source 1..20: mol_type = other RNA
aaacatctgaaatctgaaat

SEQ ID NO: 5001 - RNA, 20 nt, synthetic construct
  source 1..20: mol_type = other RNA
gaaatctgaaatactccaaa

SEQ ID NO: 5002 - RNA, 20 nt, synthetic construct
  source 1..20: mol_type = other RNA
gaaatactccaaaattaaaa

SEQ ID NO: 5003 - RNA, 20 nt, synthetic construct
  source 1..20: mol_type = other RNA
tgttggcacttaaacatttt

SEQ ID NO: 5004 - RNA, 20 nt, synthetic construct
  source 1..20: mol_type = other RNA
aaaatgctccgaagaacatt

SEQ ID NO: 5005 - RNA, 20 nt, synthetic construct
  source 1..20: mol_type = other RNA
ctaaacacaaaaatccaaaa

SEQ ID NO: 5006 - RNA, 20 nt, synthetic construct
  source 1..20: mol_type = other RNA
ttcctttataattactcagt

SEQ ID NO: 5007 - RNA, 20 nt, synthetic construct
  source 1..20: mol_type = other RNA
tccgccatgattataagttt

SEQ ID NO: 5008 - RNA, 20 nt, synthetic construct
  source 1..20: mol_type = other RNA
tggcggaagatgaaggagaa

SEQ ID NO: 5009 - RNA, 20 nt, synthetic construct
  source 1..20: mol_type = other RNA
gatggttttataagtgtttg

SEQ ID NO: 5010 - RNA, 20 nt, synthetic construct
  source 1..20: mol_type = other RNA
gatcttgtgggaactcactc

SEQ ID NO: 5011 - RNA, 20 nt, synthetic construct
  source 1..20: mol_type = other RNA
tgtgggaactcactcactct

SEQ ID NO: 5012 - RNA, 20 nt, synthetic construct
  source 1..20: mol_type = other RNA
tgggggcggttttccctatg

SEQ ID NO: 5013 - RNA, 20 nt, synthetic construct
  source 1..20: mol_type = other RNA
aatcccctcccactgggctc

SEQ ID NO: 5014 - RNA, 20 nt, synthetic construct
  source 1..20: mol_type = other RNA
cctcccactgggctcctccc

SEQ ID NO: 5015 - RNA, 20 nt, synthetic construct
  source 1..20: mol_type = other RNA
ccatgtgtcaagggaggagc

SEQ ID NO: 5016 - RNA, 20 nt, synthetic construct
  source 1..20: mol_type = other RNA
tgaattgtaaccctcatgat

SEQ ID NO: 5017 - RNA, 20 nt, synthetic construct
  source 1..20: mol_type = other RNA
tgagggttacaattcacgat

SEQ ID NO: 5018 - RNA, 20 nt, synthetic construct
  source 1..20: mol_type = other RNA
catcgtgaattgtaaccctc

SEQ ID NO: 5019 - RNA, 20 nt, synthetic construct
  source 1..20: mol_type = other RNA
taatgcaaacattgcaaaaa

SEQ ID NO: 5020 - RNA, 20 nt, synthetic construct
  source 1..20: mol_type = other RNA
aaaatgcctgaaaccagaaa

SEQ ID NO: 5021 - RNA, 20 nt, synthetic construct
  source 1..20: mol_type = other RNA
ccttattattacattcttct

SEQ ID NO: 5022 - RNA, 20 nt, synthetic construct
  source 1..20: mol_type = other RNA
gttcattacaaatatatagc

SEQ ID NO: 5023 - RNA, 20 nt, synthetic construct
  source 1..20: mol_type = other RNA
attaatgtttgttttagtta

SEQ ID NO: 5024 - RNA, 20 nt, synthetic construct
  source 1..20: mol_type = other RNA
cacaggagagctacactgta

SEQ ID NO: 5025 - RNA, 20 nt, synthetic construct
  source 1..20: mol_type = other RNA
tagtagcacacttgaatagc

SEQ ID NO: 5026 - RNA, 20 nt, synthetic construct
  source 1..20: mol_type = other RNA
gtccattagtgaaagtggag

SEQ ID NO: 5027 - RNA, 20 nt, synthetic construct
  source 1..20: mol_type = other RNA
tccagacagagaatcaatat

SEQ ID NO: 5028 - RNA, 20 nt, synthetic construct
  source 1..20: mol_type = other RNA
agacagagaatcaatatgga

SEQ ID NO: 5029 - RNA, 20 nt, synthetic construct
  source 1..20: mol_type = other RNA
atatggaaacacgagactta

SEQ ID NO: 5030 - RNA, 20 nt, synthetic construct
  source 1..20: mol_type = other RNA
aacagcagtagaatacacat

SEQ ID NO: 5031 - RNA, 20 nt, synthetic construct
  source 1..20: mol_type = other RNA
attctggagaatattccctg

SEQ ID NO: 5032 - RNA, 20 nt, synthetic construct
  source 1..20: mol_type = other RNA
tatgttaggtcacaaaacta

SEQ ID NO: 5033 - RNA, 20 nt, synthetic construct
  source 1..20: mol_type = other RNA
tcttacattttttgactagt

SEQ ID NO: 5034 - RNA, 20 nt, synthetic construct
  source 1..20: mol_type = other RNA
aaaaaaaaaacctgatatga

SEQ ID NO: 5035 - RNA, 20 nt, synthetic construct
  source 1..20: mol_type = other RNA
tatcaggttttttttttaga

SEQ ID NO: 5036 - RNA, 20 nt, synthetic construct
  source 1..20: mol_type = other RNA
ggttttttttttagatcata

SEQ ID NO: 5037 - RNA, 20 nt, synthetic construct
  source 1..20: mol_type = other RNA
taatcgtatgaaactagaaa

SEQ ID NO: 5038 - RNA, 20 nt, synthetic construct
  source 1..20: mol_type = other RNA
tatgaaactagaaatcaata

SEQ ID NO: 5039 - RNA, 20 nt, synthetic construct
  source 1..20: mol_type = other RNA
ataatgggggaatattggaa

SEQ ID NO: 5040 - RNA, 20 nt, synthetic construct
  source 1..20: mol_type = other RNA
atttgtggattttccaatat

SEQ ID NO: 5041 - RNA, 20 nt, synthetic construct
  source 1..20: mol_type = other RNA
acaaatagatagaaattaat

SEQ ID NO: 5042 - RNA, 20 nt, synthetic construct
  source 1..20: mol_type = other RNA
atatgctcctgaacaatcaa

SEQ ID NO: 5043 - RNA, 20 nt, synthetic construct
  source 1..20: mol_type = other RNA
tcttcgactcattgattgtt

SEQ ID NO: 5044 - RNA, 20 nt, synthetic construct
  source 1..20: mol_type = other RNA
atgagtcgaagaagatatta

SEQ ID NO: 5045 - RNA, 20 nt, synthetic construct
  source 1..20: mol_type = other RNA
agacatgagttcatgtcctt

SEQ ID NO: 5046 - RNA, 20 nt, synthetic construct
  source 1..20: mol_type = other RNA
ttctcagcaaactatcataa

SEQ ID NO: 5047 - RNA, 20 nt, synthetic construct
  source 1..20: mol_type = other RNA
taaggacagaaatccaaaca

SEQ ID NO: 5048 - RNA, 20 nt, synthetic construct
  source 1..20: mol_type = other RNA
aaacaccgcatgttctcact

SEQ ID NO: 5049 - RNA, 20 nt, synthetic construct
  source 1..20: mol_type = other RNA
cacaccagggcttgtcaggg

SEQ ID NO: 5050 - RNA, 20 nt, synthetic construct
  source 1..20: mol_type = other RNA
cttcaccagcttcccacccc

SEQ ID NO: 5051 - RNA, 20 nt, synthetic construct
  source 1..20: mol_type = other RNA
actcgtcatttacattagat

SEQ ID NO: 5052 - RNA, 20 nt, synthetic construct
  source 1..20: mol_type = other RNA
aatgtaaatgacgagttgat

SEQ ID NO: 5053 - RNA, 20 nt, synthetic construct
  source 1..20: mol_type = other RNA
aaaacaaatatttctttttt

SEQ ID NO: 5054 - RNA, 20 nt, synthetic construct
  source 1..20: mol_type = other RNA
gacaaaatgtgaaaagccct

SEQ ID NO: 5055 - RNA, 20 nt, synthetic construct
  source 1..20: mol_type = other RNA
ttcatggtgatacttaattt

SEQ ID NO: 5056 - RNA, 20 nt, synthetic construct
  source 1..20: mol_type = other RNA
agaatttatctttcatggtg

SEQ ID NO: 5057 - RNA, 20 nt, synthetic construct
  source 1..20: mol_type = other RNA
ccatgaaagataaattctgg

SEQ ID NO: 5058 - RNA, 20 nt, synthetic construct
  source 1..20: mol_type = other RNA
tttggaatgagttaatctat

SEQ ID NO: 5059 - RNA, 20 nt, synthetic construct
  source 1..20: mol_type = other RNA
atcctatactaaaataagtc

SEQ ID NO: 5060 - RNA, 20 nt, synthetic construct
  source 1..20: mol_type = other RNA
tatactaaaataagtcactt

SEQ ID NO: 5061 - RNA, 20 nt, synthetic construct
  source 1..20: mol_type = other RNA
tatttattatgttttaaagc

SEQ ID NO: 5062 - RNA, 20 nt, synthetic construct
  source 1..20: mol_type = other RNA
tcttttttaatggaagtgtt

SEQ ID NO: 5063 - RNA, 20 nt, synthetic construct
  source 1..20: mol_type = other RNA
taggttgcttatttgagatc

SEQ ID NO: 5064 - RNA, 20 nt, synthetic construct
  source 1..20: mol_type = other RNA
caaataagcaacctaagatt

SEQ ID NO: 5065 - RNA, 20 nt, synthetic construct
  source 1..20: mol_type = other RNA
ttattatttctttccttcta

SEQ ID NO: 5066 - RNA, 20 nt, synthetic construct
  source 1..20: mol_type = other RNA
catcagaaatagtaaagact

SEQ ID NO: 5067 - RNA, 20 nt, synthetic construct
  source 1..20: mol_type = other RNA
gaaatagtaaagactaaaaa

SEQ ID NO: 5068 - RNA, 20 nt, synthetic construct
  source 1..20: mol_type = other RNA
gttttttagtctttactatt

SEQ ID NO: 5069 - RNA, 20 nt, synthetic construct
  source 1..20: mol_type = other RNA
agctaaaagttggtcaattt

SEQ ID NO: 5070 - RNA, 20 nt, synthetic construct
  source 1..20: mol_type = other RNA
tcacataaatgtgactaaag

SEQ ID NO: 5071 - RNA, 20 nt, synthetic construct
  source 1..20: mol_type = other RNA
acaaaatacttgcaaaccta

SEQ ID NO: 5072 - RNA, 20 nt, synthetic construct
  source 1..20: mol_type = other RNA
ttcaggttttggtatcagga

SEQ ID NO: 5073 - RNA, 20 nt, synthetic construct
  source 1..20: mol_type = other RNA
tagaataaaatgggaagcag

SEQ ID NO: 5074 - RNA, 20 nt, synthetic construct
  source 1..20: mol_type = other RNA
tcctcaattttttttgacgt

SEQ ID NO: 5075 - RNA, 20 nt, synthetic construct
  source 1..20: mol_type = other RNA
attttttttgacgtttcagt

SEQ ID NO: 5076 - RNA, 20 nt, synthetic construct
  source 1..20: mol_type = other RNA
tctttgcacatctggtagaa

SEQ ID NO: 5077 - RNA, 20 nt, synthetic construct
  source 1..20: mol_type = other RNA
aaaattgaatcagtaatgaa

SEQ ID NO: 5078 - RNA, 20 nt, synthetic construct
  source 1..20: mol_type = other RNA
caagacagaaccaggaagaa

SEQ ID NO: 5079 - RNA, 20 nt, synthetic construct
  source 1..20: mol_type = other RNA
tctagattttctagtttgtg

SEQ ID NO: 5080 - RNA, 20 nt, synthetic construct
  source 1..20: mol_type = other RNA
atgcacacaaactagaaaat

SEQ ID NO: 5081 - RNA, 20 nt, synthetic construct
  source 1..20: mol_type = other RNA
ctcttttcttctttattagc

SEQ ID NO: 5082 - RNA, 20 nt, synthetic construct
  source 1..20: mol_type = other RNA
cttttcttctttattagcca

SEQ ID NO: 5083 - RNA, 20 nt, synthetic construct
  source 1..20: mol_type = other RNA
tttcttctttattagccagg

SEQ ID NO: 5084 - RNA, 20 nt, synthetic construct
  source 1..20: mol_type = other RNA
tggatttgttgatcttttga

SEQ ID NO: 5085 - RNA, 20 nt, synthetic construct
  source 1..20: mol_type = other RNA
gattttggttttccttgcct

SEQ ID NO: 5086 - RNA, 20 nt, synthetic construct
  source 1..20: mol_type = other RNA
aaaactagcagcaggcaagg

SEQ ID NO: 5087 - RNA, 20 nt, synthetic construct
  source 1..20: mol_type = other RNA
tgtttctctaattcttcaag

SEQ ID NO: 5088 - RNA, 20 nt, synthetic construct
  source 1..20: mol_type = other RNA
aattcttcaagttgtgatgt

SEQ ID NO: 5089 - RNA, 20 nt, synthetic construct
  source 1..20: mol_type = other RNA
catcaaaaagaaagatccca

SEQ ID NO: 5090 - RNA, 20 nt, synthetic construct
  source 1..20: mol_type = other RNA
taacactaccttagctgtgt

SEQ ID NO: 5091 - RNA, 20 nt, synthetic construct
  source 1..20: mol_type = other RNA
gggacacagctaaggtagtg

SEQ ID NO: 5092 - RNA, 20 nt, synthetic construct
  source 1..20: mol_type = other RNA
ttagtttcaaagaacttctt

SEQ ID NO: 5093 - RNA, 20 nt, synthetic construct
  source 1..20: mol_type = other RNA
tgaatgacttgggggtaaat

SEQ ID NO: 5094 - RNA, 20 nt, synthetic construct
  source 1..20: mol_type = other RNA
aaaccatgcaattacatggg

SEQ ID NO: 5095 - RNA, 20 nt, synthetic construct
  source 1..20: mol_type = other RNA
ataaaaatagaagccaagac

SEQ ID NO: 5096 - RNA, 20 nt, synthetic construct
  source 1..20: mol_type = other RNA
gacgacagctcaataaaaat

SEQ ID NO: 5097 - RNA, 20 nt, synthetic construct
  source 1..20: mol_type = other RNA
gcaaatgcaaaagaaccaaa

SEQ ID NO: 5098 - RNA, 20 nt, synthetic construct
  source 1..20: mol_type = other RNA
aaaaatcaaccacataattg

SEQ ID NO: 5099 - RNA, 20 nt, synthetic construct
  source 1..20: mol_type = other RNA
taatcacatggcacattctc

SEQ ID NO: 5100 - RNA, 20 nt, synthetic construct
  source 1..20: mol_type = other RNA
acccccaaacaatagaatat

SEQ ID NO: 5101 - RNA, 20 nt, synthetic construct
  source 1..20: mol_type = other RNA
ctacccccaaacaatagaat

SEQ ID NO: 5102 - RNA, 20 nt, synthetic construct
  source 1..20: mol_type = other RNA
acagaactctctacccccaa

SEQ ID NO: 5103 - RNA, 20 nt, synthetic construct
  source 1..20: mol_type = other RNA
acattggatcaaatggatct

SEQ ID NO: 5104 - RNA, 20 nt, synthetic construct
  source 1..20: mol_type = other RNA
atgatctgtctaatactgtc

SEQ ID NO: 5105 - RNA, 20 nt, synthetic construct
  source 1..20: mol_type = other RNA
cactattattgtgtgggcat

SEQ ID NO: 5106 - RNA, 20 nt, synthetic construct
  source 1..20: mol_type = other RNA
gtctctttgtaggtctctaa

SEQ ID NO: 5107 - RNA, 20 nt, synthetic construct
  source 1..20: mol_type = other RNA
ttgtaggtctctaagaactt

SEQ ID NO: 5108 - RNA, 20 nt, synthetic construct
  source 1..20: mol_type = other RNA
aagaactttctttatgaagc

SEQ ID NO: 5109 - RNA, 20 nt, synthetic construct
  source 1..20: mol_type = other RNA
tgtgttggatgcatatatat

SEQ ID NO: 5110 - RNA, 20 nt, synthetic construct
  source 1..20: mol_type = other RNA
aaataaagagatggaggaga

SEQ ID NO: 5111 - RNA, 20 nt, synthetic construct
  source 1..20: mol_type = other RNA
tccatctctttattttgagc

SEQ ID NO: 5112 - RNA, 20 nt, synthetic construct
  source 1..20: mol_type = other RNA
atctctttattttgagcctt

SEQ ID NO: 5113 - RNA, 20 nt, synthetic construct
  source 1..20: mol_type = other RNA
ttattttgagcctttgggtg

SEQ ID NO: 5114 - RNA, 20 nt, synthetic construct
  source 1..20: mol_type = other RNA
catgtaatgacacccaaagg

SEQ ID NO: 5115 - RNA, 20 nt, synthetic construct
  source 1..20: mol_type = other RNA
tgacaacagcatacaattgg

SEQ ID NO: 5116 - RNA, 20 nt, synthetic construct
  source 1..20: mol_type = other RNA
ataaaaaagcaagacccaat

SEQ ID NO: 5117 - RNA, 20 nt, synthetic construct
  source 1..20: mol_type = other RNA
gtgcctcttaagttgggcat

SEQ ID NO: 5118 - RNA, 20 nt, synthetic construct
  source 1..20: mol_type = other RNA
taagttgggcatttagccca

SEQ ID NO: 5119 - RNA, 20 nt, synthetic construct
  source 1..20: mol_type = other RNA
gattgtgtttttatgctggc

SEQ ID NO: 5120 - RNA, 20 nt, synthetic construct
  source 1..20: mol_type = other RNA
ttcctttctatagttggtgc

SEQ ID NO: 5121 - RNA, 20 nt, synthetic construct
  source 1..20: mol_type = other RNA
tttcaagatctcttgtaagg

SEQ ID NO: 5122 - RNA, 20 nt, synthetic construct
  source 1..20: mol_type = other RNA
tgtaaggcaggtctggtggt

SEQ ID NO: 5123 - RNA, 20 nt, synthetic construct
  source 1..20: mol_type = other RNA
ctcaacatttgcttatctaa

SEQ ID NO: 5124 - RNA, 20 nt, synthetic construct
  source 1..20: mol_type = other RNA
acatttgcttatctaaaagg

SEQ ID NO: 5125 - RNA, 20 nt, synthetic construct
  source 1..20: mol_type = other RNA
gttgcttaggaagcttagtt

SEQ ID NO: 5126 - RNA, 20 nt, synthetic construct
  source 1..20: mol_type = other RNA
gcaagccagaagagattgtg

SEQ ID NO: 5127 - RNA, 20 nt, synthetic construct
  source 1..20: mol_type = other RNA
tctggcttgcagaggttcag

SEQ ID NO: 5128 - RNA, 20 nt, synthetic construct
  source 1..20: mol_type = other RNA
gctgaacctctgcaagccag

SEQ ID NO: 5129 - RNA, 20 nt, synthetic construct
  source 1..20: mol_type = other RNA
cagctgaacctctgcaagcc

SEQ ID NO: 5130 - RNA, 20 nt, synthetic construct
  source 1..20: mol_type = other RNA
ctagttgcctttaacattct

SEQ ID NO: 5131 - RNA, 20 nt, synthetic construct
  source 1..20: mol_type = other RNA
agttgcctttaacattctgt

SEQ ID NO: 5132 - RNA, 20 nt, synthetic construct
  source 1..20: mol_type = other RNA
gtattttctgaatttgactg

SEQ ID NO: 5133 - RNA, 20 nt, synthetic construct
  source 1..20: mol_type = other RNA
ctagcaagattggggaagtt

SEQ ID NO: 5134 - RNA, 20 nt, synthetic construct
  source 1..20: mol_type = other RNA
agcaagattggggaagtttt

SEQ ID NO: 5135 - RNA, 20 nt, synthetic construct
  source 1..20: mol_type = other RNA
gaaagggatggggagaaagc

SEQ ID NO: 5136 - RNA, 20 nt, synthetic construct
  source 1..20: mol_type = other RNA
ccatccctttcagagatgcc

SEQ ID NO: 5137 - RNA, 20 nt, synthetic construct
  source 1..20: mol_type = other RNA
gcaatcagacagttgacaaa

SEQ ID NO: 5138 - RNA, 20 nt, synthetic construct
  source 1..20: mol_type = other RNA
ctgcaatcagacagttgaca

SEQ ID NO: 5139 - RNA, 20 nt, synthetic construct
  source 1..20: mol_type = other RNA
gaaatggaagactagctctc

SEQ ID NO: 5140 - RNA, 20 nt, synthetic construct
  source 1..20: mol_type = other RNA
gcttggtctattctcctatt

SEQ ID NO: 5141 - RNA, 20 nt, synthetic construct
  source 1..20: mol_type = other RNA
tattaatacttggattgcat

SEQ ID NO: 5142 - RNA, 20 nt, synthetic construct
  source 1..20: mol_type = other RNA
gctctcagctctgtcagatc

SEQ ID NO: 5143 - RNA, 20 nt, synthetic construct
  source 1..20: mol_type = other RNA
cagctctgtcagatccgtta

SEQ ID NO: 5144 - RNA, 20 nt, synthetic construct
  source 1..20: mol_type = other RNA
gctctgtcagatccgttagg

SEQ ID NO: 5145 - RNA, 20 nt, synthetic construct
  source 1..20: mol_type = other RNA
gtcagatccgttaggttctt

SEQ ID NO: 5146 - RNA, 20 nt, synthetic construct
  source 1..20: mol_type = other RNA
atattattttattgtgattt

SEQ ID NO: 5147 - RNA, 20 nt, synthetic construct
  source 1..20: mol_type = other RNA
aatgacagaaatataattca

SEQ ID NO: 5148 - RNA, 20 nt, synthetic construct
  source 1..20: mol_type = other RNA
gtcttgttaagaacccttgt

SEQ ID NO: 5149 - RNA, 20 nt, synthetic construct
  source 1..20: mol_type = other RNA
aaacaactgcaccagttttc

SEQ ID NO: 5150 - RNA, 20 nt, synthetic construct
  source 1..20: mol_type = other RNA
aataaatcaaatggccagaa

SEQ ID NO: 5151 - RNA, 20 nt, synthetic construct
  source 1..20: mol_type = other RNA
tgtctctgtgtgggtgtttc

SEQ ID NO: 5152 - RNA, 20 nt, synthetic construct
  source 1..20: mol_type = other RNA
gtgtgggtgtttctttaact

SEQ ID NO: 5153 - RNA, 20 nt, synthetic construct
  source 1..20: mol_type = other RNA
atctacactgcagttaaaga

SEQ ID NO: 5154 - RNA, 20 nt, synthetic construct
  source 1..20: mol_type = other RNA
aaagaagaagtctattggct

SEQ ID NO: 5155 - RNA, 20 nt, synthetic construct
  source 1..20: mol_type = other RNA
aagacctttactggttttct

SEQ ID NO: 5156 - RNA, 20 nt, synthetic construct
  source 1..20: mol_type = other RNA
gaattcataactccagcatt

SEQ ID NO: 5157 - RNA, 20 nt, synthetic construct
  source 1..20: mol_type = other RNA
agcattcatattgcttcctc

SEQ ID NO: 5158 - RNA, 20 nt, synthetic construct
  source 1..20: mol_type = other RNA
ggtaagtggggttttcaccc

SEQ ID NO: 5159 - RNA, 20 nt, synthetic construct
  source 1..20: mol_type = other RNA
cacacacattagacatgtgg

SEQ ID NO: 5160 - RNA, 20 nt, synthetic construct
  source 1..20: mol_type = other RNA
cttagctgcaggtcccctgc

SEQ ID NO: 5161 - RNA, 20 nt, synthetic construct
  source 1..20: mol_type = other RNA
cccttagctgcaggtcccct

SEQ ID NO: 5162 - RNA, 20 nt, synthetic construct
  source 1..20: mol_type = other RNA
cccatcaaccaataccaaat

SEQ ID NO: 5163 - RNA, 20 nt, synthetic construct
  source 1..20: mol_type = other RNA
cacccatcaaccaataccaa

SEQ ID NO: 5164 - RNA, 20 nt, synthetic construct
  source 1..20: mol_type = other RNA
ttctctcacccatcaaccaa

SEQ ID NO: 5165 - RNA, 20 nt, synthetic construct
  source 1..20: mol_type = other RNA
ctttctctcacccatcaacc

SEQ ID NO: 5166 - RNA, 20 nt, synthetic construct
  source 1..20: mol_type = other RNA
gagaaagtcaggcagagatc

SEQ ID NO: 5167 - RNA, 20 nt, synthetic construct
  source 1..20: mol_type = other RNA
gcctgactttctcagaggtg

SEQ ID NO: 5168 - RNA, 20 nt, synthetic construct
  source 1..20: mol_type = other RNA
ccagcacctctgagaaagtc

SEQ ID NO: 5169 - RNA, 20 nt, synthetic construct
  source 1..20: mol_type = other RNA
gaggtgctggtgaggacatt

SEQ ID NO: 5170 - RNA, 20 nt, synthetic construct
  source 1..20: mol_type = other RNA
taatgtcctcaccagcacct

SEQ ID NO: 5171 - RNA, 20 nt, synthetic construct
  source 1..20: mol_type = other RNA
gagaaagtcagcagagtcag

SEQ ID NO: 5172 - RNA, 20 nt, synthetic construct
  source 1..20: mol_type = other RNA
gctgactttctcagaggtgc

SEQ ID NO: 5173 - RNA, 20 nt, synthetic construct
  source 1..20: mol_type = other RNA
ccagcacctctgagaaagtc

SEQ ID NO: 5174 - RNA, 20 nt, synthetic construct
  source 1..20: mol_type = other RNA
gaggtgctggtgaggacatt

SEQ ID NO: 5175 - RNA, 20 nt, synthetic construct
  source 1..20: mol_type = other RNA
taatgtcctcaccagcacct

SEQ ID NO: 5176 - RNA, 20 nt, synthetic construct
  source 1..20: mol_type = other RNA
agactcataatgtcctcacc

SEQ ID NO: 5177 - RNA, 20 nt, synthetic construct
  source 1..20: mol_type = other RNA
gccactagccagacagacct

SEQ ID NO: 5178 - RNA, 20 nt, synthetic construct
  source 1..20: mol_type = other RNA
ttgtatgacttgactccaac

SEQ ID NO: 5179 - RNA, 20 nt, synthetic construct
  source 1..20: mol_type = other RNA
aacccctcatttgtaaaacc

SEQ ID NO: 5180 - RNA, 20 nt, synthetic construct
  source 1..20: mol_type = other RNA
tttgtaaaaccagcattttc

SEQ ID NO: 5181 - RNA, 20 nt, synthetic construct
  source 1..20: mol_type = other RNA
ttggtttcttgatccccctt

SEQ ID NO: 5182 - RNA, 20 nt, synthetic construct
  source 1..20: mol_type = other RNA
ggagtgcagaaagggggatc

SEQ ID NO: 5183 - RNA, 20 nt, synthetic construct
  source 1..20: mol_type = other RNA
gtgttcccagactcaggagt

SEQ ID NO: 5184 - RNA, 20 nt, synthetic construct
  source 1..20: mol_type = other RNA
tgagtctgggaacactgagg

SEQ ID NO: 5185 - RNA, 20 nt, synthetic construct
  source 1..20: mol_type = other RNA
tttgccaagtttccttttag

SEQ ID NO: 5186 - RNA, 20 nt, synthetic construct
  source 1..20: mol_type = other RNA
cagtgttttgcacttataaa

SEQ ID NO: 5187 - RNA, 20 nt, synthetic construct
  source 1..20: mol_type = other RNA
aagacttagatattattgtt

SEQ ID NO: 5188 - RNA, 20 nt, synthetic construct
  source 1..20: mol_type = other RNA
cttgtaaaataggaacaata

SEQ ID NO: 5189 - RNA, 20 nt, synthetic construct
  source 1..20: mol_type = other RNA
ggttcctcacttgtaaaata

SEQ ID NO: 5190 - RNA, 20 nt, synthetic construct
  source 1..20: mol_type = other RNA
gagcctcaggttcctcactt

SEQ ID NO: 5191 - RNA, 20 nt, synthetic construct
  source 1..20: mol_type = other RNA
gagaaggtgcaggatggcac

SEQ ID NO: 5192 - RNA, 20 nt, synthetic construct
  source 1..20: mol_type = other RNA
ctgtgccatcctgcaccttc

SEQ ID NO: 5193 - RNA, 20 nt, synthetic construct
  source 1..20: mol_type = other RNA
cattgattgttttcttatat

SEQ ID NO: 5194 - RNA, 20 nt, synthetic construct
  source 1..20: mol_type = other RNA
ttgattgttttcttatatga

SEQ ID NO: 5195 - RNA, 20 nt, synthetic construct
  source 1..20: mol_type = other RNA
cccgacaaccctgcagcccc

SEQ ID NO: 5196 - RNA, 20 nt, synthetic construct
  source 1..20: mol_type = other RNA
acacttgatgcacattctta

SEQ ID NO: 5197 - RNA, 20 nt, synthetic construct
  source 1..20: mol_type = other RNA
atcatggcagctcctactaa

SEQ ID NO: 5198 - RNA, 20 nt, synthetic construct
  source 1..20: mol_type = other RNA
attctgtatattagtaggag

SEQ ID NO: 5199 - RNA, 20 nt, synthetic construct
  source 1..20: mol_type = other RNA
tactaatatacagaatagag

SEQ ID NO: 5200 - RNA, 20 nt, synthetic construct
  source 1..20: mol_type = other RNA
ttcttgcaagtgacagaaaa

SEQ ID NO: 5201 - RNA, 20 nt, synthetic construct
  source 1..20: mol_type = other RNA
acaagaattccccttttttg

SEQ ID NO: 5202 - RNA, 20 nt, synthetic construct
  source 1..20: mol_type = other RNA
catgatggccccagggccca

SEQ ID NO: 5203 - RNA, 20 nt, synthetic construct
  source 1..20: mol_type = other RNA
cctttgtgcccaaggatgat

SEQ ID NO: 5204 - RNA, 20 nt, synthetic construct
  source 1..20: mol_type = other RNA
gtctttcctggcaaagcaag

SEQ ID NO: 5205 - RNA, 20 nt, synthetic construct
  source 1..20: mol_type = other RNA
tgctttgccaggaaagactg

SEQ ID NO: 5206 - RNA, 20 nt, synthetic construct
  source 1..20: mol_type = other RNA
gacctggccaactattgttc

SEQ ID NO: 5207 - RNA, 20 nt, synthetic construct
  source 1..20: mol_type = other RNA
cagacctggccaactattgt

SEQ ID NO: 5208 - RNA, 20 nt, synthetic construct
  source 1..20: mol_type = other RNA
aacctgcatcagctattaca

SEQ ID NO: 5209 - RNA, 20 nt, synthetic construct
  source 1..20: mol_type = other RNA
agcatgtaatagctgatgca

SEQ ID NO: 5210 - RNA, 20 nt, synthetic construct
  source 1..20: mol_type = other RNA
acctctagcatgtaatagct

SEQ ID NO: 5211 - RNA, 20 nt, synthetic construct
  source 1..20: mol_type = other RNA
tacccagaagggcaaagggt

SEQ ID NO: 5212 - RNA, 20 nt, synthetic construct
  source 1..20: mol_type = other RNA
acaggattatgggatgtagg

SEQ ID NO: 5213 - RNA, 20 nt, synthetic construct
  source 1..20: mol_type = other RNA
ccaatacctcaactgatgaa

SEQ ID NO: 5214 - RNA, 20 nt, synthetic construct
  source 1..20: mol_type = other RNA
aatacctcaactgatgaaag

SEQ ID NO: 5215 - RNA, 20 nt, synthetic construct
  source 1..20: mol_type = other RNA
actgatgaaagcaccaagct

SEQ ID NO: 5216 - RNA, 20 nt, synthetic construct
  source 1..20: mol_type = other RNA
accatcttccatgtgacatt

SEQ ID NO: 5217 - RNA, 20 nt, synthetic construct
  source 1..20: mol_type = other RNA
tttagccttggctttcttac

SEQ ID NO: 5218 - RNA, 20 nt, synthetic construct
  source 1..20: mol_type = other RNA
tcacaatcaccttatatgtt

SEQ ID NO: 5219 - RNA, 20 nt, synthetic construct
  source 1..20: mol_type = other RNA
cattatcatcttcatcaaca

SEQ ID NO: 5220 - RNA, 20 nt, synthetic construct
  source 1..20: mol_type = other RNA
acatcatcaccatcatcact

SEQ ID NO: 5221 - RNA, 20 nt, synthetic construct
  source 1..20: mol_type = other RNA
gcaccaccatcatcattcca

SEQ ID NO: 5222 - RNA, 20 nt, synthetic construct
  source 1..20: mol_type = other RNA
acatcatcaccaccaccatc

SEQ ID NO: 5223 - RNA, 20 nt, synthetic construct
  source 1..20: mol_type = other RNA
gggccagctacaaactggtt

SEQ ID NO: 5224 - RNA, 20 nt, synthetic construct
  source 1..20: mol_type = other RNA
cctggtctcacctgcaggtc

SEQ ID NO: 5225 - RNA, 20 nt, synthetic construct
  source 1..20: mol_type = other RNA
gtggacctgcaggtgagacc

SEQ ID NO: 5226 - RNA, 20 nt, synthetic construct
  source 1..20: mol_type = other RNA
cctgcaggtccactgagaaa

SEQ ID NO: 5227 - RNA, 20 nt, synthetic construct
  source 1..20: mol_type = other RNA
tggtctagttagtgttctga

SEQ ID NO: 5228 - RNA, 20 nt, synthetic construct
  source 1..20: mol_type = other RNA
gaacactaactagaccatga

SEQ ID NO: 5229 - RNA, 20 nt, synthetic construct
  source 1..20: mol_type = other RNA
ggcctgttcatcaattttct

SEQ ID NO: 5230 - RNA, 20 nt, synthetic construct
  source 1..20: mol_type = other RNA
gaggctgagaacgccaattg

SEQ ID NO: 5231 - RNA, 20 nt, synthetic construct
  source 1..20: mol_type = other RNA
cagaggctgagaacgccaat

SEQ ID NO: 5232 - RNA, 20 nt, synthetic construct
  source 1..20: mol_type = other RNA
ctctcagaggctgagaacgc

SEQ ID NO: 5233 - RNA, 20 nt, synthetic construct
  source 1..20: mol_type = other RNA
gcctctgagagggaggtcaa

SEQ ID NO: 5234 - RNA, 20 nt, synthetic construct
  source 1..20: mol_type = other RNA
gagagggaggtcaaagtttt

SEQ ID NO: 5235 - RNA, 20 nt, synthetic construct
  source 1..20: mol_type = other RNA
ccccttcatgtttccaggtg

SEQ ID NO: 5236 - RNA, 20 nt, synthetic construct
  source 1..20: mol_type = other RNA
ccttcatgtttccaggtgtt

SEQ ID NO: 5237 - RNA, 20 nt, synthetic construct
  source 1..20: mol_type = other RNA
gcatttgatccaagtcaggg

SEQ ID NO: 5238 - RNA, 20 nt, synthetic construct
  source 1..20: mol_type = other RNA
aaactctgcatttgatccaa

SEQ ID NO: 5239 - RNA, 20 nt, synthetic construct
  source 1..20: mol_type = other RNA
acacctccaaactctgcatt

SEQ ID NO: 5240 - RNA, 20 nt, synthetic construct
  source 1..20: mol_type = other RNA
ctgatggggccttggggaga

SEQ ID NO: 5241 - RNA, 20 nt, synthetic construct
  source 1..20: mol_type = other RNA
ccccaaggccccatcaggga

SEQ ID NO: 5242 - RNA, 20 nt, synthetic construct
  source 1..20: mol_type = other RNA
ccaaggccccatcagggagg

SEQ ID NO: 5243 - RNA, 20 nt, synthetic construct
  source 1..20: mol_type = other RNA
tgtcacctgtggcctacctg

SEQ ID NO: 5244 - RNA, 20 nt, synthetic construct
  source 1..20: mol_type = other RNA
gagggcaggtaggccacagg

SEQ ID NO: 5245 - RNA, 20 nt, synthetic construct
  source 1..20: mol_type = other RNA
gagatgacatctctatgtcg

SEQ ID NO: 5246 - RNA, 20 nt, synthetic construct
  source 1..20: mol_type = other RNA
cagaccacatcaactttcct

SEQ ID NO: 5247 - RNA, 20 nt, synthetic construct
  source 1..20: mol_type = other RNA
agaatctgctatttgagcaa

SEQ ID NO: 5248 - RNA, 20 nt, synthetic construct
  source 1..20: mol_type = other RNA
aatagcagattctagagaac

SEQ ID NO: 5249 - RNA, 20 nt, synthetic construct
  source 1..20: mol_type = other RNA
ctcacacaactatgtagtcc

SEQ ID NO: 5250 - RNA, 20 nt, synthetic construct
  source 1..20: mol_type = other RNA
cacaactatgtagtccaggt

SEQ ID NO: 5251 - RNA, 20 nt, synthetic construct
  source 1..20: mol_type = other RNA
gcccgatgcttggtagtcag

SEQ ID NO: 5252 - RNA, 20 nt, synthetic construct
  source 1..20: mol_type = other RNA
atctgggcagagctgcatga

SEQ ID NO: 5253 - RNA, 20 nt, synthetic construct
  source 1..20: mol_type = other RNA
gctcaatctgggcagagctg

SEQ ID NO: 5254 - RNA, 20 nt, synthetic construct
  source 1..20: mol_type = other RNA
gcccagattgagctgagctg

SEQ ID NO: 5255 - RNA, 20 nt, synthetic construct
  source 1..20: mol_type = other RNA
agaggccagctcagctcaat

SEQ ID NO: 5256 - RNA, 20 nt, synthetic construct
  source 1..20: mol_type = other RNA
ctccagaggccagctcagct

SEQ ID NO: 5257 - RNA, 20 nt, synthetic construct
  source 1..20: mol_type = other RNA
ggagtgaggtgctgggacaa

SEQ ID NO: 5258 - RNA, 20 nt, synthetic construct
  source 1..20: mol_type = other RNA
tgtcaactccagatgcagtc

SEQ ID NO: 5259 - RNA, 20 nt, synthetic construct
  source 1..20: mol_type = other RNA
agatgcagtcaggtttctga

SEQ ID NO: 5260 - RNA, 20 nt, synthetic construct
  source 1..20: mol_type = other RNA
ttcttcccccagagcctttg

SEQ ID NO: 5261 - RNA, 20 nt, synthetic construct
  source 1..20: mol_type = other RNA
ctttcttcccccagagcctt

SEQ ID NO: 5262 - RNA, 20 nt, synthetic construct
  source 1..20: mol_type = other RNA
ctctttcttcccccagagcc

SEQ ID NO: 5263 - RNA, 20 nt, synthetic construct
  source 1..20: mol_type = other RNA
gggggaagaaagagagagtg

SEQ ID NO: 5264 - RNA, 20 nt, synthetic construct
  source 1..20: mol_type = other RNA
tctcttgcctgtgccatgct

SEQ ID NO: 5265 - RNA, 20 nt, synthetic construct
  source 1..20: mol_type = other RNA
tgcctgtgccatgctcgcaa

SEQ ID NO: 5266 - RNA, 20 nt, synthetic construct
  source 1..20: mol_type = other RNA
caaagcaaggatttttgcaa

SEQ ID NO: 5267 - RNA, 20 nt, synthetic construct
  source 1..20: mol_type = other RNA
caaataatccagttttctaa

SEQ ID NO: 5268 - RNA, 20 nt, synthetic construct
  source 1..20: mol_type = other RNA
ggcaattttgcaaccgttct

SEQ ID NO: 5269 - RNA, 20 nt, synthetic construct
  source 1..20: mol_type = other RNA
tggttgtgtttattcttttg

SEQ ID NO: 5270 - RNA, 20 nt, synthetic construct
  source 1..20: mol_type = other RNA
cccaaattgtcaaagaagta

SEQ ID NO: 5271 - RNA, 20 nt, synthetic construct
  source 1..20: mol_type = other RNA
caaattgtcaaagaagtata

SEQ ID NO: 5272 - RNA, 20 nt, synthetic construct
  source 1..20: mol_type = other RNA
tacaagtgtggtgaagtgat

SEQ ID NO: 5273 - RNA, 20 nt, synthetic construct
  source 1..20: mol_type = other RNA
caataacactgccaatttat

SEQ ID NO: 5274 - RNA, 20 nt, synthetic construct
  source 1..20: mol_type = other RNA
gaaaatattaaggaataaga

SEQ ID NO: 5275 - RNA, 20 nt, synthetic construct
  source 1..20: mol_type = other RNA
acatctttgttcataaagtt

SEQ ID NO: 5276 - RNA, 20 nt, synthetic construct
  source 1..20: mol_type = other RNA
tgcttccaaccctccacatc

SEQ ID NO: 5277 - RNA, 20 nt, synthetic construct
  source 1..20: mol_type = other RNA
ccgtgcgcgttggcccccct

SEQ ID NO: 5278 - RNA, 20 nt, synthetic construct
  source 1..20: mol_type = other RNA
gcagacccaggctcaggttg

SEQ ID NO: 5279 - RNA, 20 nt, synthetic construct
  source 1..20: mol_type = other RNA
ggttgaactagacaacctcc

SEQ ID NO: 5280 - RNA, 20 nt, synthetic construct
  source 1..20: mol_type = other RNA
ttacacctcagtttccttaa

SEQ ID NO: 5281 - RNA, 20 nt, synthetic construct
  source 1..20: mol_type = other RNA
acagttaaggaaactgaggt

SEQ ID NO: 5282 - RNA, 20 nt, synthetic construct
  source 1..20: mol_type = other RNA
tgctctacagttaaggaaac

SEQ ID NO: 5283 - RNA, 20 nt, synthetic construct
  source 1..20: mol_type = other RNA
gtttccttaactgtagagca

SEQ ID NO: 5284 - RNA, 20 nt, synthetic construct
  source 1..20: mol_type = other RNA
caacagtcctatgaaacagg

SEQ ID NO: 5285 - RNA, 20 nt, synthetic construct
  source 1..20: mol_type = other RNA
cttcatcctcacaacagtcc

SEQ ID NO: 5286 - RNA, 20 nt, synthetic construct
  source 1..20: mol_type = other RNA
tacgctgtgtacattttatt

SEQ ID NO: 5287 - RNA, 20 nt, synthetic construct
  source 1..20: mol_type = other RNA
tccccaaaggaaacctcatg

SEQ ID NO: 5288 - RNA, 20 nt, synthetic construct
  source 1..20: mol_type = other RNA
tgctcattaatcagtagctc

SEQ ID NO: 5289 - RNA, 20 nt, synthetic construct
  source 1..20: mol_type = other RNA
ttaatcagtagctctccttt

SEQ ID NO: 5290 - RNA, 20 nt, synthetic construct
  source 1..20: mol_type = other RNA
cctttaaaatattagttatg

SEQ ID NO: 5291 - RNA, 20 nt, synthetic construct
  source 1..20: mol_type = other RNA
tttaaaatattagttatgaa

SEQ ID NO: 5292 - RNA, 20 nt, synthetic construct
  source 1..20: mol_type = other RNA
acattacataatgagttttg

SEQ ID NO: 5293 - RNA, 20 nt, synthetic construct
  source 1..20: mol_type = other RNA
ttatgtaatgttgagtgaaa

SEQ ID NO: 5294 - RNA, 20 nt, synthetic construct
  source 1..20: mol_type = other RNA
gactctacatttaaacatta

SEQ ID NO: 5295 - RNA, 20 nt, synthetic construct
  source 1..20: mol_type = other RNA
acatttaaacattattcttt

SEQ ID NO: 5296 - RNA, 20 nt, synthetic construct
  source 1..20: mol_type = other RNA
gattgttaaatccaggtttt

SEQ ID NO: 5297 - RNA, 20 nt, synthetic construct
  source 1..20: mol_type = other RNA
tatatgacgtttacactctc

SEQ ID NO: 5298 - RNA, 20 nt, synthetic construct
  source 1..20: mol_type = other RNA
gaaccctggagagtgtaaac

SEQ ID NO: 5299 - RNA, 20 nt, synthetic construct
  source 1..20: mol_type = other RNA
ctgaaccctggagagtgtaa

SEQ ID NO: 5300 - RNA, 20 nt, synthetic construct
  source 1..20: mol_type = other RNA
ccagggttcagagagtctgg

SEQ ID NO: 5301 - RNA, 20 nt, synthetic construct
  source 1..20: mol_type = other RNA
agggttcagagagtctggca

SEQ ID NO: 5302 - RNA, 20 nt, synthetic construct
  source 1..20: mol_type = other RNA
caatgctgccagactctctg

SEQ ID NO: 5303 - RNA, 20 nt, synthetic construct
  source 1..20: mol_type = other RNA
tgtctgtccgtgaggctgta

SEQ ID NO: 5304 - RNA, 20 nt, synthetic construct
  source 1..20: mol_type = other RNA
cggacagacaggaggtccat

SEQ ID NO: 5305 - RNA, 20 nt, synthetic construct
  source 1..20: mol_type = other RNA
agaagaacagagcagtggtg

SEQ ID NO: 5306 - RNA, 20 nt, synthetic construct
  source 1..20: mol_type = other RNA
gttcttctggagtttccttg

SEQ ID NO: 5307 - RNA, 20 nt, synthetic construct
  source 1..20: mol_type = other RNA
aggaagcccagctccctgtg

SEQ ID NO: 5308 - RNA, 20 nt, synthetic construct
  source 1..20: mol_type = other RNA
atcacagggagctgggcttc

SEQ ID NO: 5309 - RNA, 20 nt, synthetic construct
  source 1..20: mol_type = other RNA
ctgtgattgagaatgaagtg

SEQ ID NO: 5310 - RNA, 20 nt, synthetic construct
  source 1..20: mol_type = other RNA
tagcgattgcacacttcatt

SEQ ID NO: 5311 - RNA, 20 nt, synthetic construct
  source 1..20: mol_type = other RNA
tccattcagaaactcatagc

SEQ ID NO: 5312 - RNA, 20 nt, synthetic construct
  source 1..20: mol_type = other RNA
gtggatttgactcttccatt

SEQ ID NO: 5313 - RNA, 20 nt, synthetic construct
  source 1..20: mol_type = other RNA
agccaaatgcccagcacaga

SEQ ID NO: 5314 - RNA, 20 nt, synthetic construct
  source 1..20: mol_type = other RNA
gtgctgggcatttggctgga

SEQ ID NO: 5315 - RNA, 20 nt, synthetic construct
  source 1..20: mol_type = other RNA
tgatcttttcttaccttgca

SEQ ID NO: 5316 - RNA, 20 nt, synthetic construct
  source 1..20: mol_type = other RNA
cctgtctcagtctcagtccc

SEQ ID NO: 5317 - RNA, 20 nt, synthetic construct
  source 1..20: mol_type = other RNA
tgtctcagtctcagtccctt

SEQ ID NO: 5318 - RNA, 20 nt, synthetic construct
  source 1..20: mol_type = other RNA
agtctaagggactgagactg

SEQ ID NO: 5319 - RNA, 20 nt, synthetic construct
  source 1..20: mol_type = other RNA
gtctcagtcccttagacttg

SEQ ID NO: 5320 - RNA, 20 nt, synthetic construct
  source 1..20: mol_type = other RNA
gtcccttagacttgagtccc

SEQ ID NO: 5321 - RNA, 20 nt, synthetic construct
  source 1..20: mol_type = other RNA
gaaactccctagatctgtcc

SEQ ID NO: 5322 - RNA, 20 nt, synthetic construct
  source 1..20: mol_type = other RNA
ctagatctgtcccaaatgta

SEQ ID NO: 5323 - RNA, 20 nt, synthetic construct
  source 1..20: mol_type = other RNA
agccccaagaagtccccttg

SEQ ID NO: 5324 - RNA, 20 nt, synthetic construct
  source 1..20: mol_type = other RNA
cttgctgctgatctggaact

SEQ ID NO: 5325 - RNA, 20 nt, synthetic construct
  source 1..20: mol_type = other RNA
gaccactcaccctcctgggg

SEQ ID NO: 5326 - RNA, 20 nt, synthetic construct
  source 1..20: mol_type = other RNA
ccctcctggggtgtcccggt

SEQ ID NO: 5327 - RNA, 20 nt, synthetic construct
  source 1..20: mol_type = other RNA
tggggtgtcccggtggccag

SEQ ID NO: 5328 - RNA, 20 nt, synthetic construct
  source 1..20: mol_type = other RNA
ttccctaccagaaaaatcac

SEQ ID NO: 5329 - RNA, 20 nt, synthetic construct
  source 1..20: mol_type = other RNA
acctccttccctaccagaaa

SEQ ID NO: 5330 - RNA, 20 nt, synthetic construct
  source 1..20: mol_type = other RNA
gtcctgtaccctctacctcc

SEQ ID NO: 5331 - RNA, 20 nt, synthetic construct
  source 1..20: mol_type = other RNA
gatattgtgtgcagttagtc

SEQ ID NO: 5332 - RNA, 20 nt, synthetic construct
  source 1..20: mol_type = other RNA
agtctcagatattgtgtgca

SEQ ID NO: 5333 - RNA, 20 nt, synthetic construct
  source 1..20: mol_type = other RNA
gatcatcagcaatatctgag

SEQ ID NO: 5334 - RNA, 20 nt, synthetic construct
  source 1..20: mol_type = other RNA
gatattgctgatgatcagag

SEQ ID NO: 5335 - RNA, 20 nt, synthetic construct
  source 1..20: mol_type = other RNA
ccaattgatttacaactggg

SEQ ID NO: 5336 - RNA, 20 nt, synthetic construct
  source 1..20: mol_type = other RNA
cgtttaaaacagtatccaag

SEQ ID NO: 5337 - RNA, 20 nt, synthetic construct
  source 1..20: mol_type = other RNA
tcccgtttaaaacagtatcc

SEQ ID NO: 5338 - RNA, 20 nt, synthetic construct
  source 1..20: mol_type = other RNA
taaccatcttgacacaacca

SEQ ID NO: 5339 - RNA, 20 nt, synthetic construct
  source 1..20: mol_type = other RNA
agtgtagtcacgtcagtggt

SEQ ID NO: 5340 - RNA, 20 nt, synthetic construct
  source 1..20: mol_type = other RNA
ttccacttaattctaccact

SEQ ID NO: 5341 - RNA, 20 nt, synthetic construct
  source 1..20: mol_type = other RNA
tgaagtaaagcaagagtggt

SEQ ID NO: 5342 - RNA, 20 nt, synthetic construct
  source 1..20: mol_type = other RNA
tgctttacttcatgagaacg

SEQ ID NO: 5343 - RNA, 20 nt, synthetic construct
  source 1..20: mol_type = other RNA
ataaaataaaataaaataaa

SEQ ID NO: 5344 - RNA, 20 nt, synthetic construct
  source 1..20: mol_type = other RNA
caccccggttgaagtgcact

SEQ ID NO: 5345 - RNA, 20 nt, synthetic construct
  source 1..20: mol_type = other RNA
ccccggttgaagtgcactga

SEQ ID NO: 5346 - RNA, 20 nt, synthetic construct
  source 1..20: mol_type = other RNA
ctgcaacttccacctcctgg

SEQ ID NO: 5347 - RNA, 20 nt, synthetic construct
  source 1..20: mol_type = other RNA
tgggttcaagtgaatactcc

SEQ ID NO: 5348 - RNA, 20 nt, synthetic construct
  source 1..20: mol_type = other RNA
agcctccctagtagctggga

SEQ ID NO: 5349 - RNA, 20 nt, synthetic construct
  source 1..20: mol_type = other RNA
ctagtagctgggattacagg

SEQ ID NO: 5350 - RNA, 20 nt, synthetic construct
  source 1..20: mol_type = other RNA
actaaaaatacaaaaattag

SEQ ID NO: 5351 - RNA, 20 nt, synthetic construct
  source 1..20: mol_type = other RNA
aactcctgaccttgtgatcc

SEQ ID NO: 5352 - RNA, 20 nt, synthetic construct
  source 1..20: mol_type = other RNA
tgaccttgtgatccacctgt

SEQ ID NO: 5353 - RNA, 20 nt, synthetic construct
  source 1..20: mol_type = other RNA
gtaatcccagcactttggga

SEQ ID NO: 5354 - RNA, 20 nt, synthetic construct
  source 1..20: mol_type = other RNA
caaagtgctgggattacaga

SEQ ID NO: 5355 - RNA, 20 nt, synthetic construct
  source 1..20: mol_type = other RNA
actctgtaatcccagcactt

SEQ ID NO: 5356 - RNA, 20 nt, synthetic construct
  source 1..20: mol_type = other RNA
accctatgttttatttttaa

SEQ ID NO: 5357 - RNA, 20 nt, synthetic construct
  source 1..20: mol_type = other RNA
ggaaagaaaaaaaaataata

SEQ ID NO: 5358 - RNA, 20 nt, synthetic construct
  source 1..20: mol_type = other RNA
agcctgggtgacagagcaag

SEQ ID NO: 5359 - RNA, 20 nt, synthetic construct
  source 1..20: mol_type = other RNA
gtcacccaggctggagtgca

SEQ ID NO: 5360 - RNA, 20 nt, synthetic construct
  source 1..20: mol_type = other RNA
ctgcaacctccatctcctgt

SEQ ID NO: 5361 - RNA, 20 nt, synthetic construct
  source 1..20: mol_type = other RNA
atctcctgtgttcaagcaat

SEQ ID NO: 5362 - RNA, 20 nt, synthetic construct
  source 1..20: mol_type = other RNA
tgtgttcaagcaattctagt

SEQ ID NO: 5363 - RNA, 20 nt, synthetic construct
  source 1..20: mol_type = other RNA
gcctacttagtagctgggat

SEQ ID NO: 5364 - RNA, 20 nt, synthetic construct
  source 1..20: mol_type = other RNA
acacccagctaatttttgta

SEQ ID NO: 5365 - RNA, 20 nt, synthetic construct
  source 1..20: mol_type = other RNA
acaaaaaatacaaaaattag

SEQ ID NO: 5366 - RNA, 20 nt, synthetic construct
  source 1..20: mol_type = other RNA
aactcctggcctcaggtgat

SEQ ID NO: 5367 - RNA, 20 nt, synthetic construct
  source 1..20: mol_type = other RNA
tggcctcaggtgatccatct

SEQ ID NO: 5368 - RNA, 20 nt, synthetic construct
  source 1..20: mol_type = other RNA
ggtgatccatctgccgtggc

SEQ ID NO: 5369 - RNA, 20 nt, synthetic construct
  source 1..20: mol_type = other RNA
caaaatgctgggattatagg

SEQ ID NO: 5370 - RNA, 20 nt, synthetic construct
  source 1..20: mol_type = other RNA
tgcctataatcccagcattt

SEQ ID NO: 5371 - RNA, 20 nt, synthetic construct
  source 1..20: mol_type = other RNA
tggaaggattgatatcttat

SEQ ID NO: 5372 - RNA, 20 nt, synthetic construct
  source 1..20: mol_type = other RNA
catgttttctgtaattataa

SEQ ID NO: 5373 - RNA, 20 nt, synthetic construct
  source 1..20: mol_type = other RNA
acatcctataccaaactgtg

SEQ ID NO: 5374 - RNA, 20 nt, synthetic construct
  source 1..20: mol_type = other RNA
taaactaagacctgaaaggg

SEQ ID NO: 5375 - RNA, 20 nt, synthetic construct
  source 1..20: mol_type = other RNA
ggaaggcctcagccccctcc

SEQ ID NO: 5376 - RNA, 20 nt, synthetic construct
  source 1..20: mol_type = other RNA
gccccctcctcgtacagcac

SEQ ID NO: 5377 - RNA, 20 nt, synthetic construct
  source 1..20: mol_type = other RNA
tcgtacagcactgcctgttg

SEQ ID NO: 5378 - RNA, 20 nt, synthetic construct
  source 1..20: mol_type = other RNA
tacagcactgcctgttggaa

SEQ ID NO: 5379 - RNA, 20 nt, synthetic construct
  source 1..20: mol_type = other RNA
agctttccaacaggcagtgc

SEQ ID NO: 5380 - RNA, 20 nt, synthetic construct
  source 1..20: mol_type = other RNA
ctcaagctttccaacaggca

SEQ ID NO: 5381 - RNA, 20 nt, synthetic construct
  source 1..20: mol_type = other RNA
gccaagtgctgcacatccat

SEQ ID NO: 5382 - RNA, 20 nt, synthetic construct
  source 1..20: mol_type = other RNA
tatttgctggtaacttccat

SEQ ID NO: 5383 - RNA, 20 nt, synthetic construct
  source 1..20: mol_type = other RNA
ttcttttggataaaataaaa

SEQ ID NO: 5384 - RNA, 20 nt, synthetic construct
  source 1..20: mol_type = other RNA
tctttcattctctttctttt

SEQ ID NO: 5385 - RNA, 20 nt, synthetic construct
  source 1..20: mol_type = other RNA
cctcttctttcattctcttt

SEQ ID NO: 5386 - RNA, 20 nt, synthetic construct
  source 1..20: mol_type = other RNA
ttactccttccctcacccct

SEQ ID NO: 5387 - RNA, 20 nt, synthetic construct
  source 1..20: mol_type = other RNA
caaatattttataagactct

SEQ ID NO: 5388 - RNA, 20 nt, synthetic construct
  source 1..20: mol_type = other RNA
aatattttataagactctat

SEQ ID NO: 5389 - RNA, 20 nt, synthetic construct
  source 1..20: mol_type = other RNA
atattcaaggtaatgtttga

SEQ ID NO: 5390 - RNA, 20 nt, synthetic construct
  source 1..20: mol_type = other RNA
gcagggttcaaacattacct

SEQ ID NO: 5391 - RNA, 20 nt, synthetic construct
  source 1..20: mol_type = other RNA
gagacccatgccactggctc

SEQ ID NO: 5392 - RNA, 20 nt, synthetic construct
  source 1..20: mol_type = other RNA
cagagacccatgccactggc

SEQ ID NO: 5393 - RNA, 20 nt, synthetic construct
  source 1..20: mol_type = other RNA
gagagaatcattaacttaat

SEQ ID NO: 5394 - RNA, 20 nt, synthetic construct
  source 1..20: mol_type = other RNA
catgtaagtcaacaatgtcc

SEQ ID NO: 5395 - RNA, 20 nt, synthetic construct
  source 1..20: mol_type = other RNA
tgtaagtcaacaatgtcctg

SEQ ID NO: 5396 - RNA, 20 nt, synthetic construct
  source 1..20: mol_type = other RNA
cacaatgtagtaaaaataca

SEQ ID NO: 5397 - RNA, 20 nt, synthetic construct
  source 1..20: mol_type = other RNA
tttagattagaaaaatcaac

SEQ ID NO: 5398 - RNA, 20 nt, synthetic construct
  source 1..20: mol_type = other RNA
tcgcttggttctcagtttca

SEQ ID NO: 5399 - RNA, 20 nt, synthetic construct
  source 1..20: mol_type = other RNA
gtttcattaatttatatcat

SEQ ID NO: 5400 - RNA, 20 nt, synthetic construct
  source 1..20: mol_type = other RNA
gttcaggtgccatgctcccc

SEQ ID NO: 5401 - RNA, 20 nt, synthetic construct
  source 1..20: mol_type = other RNA
cctcactagcaagttgaaac

SEQ ID NO: 5402 - RNA, 20 nt, synthetic construct
  source 1..20: mol_type = other RNA
ctagcaagttgaaacaatga

SEQ ID NO: 5403 - RNA, 20 nt, synthetic construct
  source 1..20: mol_type = other RNA
ttgaatatgtttggttcctt

SEQ ID NO: 5404 - RNA, 20 nt, synthetic construct
  source 1..20: mol_type = other RNA
atgaacaggtcaaggaacca

SEQ ID NO: 5405 - RNA, 20 nt, synthetic construct
  source 1..20: mol_type = other RNA
gcatttctctctttgttatg

SEQ ID NO: 5406 - RNA, 20 nt, synthetic construct
  source 1..20: mol_type = other RNA
ggccataacaaagagagaaa

SEQ ID NO: 5407 - RNA, 20 nt, synthetic construct
  source 1..20: mol_type = other RNA
ctttgttatggcctgagtaa

SEQ ID NO: 5408 - RNA, 20 nt, synthetic construct
  source 1..20: mol_type = other RNA
ttgttatggcctgagtaagg

SEQ ID NO: 5409 - RNA, 20 nt, synthetic construct
  source 1..20: mol_type = other RNA
agggataagaagcaaatgta

SEQ ID NO: 5410 - RNA, 20 nt, synthetic construct
  source 1..20: mol_type = other RNA
acaaataccctgagtatttg

SEQ ID NO: 5411 - RNA, 20 nt, synthetic construct
  source 1..20: mol_type = other RNA
gggtatttgttgagtgggtt

SEQ ID NO: 5412 - RNA, 20 nt, synthetic construct
  source 1..20: mol_type = other RNA
tggtataggtagggtagcat

SEQ ID NO: 5413 - RNA, 20 nt, synthetic construct
  source 1..20: mol_type = other RNA
tgaccaaattcccaaatcaa

SEQ ID NO: 5414 - RNA, 20 nt, synthetic construct
  source 1..20: mol_type = other RNA
tctcactttttcatctttgt

SEQ ID NO: 5415 - RNA, 20 nt, synthetic construct
  source 1..20: mol_type = other RNA
ctttttcatctttgttccaa

SEQ ID NO: 5416 - RNA, 20 nt, synthetic construct
  source 1..20: mol_type = other RNA
tcagttacattggaatgtgt

SEQ ID NO: 5417 - RNA, 20 nt, synthetic construct
  source 1..20: mol_type = other RNA
tcttaattggattctgcaag

SEQ ID NO: 5418 - RNA, 20 nt, synthetic construct
  source 1..20: mol_type = other RNA
cttcttaattggattctgca

SEQ ID NO: 5419 - RNA, 20 nt, synthetic construct
  source 1..20: mol_type = other RNA
taaagtgaagtagtacggca

SEQ ID NO: 5420 - RNA, 20 nt, synthetic construct
  source 1..20: mol_type = other RNA
gttgccttttaaaagtgcca

SEQ ID NO: 5421 - RNA, 20 nt, synthetic construct
  source 1..20: mol_type = other RNA
tctgttgccttttaaaagtg

SEQ ID NO: 5422 - RNA, 20 nt, synthetic construct
  source 1..20: mol_type = other RNA
cctcctctgttgccttttaa

SEQ ID NO: 5423 - RNA, 20 nt, synthetic construct
  source 1..20: mol_type = other RNA
actacctggtggataaggtg

SEQ ID NO: 5424 - RNA, 20 nt, synthetic construct
  source 1..20: mol_type = other RNA
caaaggcaccagcaggcaac

SEQ ID NO: 5425 - RNA, 20 nt, synthetic construct
  source 1..20: mol_type = other RNA
agggacaacaccctgctcac

SEQ ID NO: 5426 - RNA, 20 nt, synthetic construct
  source 1..20: mol_type = other RNA
agagatttgcctcaagggac

SEQ ID NO: 5427 - RNA, 20 nt, synthetic construct
  source 1..20: mol_type = other RNA
ccctccagagatttgcctca

SEQ ID NO: 5428 - RNA, 20 nt, synthetic construct
  source 1..20: mol_type = other RNA
caccctccagagatttgcct

SEQ ID NO: 5429 - RNA, 20 nt, synthetic construct
  source 1..20: mol_type = other RNA
ggagggtgagagttttgtag

SEQ ID NO: 5430 - RNA, 20 nt, synthetic construct
  source 1..20: mol_type = other RNA
tgagttcacaggtgatttat

SEQ ID NO: 5431 - RNA, 20 nt, synthetic construct
  source 1..20: mol_type = other RNA
ggagttccatcttgaagcac

SEQ ID NO: 5432 - RNA, 20 nt, synthetic construct
  source 1..20: mol_type = other RNA
ctgcagggcaagttcatcta

SEQ ID NO: 5433 - RNA, 20 nt, synthetic construct
  source 1..20: mol_type = other RNA
ccctgcagggcaagttcatc

SEQ ID NO: 5434 - RNA, 20 nt, synthetic construct
  source 1..20: mol_type = other RNA
ctttcatcagactctccctg

SEQ ID NO: 5435 - RNA, 20 nt, synthetic construct
  source 1..20: mol_type = other RNA
gtattttctttgatattttc

SEQ ID NO: 5436 - RNA, 20 nt, synthetic construct
  source 1..20: mol_type = other RNA
tgctctgtattttctttgat

SEQ ID NO: 5437 - RNA, 20 nt, synthetic construct
  source 1..20: mol_type = other RNA
ttgcttaatcttctcctgct

SEQ ID NO: 5438 - RNA, 20 nt, synthetic construct
  source 1..20: mol_type = other RNA
ctacacacacagacatagac

SEQ ID NO: 5439 - RNA, 20 nt, synthetic construct
  source 1..20: mol_type = other RNA
gccacaggattaacatatgt

SEQ ID NO: 5440 - RNA, 20 nt, synthetic construct
  source 1..20: mol_type = other RNA
gataagctcttttggaaagc

SEQ ID NO: 5441 - RNA, 20 nt, synthetic construct
  source 1..20: mol_type = other RNA
tttggaaagccaggctttct

SEQ ID NO: 5442 - RNA, 20 nt, synthetic construct
  source 1..20: mol_type = other RNA
ccgggcattccagcacacat

SEQ ID NO: 5443 - RNA, 20 nt, synthetic construct
  source 1..20: mol_type = other RNA
ccccgggcattccagcacac

SEQ ID NO: 5444 - RNA, 20 nt, synthetic construct
  source 1..20: mol_type = other RNA
ctgagcatggctgtaaaaga

SEQ ID NO: 5445 - RNA, 20 nt, synthetic construct
  source 1..20: mol_type = other RNA
gcttctcactgagcatggct

SEQ ID NO: 5446 - RNA, 20 nt, synthetic construct
  source 1..20: mol_type = other RNA
gtgagaagcggagaaacatc

SEQ ID NO: 5447 - RNA, 20 nt, synthetic construct
  source 1..20: mol_type = other RNA
ctgtggtgtgtgaatgtgta

SEQ ID NO: 5448 - RNA, 20 nt, synthetic construct
  source 1..20: mol_type = other RNA
caccattaataaaatacatt

SEQ ID NO: 5449 - RNA, 20 nt, synthetic construct
  source 1..20: mol_type = other RNA
tatggcaatggggatttaat

SEQ ID NO: 5450 - RNA, 20 nt, synthetic construct
  source 1..20: mol_type = other RNA
agggctcatatggcaatggg

SEQ ID NO: 5451 - RNA, 20 nt, synthetic construct
  source 1..20: mol_type = other RNA
gattcacctccagggctcat

SEQ ID NO: 5452 - RNA, 20 nt, synthetic construct
  source 1..20: mol_type = other RNA
tgttgctaggaaatatccca

SEQ ID NO: 5453 - RNA, 20 nt, synthetic construct
  source 1..20: mol_type = other RNA
ccagctcatgttgctaggaa

SEQ ID NO: 5454 - RNA, 20 nt, synthetic construct
  source 1..20: mol_type = other RNA
gcagtgatgctctatgaagc

SEQ ID NO: 5455 - RNA, 20 nt, synthetic construct
  source 1..20: mol_type = other RNA
atgaagcataataaaatgac

SEQ ID NO: 5456 - RNA, 20 nt, synthetic construct
  source 1..20: mol_type = other RNA
ttttgaatatcaattgtagc

SEQ ID NO: 5457 - RNA, 20 nt, synthetic construct
  source 1..20: mol_type = other RNA
gctacatttcaaaaacactc

SEQ ID NO: 5458 - RNA, 20 nt, synthetic construct
  source 1..20: mol_type = other RNA
tcaaaatgtttaactgaact

SEQ ID NO: 5459 - RNA, 20 nt, synthetic construct
  source 1..20: mol_type = other RNA
ctgtaggaagcaccttatta

SEQ ID NO: 5460 - RNA, 20 nt, synthetic construct
  source 1..20: mol_type = other RNA
cagtgtgacttcaaaacaca

SEQ ID NO: 5461 - RNA, 20 nt, synthetic construct
  source 1..20: mol_type = other RNA
tttccaggaagagttgtgct

SEQ ID NO: 5462 - RNA, 20 nt, synthetic construct
  source 1..20: mol_type = other RNA
cttttccaggaagagttgtg

SEQ ID NO: 5463 - RNA, 20 nt, synthetic construct
  source 1..20: mol_type = other RNA
tcctggaaaagagagttcaa

SEQ ID NO: 5464 - RNA, 20 nt, synthetic construct
  source 1..20: mol_type = other RNA
tttgaactctcttttccagg

SEQ ID NO: 5465 - RNA, 20 nt, synthetic construct
  source 1..20: mol_type = other RNA
atgatattttgatatatcta

SEQ ID NO: 5466 - RNA, 20 nt, synthetic construct
  source 1..20: mol_type = other RNA
atgctggaaaactggattat

SEQ ID NO: 5467 - RNA, 20 nt, synthetic construct
  source 1..20: mol_type = other RNA
atttaatatgctctatgctg

SEQ ID NO: 5468 - RNA, 20 nt, synthetic construct
  source 1..20: mol_type = other RNA
gtgactttgtccttcctcaa

SEQ ID NO: 5469 - RNA, 20 nt, synthetic construct
  source 1..20: mol_type = other RNA
ccacctctgtgactttgtcc

SEQ ID NO: 5470 - RNA, 20 nt, synthetic construct
  source 1..20: mol_type = other RNA
ctgtttcatgcaaagtcctt

SEQ ID NO: 5471 - RNA, 20 nt, synthetic construct
  source 1..20: mol_type = other RNA
tccttgccctgccctcatgg

SEQ ID NO: 5472 - RNA, 20 nt, synthetic construct
  source 1..20: mol_type = other RNA
ttgccctgccctcatggtct

SEQ ID NO: 5473 - RNA, 20 nt, synthetic construct
  source 1..20: mol_type = other RNA
tgagagtacacagaccatga

SEQ ID NO: 5474 - RNA, 20 nt, synthetic construct
  source 1..20: mol_type = other RNA
tggtctgtgtactctcagga

SEQ ID NO: 5475 - RNA, 20 nt, synthetic construct
  source 1..20: mol_type = other RNA
caggaggtcaggacaggcct

SEQ ID NO: 5476 - RNA, 20 nt, synthetic construct
  source 1..20: mol_type = other RNA
ggaggtcaggacaggccttt

SEQ ID NO: 5477 - RNA, 20 nt, synthetic construct
  source 1..20: mol_type = other RNA
gaaaggcctgtcctgacctc

SEQ ID NO: 5478 - RNA, 20 nt, synthetic construct
  source 1..20: mol_type = other RNA
ttctcagaaaggcctgtcct

SEQ ID NO: 5479 - RNA, 20 nt, synthetic construct
  source 1..20: mol_type = other RNA
gcagtgtgtcatctttcaga

SEQ ID NO: 5480 - RNA, 20 nt, synthetic construct
  source 1..20: mol_type = other RNA
cctgaccctgtattccctag

SEQ ID NO: 5481 - RNA, 20 nt, synthetic construct
  source 1..20: mol_type = other RNA
gaaagcagcgagacttctag

SEQ ID NO: 5482 - RNA, 20 nt, synthetic construct
  source 1..20: mol_type = other RNA
ctgctttcagagccaggctt

SEQ ID NO: 5483 - RNA, 20 nt, synthetic construct
  source 1..20: mol_type = other RNA
cctgctgccacccccactgc

SEQ ID NO: 5484 - RNA, 20 nt, synthetic construct
  source 1..20: mol_type = other RNA
tgctgccacccccactgctc

SEQ ID NO: 5485 - RNA, 20 nt, synthetic construct
  source 1..20: mol_type = other RNA
tctagtcactctttaaccca

SEQ ID NO: 5486 - RNA, 20 nt, synthetic construct
  source 1..20: mol_type = other RNA
ttaacccactccatctgcat

SEQ ID NO: 5487 - RNA, 20 nt, synthetic construct
  source 1..20: mol_type = other RNA
atctgcatgtggcccccacc

SEQ ID NO: 5488 - RNA, 20 nt, synthetic construct
  source 1..20: mol_type = other RNA
aagtggtcaaggttgtcctg

SEQ ID NO: 5489 - RNA, 20 nt, synthetic construct
  source 1..20: mol_type = other RNA
tttggcctctcaccctgtga

SEQ ID NO: 5490 - RNA, 20 nt, synthetic construct
  source 1..20: mol_type = other RNA
caccctgtgaaaatcactac

SEQ ID NO: 5491 - RNA, 20 nt, synthetic construct
  source 1..20: mol_type = other RNA
ccctgtgaaaatcactacat

SEQ ID NO: 5492 - RNA, 20 nt, synthetic construct
  source 1..20: mol_type = other RNA
ggcacaaaatgtagtgattt

SEQ ID NO: 5493 - RNA, 20 nt, synthetic construct
  source 1..20: mol_type = other RNA
atctctggcacaaaatgtag

SEQ ID NO: 5494 - RNA, 20 nt, synthetic construct
  source 1..20: mol_type = other RNA
tccaagcctggagatgccag

SEQ ID NO: 5495 - RNA, 20 nt, synthetic construct
  source 1..20: mol_type = other RNA
aggcttggaagagggctgct

SEQ ID NO: 5496 - RNA, 20 nt, synthetic construct
  source 1..20: mol_type = other RNA
ttaggacacctggctgagct

SEQ ID NO: 5497 - RNA, 20 nt, synthetic construct
  source 1..20: mol_type = other RNA
gccaggtgtcctaaggagcc

SEQ ID NO: 5498 - RNA, 20 nt, synthetic construct
  source 1..20: mol_type = other RNA
ggacaggggatgctcagtag

SEQ ID NO: 5499 - RNA, 20 nt, synthetic construct
  source 1..20: mol_type = other RNA
gtagccttgcaatgggaaca

SEQ ID NO: 5500 - RNA, 20 nt, synthetic construct
  source 1..20: mol_type = other RNA
gctgtgttcccattgcaagg

SEQ ID NO: 5501 - RNA, 20 nt, synthetic construct
  source 1..20: mol_type = other RNA
gatttgatctcaaagaaaaa

SEQ ID NO: 5502 - RNA, 20 nt, synthetic construct
  source 1..20: mol_type = other RNA
aagaaaaatcgtgggcagta

SEQ ID NO: 5503 - RNA, 20 nt, synthetic construct
  source 1..20: mol_type = other RNA
gaaatctggatgcctatcaa

SEQ ID NO: 5504 - RNA, 20 nt, synthetic construct
  source 1..20: mol_type = other RNA
ccaactaatagtggtgtgtc

SEQ ID NO: 5505 - RNA, 20 nt, synthetic construct
  source 1..20: mol_type = other RNA
acaaagaaggccatttttgt

SEQ ID NO: 5506 - RNA, 20 nt, synthetic construct
  source 1..20: mol_type = other RNA
tccacaaagaaggccatttt

SEQ ID NO: 5507 - RNA, 20 nt, synthetic construct
  source 1..20: mol_type = other RNA
attttttttttgcttaattt

SEQ ID NO: 5508 - RNA, 20 nt, synthetic construct
  source 1..20: mol_type = other RNA
tcttgggcaaaaattaagca

SEQ ID NO: 5509 - RNA, 20 nt, synthetic construct
  source 1..20: mol_type = other RNA
tttagttacaaaaatgttgg

SEQ ID NO: 5510 - RNA, 20 nt, synthetic construct
  source 1..20: mol_type = other RNA
aaggttcatttctacacagg

SEQ ID NO: 5511 - RNA, 20 nt, synthetic construct
  source 1..20: mol_type = other RNA
tgattgccatgtcatgataa

SEQ ID NO: 5512 - RNA, 20 nt, synthetic construct
  source 1..20: mol_type = other RNA
tatctagctatctgcctagt

SEQ ID NO: 5513 - RNA, 20 nt, synthetic construct
  source 1..20: mol_type = other RNA
tgctcatatctagctatctg

SEQ ID NO: 5514 - RNA, 20 nt, synthetic construct
  source 1..20: mol_type = other RNA
ggggcttccacctcctgctc

SEQ ID NO: 5515 - RNA, 20 nt, synthetic construct
  source 1..20: mol_type = other RNA
caggggcttccacctcctgc

SEQ ID NO: 5516 - RNA, 20 nt, synthetic construct
  source 1..20: mol_type = other RNA
attctctcaggggcttccac

SEQ ID NO: 5517 - RNA, 20 nt, synthetic construct
  source 1..20: mol_type = other RNA
agacctccattctctcaggg

SEQ ID NO: 5518 - RNA, 20 nt, synthetic construct
  source 1..20: mol_type = other RNA
ggggtttcagattctccaga

SEQ ID NO: 5519 - RNA, 20 nt, synthetic construct
  source 1..20: mol_type = other RNA
tgtctagcatgcaggacttg

SEQ ID NO: 5520 - RNA, 20 nt, synthetic construct
  source 1..20: mol_type = other RNA
actcatgtctagcatgcagg

SEQ ID NO: 5521 - RNA, 20 nt, synthetic construct
  source 1..20: mol_type = other RNA
tccactcatgtctagcatgc

SEQ ID NO: 5522 - RNA, 20 nt, synthetic construct
  source 1..20: mol_type = other RNA
ctgtgcagttaacttttcag

SEQ ID NO: 5523 - RNA, 20 nt, synthetic construct
  source 1..20: mol_type = other RNA
ctatcagcatgtatctagca

SEQ ID NO: 5524 - RNA, 20 nt, synthetic construct
  source 1..20: mol_type = other RNA
tccctccctatcagcatgta

SEQ ID NO: 5525 - RNA, 20 nt, synthetic construct
  source 1..20: mol_type = other RNA
tttgccctcttccctcccta

SEQ ID NO: 5526 - RNA, 20 nt, synthetic construct
  source 1..20: mol_type = other RNA
taggaatttctcctttgccc

SEQ ID NO: 5527 - RNA, 20 nt, synthetic construct
  source 1..20: mol_type = other RNA
gatgtatactaactgcaacc

SEQ ID NO: 5528 - RNA, 20 nt, synthetic construct
  source 1..20: mol_type = other RNA
ataaatatgatttttaaaaa

SEQ ID NO: 5529 - RNA, 20 nt, synthetic construct
  source 1..20: mol_type = other RNA
agagtttgagataaacagtg

SEQ ID NO: 5530 - RNA, 20 nt, synthetic construct
  source 1..20: mol_type = other RNA
aactcttgagattaaagtat

SEQ ID NO: 5531 - RNA, 20 nt, synthetic construct
  source 1..20: mol_type = other RNA
tgagattaaagtatgggctc

SEQ ID NO: 5532 - RNA, 20 nt, synthetic construct
  source 1..20: mol_type = other RNA
tgagcccatactttaatctc

SEQ ID NO: 5533 - RNA, 20 nt, synthetic construct
  source 1..20: mol_type = other RNA
ctcctgagcccatactttaa

SEQ ID NO: 5534 - RNA, 20 nt, synthetic construct
  source 1..20: mol_type = other RNA
ctccctcctgagcccatact

SEQ ID NO: 5535 - RNA, 20 nt, synthetic construct
  source 1..20: mol_type = other RNA
tcgctccctcctgagcccat

SEQ ID NO: 5536 - RNA, 20 nt, synthetic construct
  source 1..20: mol_type = other RNA
ggagggagcgaggagcttca

SEQ ID NO: 5537 - RNA, 20 nt, synthetic construct
  source 1..20: mol_type = other RNA
cacggacctccagcacagtg

SEQ ID NO: 5538 - RNA, 20 nt, synthetic construct
  source 1..20: mol_type = other RNA
cggacctccagcacagtgta

SEQ ID NO: 5539 - RNA, 20 nt, synthetic construct
  source 1..20: mol_type = other RNA
agcacagtgtagctgcctta

SEQ ID NO: 5540 - RNA, 20 nt, synthetic construct
  source 1..20: mol_type = other RNA
gcccagtgaggaatagtagg

SEQ ID NO: 5541 - RNA, 20 nt, synthetic construct
  source 1..20: mol_type = other RNA
ctgggcagagcacagccacc

SEQ ID NO: 5542 - RNA, 20 nt, synthetic construct
  source 1..20: mol_type = other RNA
ccagagaagcacagagccaa

SEQ ID NO: 5543 - RNA, 20 nt, synthetic construct
  source 1..20: mol_type = other RNA
gtgcttctctggggaggaaa

SEQ ID NO: 5544 - RNA, 20 nt, synthetic construct
  source 1..20: mol_type = other RNA
tggatttcctccccagagaa

SEQ ID NO: 5545 - RNA, 20 nt, synthetic construct
  source 1..20: mol_type = other RNA
ggggaggaaatccaagagac

SEQ ID NO: 5546 - RNA, 20 nt, synthetic construct
  source 1..20: mol_type = other RNA
gccatttcagctgcagcagt

SEQ ID NO: 5547 - RNA, 20 nt, synthetic construct
  source 1..20: mol_type = other RNA
agcccaagggcattaacggt

SEQ ID NO: 5548 - RNA, 20 nt, synthetic construct
  source 1..20: mol_type = other RNA
agcacacagcagggaaagaa

SEQ ID NO: 5549 - RNA, 20 nt, synthetic construct
  source 1..20: mol_type = other RNA
caagaaagagaaactggaat

SEQ ID NO: 5550 - RNA, 20 nt, synthetic construct
  source 1..20: mol_type = other RNA
ttcttgtgagctttcacctg

SEQ ID NO: 5551 - RNA, 20 nt, synthetic construct
  source 1..20: mol_type = other RNA
tcaccaggcaaggctcctgg

SEQ ID NO: 5552 - RNA, 20 nt, synthetic construct
  source 1..20: mol_type = other RNA
tggcttgggcccacagtgca

SEQ ID NO: 5553 - RNA, 20 nt, synthetic construct
  source 1..20: mol_type = other RNA
aactcagttgaacatttcca

SEQ ID NO: 5554 - RNA, 20 nt, synthetic construct
  source 1..20: mol_type = other RNA
gttgaacatttccactggct

SEQ ID NO: 5555 - RNA, 20 nt, synthetic construct
  source 1..20: mol_type = other RNA
gtgtttttgtggggtgaagc

SEQ ID NO: 5556 - RNA, 20 nt, synthetic construct
  source 1..20: mol_type = other RNA
gggagcttcaccccacaaaa

SEQ ID NO: 5557 - RNA, 20 nt, synthetic construct
  source 1..20: mol_type = other RNA
cagaggtgactgaaagtcct

SEQ ID NO: 5558 - RNA, 20 nt, synthetic construct
  source 1..20: mol_type = other RNA
ggatcttttttccttcccta

SEQ ID NO: 5559 - RNA, 20 nt, synthetic construct
  source 1..20: mol_type = other RNA
caccccagtgtgccccagcc

SEQ ID NO: 5560 - RNA, 20 nt, synthetic construct
  source 1..20: mol_type = other RNA
tttccatagggtggctgggg

SEQ ID NO: 5561 - RNA, 20 nt, synthetic construct
  source 1..20: mol_type = other RNA
gggtgcttgcagggatgaca

SEQ ID NO: 5562 - RNA, 20 nt, synthetic construct
  source 1..20: mol_type = other RNA
acagcttgggggcagcaggg

SEQ ID NO: 5563 - RNA, 20 nt, synthetic construct
  source 1..20: mol_type = other RNA
cagcctacatctttctcctg

SEQ ID NO: 5564 - RNA, 20 nt, synthetic construct
  source 1..20: mol_type = other RNA
tgtgctggatccttcctgct

SEQ ID NO: 5565 - RNA, 20 nt, synthetic construct
  source 1..20: mol_type = other RNA
tgaacatcggactccaagtt

SEQ ID NO: 5566 - RNA, 20 nt, synthetic construct
  source 1..20: mol_type = other RNA
aagttcttcagctgtgggac

SEQ ID NO: 5567 - RNA, 20 nt, synthetic construct
  source 1..20: mol_type = other RNA
tcagattgcaggtggcctat

SEQ ID NO: 5568 - RNA, 20 nt, synthetic construct
  source 1..20: mol_type = other RNA
gattgcaggtggcctattat

SEQ ID NO: 5569 - RNA, 20 nt, synthetic construct
  source 1..20: mol_type = other RNA
caagattacaaggtcccata

SEQ ID NO: 5570 - RNA, 20 nt, synthetic construct
  source 1..20: mol_type = other RNA
cacaaaggggagcttattaa

SEQ ID NO: 5571 - RNA, 20 nt, synthetic construct
  source 1..20: mol_type = other RNA
cctttgtgtgagtatatcta

SEQ ID NO: 5572 - RNA, 20 nt, synthetic construct
  source 1..20: mol_type = other RNA
ctatatatacacatatatac

SEQ ID NO: 5573 - RNA, 20 nt, synthetic construct
  source 1..20: mol_type = other RNA
ctctctctctctctcatata

SEQ ID NO: 5574 - RNA, 20 nt, synthetic construct
  source 1..20: mol_type = other RNA
ctctctctctctcatatata

SEQ ID NO: 5575 - RNA, 20 nt, synthetic construct
  source 1..20: mol_type = other RNA
ctctctctctcatatatata

SEQ ID NO: 5576 - RNA, 20 nt, synthetic construct
  source 1..20: mol_type = other RNA
ctctctctcatatatatata

SEQ ID NO: 5577 - RNA, 20 nt, synthetic construct
  source 1..20: mol_type = other RNA
ctctctcatatatatatata

SEQ ID NO: 5578 - RNA, 20 nt, synthetic construct
  source 1..20: mol_type = other RNA
ctctcatatatatatatata

SEQ ID NO: 5579 - RNA, 20 nt, synthetic construct
  source 1..20: mol_type = other RNA
ctcatatatatatatatata

SEQ ID NO: 5580 - RNA, 20 nt, synthetic construct
  source 1..20: mol_type = other RNA
catatatatatatatataat

SEQ ID NO: 5581 - RNA, 20 nt, synthetic construct
  source 1..20: mol_type = other RNA
tatatatatatatataatct

SEQ ID NO: 5582 - RNA, 20 nt, synthetic construct
  source 1..20: mol_type = other RNA
agagggacagaactaatagg

SEQ ID NO: 5583 - RNA, 20 nt, synthetic construct
  source 1..20: mol_type = other RNA
tattagttctgtccctctag

SEQ ID NO: 5584 - RNA, 20 nt, synthetic construct
  source 1..20: mol_type = other RNA
agagaaccccgactaataca

SEQ ID NO: 5585 - RNA, 20 nt, synthetic construct
  source 1..20: mol_type = other RNA
agaaccacttctggtatgaa

SEQ ID NO: 5586 - RNA, 20 nt, synthetic construct
  source 1..20: mol_type = other RNA
atactattagaagtagagtc

SEQ ID NO: 5587 - RNA, 20 nt, synthetic construct
  source 1..20: mol_type = other RNA
acttctaatagtatggagaa

SEQ ID NO: 5588 - RNA, 20 nt, synthetic construct
  source 1..20: mol_type = other RNA
aaacaattcaggccaagtac

SEQ ID NO: 5589 - RNA, 20 nt, synthetic construct
  source 1..20: mol_type = other RNA
ctaaacaattcaggccaagt

SEQ ID NO: 5590 - RNA, 20 nt, synthetic construct
  source 1..20: mol_type = other RNA
taagtgatgaatcagtagtg

SEQ ID NO: 5591 - RNA, 20 nt, synthetic construct
  source 1..20: mol_type = other RNA
cataagtgatgaatcagtag

SEQ ID NO: 5592 - RNA, 20 nt, synthetic construct
  source 1..20: mol_type = other RNA
ttgcctctcataagtgatga

SEQ ID NO: 5593 - RNA, 20 nt, synthetic construct
  source 1..20: mol_type = other RNA
atacataatacctttgacta

SEQ ID NO: 5594 - RNA, 20 nt, synthetic construct
  source 1..20: mol_type = other RNA
acatatagtcaaaggtatta

SEQ ID NO: 5595 - RNA, 20 nt, synthetic construct
  source 1..20: mol_type = other RNA
agagaacttaggagcaatca

SEQ ID NO: 5596 - RNA, 20 nt, synthetic construct
  source 1..20: mol_type = other RNA
ttctccagagaacttaggag

SEQ ID NO: 5597 - RNA, 20 nt, synthetic construct
  source 1..20: mol_type = other RNA
taagttctctggagaaagag

SEQ ID NO: 5598 - RNA, 20 nt, synthetic construct
  source 1..20: mol_type = other RNA
ggagaaagagatgaaagaaa

SEQ ID NO: 5599 - RNA, 20 nt, synthetic construct
  source 1..20: mol_type = other RNA
ggggatctgtctcccacctt

SEQ ID NO: 5600 - RNA, 20 nt, synthetic construct
  source 1..20: mol_type = other RNA
gtatctgcttctgaaggtgg

SEQ ID NO: 5601 - RNA, 20 nt, synthetic construct
  source 1..20: mol_type = other RNA
caccttcagaagcagatact

SEQ ID NO: 5602 - RNA, 20 nt, synthetic construct
  source 1..20: mol_type = other RNA
ttcagggcaatcttagcaga

SEQ ID NO: 5603 - RNA, 20 nt, synthetic construct
  source 1..20: mol_type = other RNA
cattcagggcaatcttagca

SEQ ID NO: 5604 - RNA, 20 nt, synthetic construct
  source 1..20: mol_type = other RNA
acaggagttaaaactctcat

SEQ ID NO: 5605 - RNA, 20 nt, synthetic construct
  source 1..20: mol_type = other RNA
ttctctacaggagttaaaac

SEQ ID NO: 5606 - RNA, 20 nt, synthetic construct
  source 1..20: mol_type = other RNA
tgtagagaaagagttgaaat

SEQ ID NO: 5607 - RNA, 20 nt, synthetic construct
  source 1..20: mol_type = other RNA
gttttttcacaatttcaact

SEQ ID NO: 5608 - RNA, 20 nt, synthetic construct
  source 1..20: mol_type = other RNA
catgataacagcttgtctct

SEQ ID NO: 5609 - RNA, 20 nt, synthetic construct
  source 1..20: mol_type = other RNA
tgttgcagatcagctactcg

SEQ ID NO: 5610 - RNA, 20 nt, synthetic construct
  source 1..20: mol_type = other RNA
ctttaacagtaaacacctgg

SEQ ID NO: 5611 - RNA, 20 nt, synthetic construct
  source 1..20: mol_type = other RNA
aagttccagggtcccatttt

SEQ ID NO: 5612 - RNA, 20 nt, synthetic construct
  source 1..20: mol_type = other RNA
cacacatccccactccaagt

SEQ ID NO: 5613 - RNA, 20 nt, synthetic construct
  source 1..20: mol_type = other RNA
gcttcatcagggttctccca

SEQ ID NO: 5614 - RNA, 20 nt, synthetic construct
  source 1..20: mol_type = other RNA
gtgtcctcagcttcatcagg

SEQ ID NO: 5615 - RNA, 20 nt, synthetic construct
  source 1..20: mol_type = other RNA
gatgaaacttttttgccaga

SEQ ID NO: 5616 - RNA, 20 nt, synthetic construct
  source 1..20: mol_type = other RNA
ctgacccgtgctgccattag

SEQ ID NO: 5617 - RNA, 20 nt, synthetic construct
  source 1..20: mol_type = other RNA
gacaaaggtggaaaggctaa

SEQ ID NO: 5618 - RNA, 20 nt, synthetic construct
  source 1..20: mol_type = other RNA
agcagtgcagggtttacatc

SEQ ID NO: 5619 - RNA, 20 nt, synthetic construct
  source 1..20: mol_type = other RNA
gggaaggccatcactgttgc

SEQ ID NO: 5620 - RNA, 20 nt, synthetic construct
  source 1..20: mol_type = other RNA
tgaggagaatcaacattatc

SEQ ID NO: 5621 - RNA, 20 nt, synthetic construct
  source 1..20: mol_type = other RNA
tcaagaggcacccctaatgc

SEQ ID NO: 5622 - RNA, 20 nt, synthetic construct
  source 1..20: mol_type = other RNA
agaggcacccctaatgcccc

SEQ ID NO: 5623 - RNA, 20 nt, synthetic construct
  source 1..20: mol_type = other RNA
ggggcccgcaaggaatttag

SEQ ID NO: 5624 - RNA, 20 nt, synthetic construct
  source 1..20: mol_type = other RNA
cctctggggcccgcaaggaa

SEQ ID NO: 5625 - RNA, 20 nt, synthetic construct
  source 1..20: mol_type = other RNA
gaacctcacctctggggccc

SEQ ID NO: 5626 - RNA, 20 nt, synthetic construct
  source 1..20: mol_type = other RNA
tgggtcacactctgaacctc

SEQ ID NO: 5627 - RNA, 20 nt, synthetic construct
  source 1..20: mol_type = other RNA
tcatgggtcacactctgaac

SEQ ID NO: 5628 - RNA, 20 nt, synthetic construct
  source 1..20: mol_type = other RNA
aaaagaactgcttaagcttt

SEQ ID NO: 5629 - RNA, 20 nt, synthetic construct
  source 1..20: mol_type = other RNA
agatttctgccaatataaat

SEQ ID NO: 5630 - RNA, 20 nt, synthetic construct
  source 1..20: mol_type = other RNA
atgtcccttccaccattatc

SEQ ID NO: 5631 - RNA, 20 nt, synthetic construct
  source 1..20: mol_type = other RNA
gggacttagaaaaggttctg

SEQ ID NO: 5632 - RNA, 20 nt, synthetic construct
  source 1..20: mol_type = other RNA
cggccctatcagaacctttt

SEQ ID NO: 5633 - RNA, 20 nt, synthetic construct
  source 1..20: mol_type = other RNA
cgcctgtaatcccagcacct

SEQ ID NO: 5634 - RNA, 20 nt, synthetic construct
  source 1..20: mol_type = other RNA
caaggtgctgggattacagg

SEQ ID NO: 5635 - RNA, 20 nt, synthetic construct
  source 1..20: mol_type = other RNA
tgatctgcccgcccccgcct

SEQ ID NO: 5636 - RNA, 20 nt, synthetic construct
  source 1..20: mol_type = other RNA
tgatctcgtgatctgcccgc

SEQ ID NO: 5637 - RNA, 20 nt, synthetic construct
  source 1..20: mol_type = other RNA
atctcctgatctcgtgatct

SEQ ID NO: 5638 - RNA, 20 nt, synthetic construct
  source 1..20: mol_type = other RNA
gctaaaaatacaaaaattag

SEQ ID NO: 5639 - RNA, 20 nt, synthetic construct
  source 1..20: mol_type = other RNA
caagtagatgagattacagt

SEQ ID NO: 5640 - RNA, 20 nt, synthetic construct
  source 1..20: mol_type = other RNA
gcctcccaagtagatgagat

SEQ ID NO: 5641 - RNA, 20 nt, synthetic construct
  source 1..20: mol_type = other RNA
tctacttgggaggctgaggc

SEQ ID NO: 5642 - RNA, 20 nt, synthetic construct
  source 1..20: mol_type = other RNA
tgcctcagcctcccaagtag

SEQ ID NO: 5643 - RNA, 20 nt, synthetic construct
  source 1..20: mol_type = other RNA
caggttcaagcagttctctt

SEQ ID NO: 5644 - RNA, 20 nt, synthetic construct
  source 1..20: mol_type = other RNA
gcctcacaggttcaagcagt

SEQ ID NO: 5645 - RNA, 20 nt, synthetic construct
  source 1..20: mol_type = other RNA
ctgcaatctctgcctcacag

SEQ ID NO: 5646 - RNA, 20 nt, synthetic construct
  source 1..20: mol_type = other RNA
gttaccaggctggaatgcag

SEQ ID NO: 5647 - RNA, 20 nt, synthetic construct
  source 1..20: mol_type = other RNA
atttccaaaaaaaaaaaaaa

SEQ ID NO: 5648 - RNA, 20 nt, synthetic construct
  source 1..20: mol_type = other RNA
ctaacattggaccatctttt

SEQ ID NO: 5649 - RNA, 20 nt, synthetic construct
  source 1..20: mol_type = other RNA
acattaaaccaaggcatttc

SEQ ID NO: 5650 - RNA, 20 nt, synthetic construct
  source 1..20: mol_type = other RNA
ctaagcctttggatcacttc

SEQ ID NO: 5651 - RNA, 20 nt, synthetic construct
  source 1..20: mol_type = other RNA
accatcctaatctccctaag

SEQ ID NO: 5652 - RNA, 20 nt, synthetic construct
  source 1..20: mol_type = other RNA
cagctgggatgagtaggtct

SEQ ID NO: 5653 - RNA, 20 nt, synthetic construct
  source 1..20: mol_type = other RNA
tcccagctgggagggtccag

SEQ ID NO: 5654 - RNA, 20 nt, synthetic construct
  source 1..20: mol_type = other RNA
caaatctatttcacaaagct

SEQ ID NO: 5655 - RNA, 20 nt, synthetic construct
  source 1..20: mol_type = other RNA
cacaaatctatttcacaaag

SEQ ID NO: 5656 - RNA, 20 nt, synthetic construct
  source 1..20: mol_type = other RNA
tcaaaaatacaggtgctgct

SEQ ID NO: 5657 - RNA, 20 nt, synthetic construct
  source 1..20: mol_type = other RNA
tctctgtatgtcagatctaa

SEQ ID NO: 5658 - RNA, 20 nt, synthetic construct
  source 1..20: mol_type = other RNA
gtatgtcagatctaacagta

SEQ ID NO: 5659 - RNA, 20 nt, synthetic construct
  source 1..20: mol_type = other RNA
actacaaaatttaaatacaa

SEQ ID NO: 5660 - RNA, 20 nt, synthetic construct
  source 1..20: mol_type = other RNA
ggatccaattattcccattg

SEQ ID NO: 5661 - RNA, 20 nt, synthetic construct
  source 1..20: mol_type = other RNA
gctgtctattatggtagtta

SEQ ID NO: 5662 - RNA, 20 nt, synthetic construct
  source 1..20: mol_type = other RNA
acatgagtcagactattctg

SEQ ID NO: 5663 - RNA, 20 nt, synthetic construct
  source 1..20: mol_type = other RNA
tgtagagctctggcattggc

SEQ ID NO: 5664 - RNA, 20 nt, synthetic construct
  source 1..20: mol_type = other RNA
ggcattggctaattaatcat

SEQ ID NO: 5665 - RNA, 20 nt, synthetic construct
  source 1..20: mol_type = other RNA
gtttttataattcagattag

SEQ ID NO: 5666 - RNA, 20 nt, synthetic construct
  source 1..20: mol_type = other RNA
atcaatttccagactcgaac

SEQ ID NO: 5667 - RNA, 20 nt, synthetic construct
  source 1..20: mol_type = other RNA
aacctgttacagttccagaa

SEQ ID NO: 5668 - RNA, 20 nt, synthetic construct
  source 1..20: mol_type = other RNA
ccttcattcagtgggttctg

SEQ ID NO: 5669 - RNA, 20 nt, synthetic construct
  source 1..20: mol_type = other RNA
aggggatccagcctcccctt

SEQ ID NO: 5670 - RNA, 20 nt, synthetic construct
  source 1..20: mol_type = other RNA
ttagggaaggatgggagaaa

SEQ ID NO: 5671 - RNA, 20 nt, synthetic construct
  source 1..20: mol_type = other RNA
ttctcccatccttccctaag

SEQ ID NO: 5672 - RNA, 20 nt, synthetic construct
  source 1..20: mol_type = other RNA
catccttccctaaggagacc

SEQ ID NO: 5673 - RNA, 20 nt, synthetic construct
  source 1..20: mol_type = other RNA
ggccttttaccagggtaact

SEQ ID NO: 5674 - RNA, 20 nt, synthetic construct
  source 1..20: mol_type = other RNA
agtacacacagttaccctgg

SEQ ID NO: 5675 - RNA, 20 nt, synthetic construct
  source 1..20: mol_type = other RNA
ttacttccctttctccagta

SEQ ID NO: 5676 - RNA, 20 nt, synthetic construct
  source 1..20: mol_type = other RNA
gagccagtgtccagtacttt

SEQ ID NO: 5677 - RNA, 20 nt, synthetic construct
  source 1..20: mol_type = other RNA
gagctgacgttgattccagg

SEQ ID NO: 5678 - RNA, 20 nt, synthetic construct
  source 1..20: mol_type = other RNA
ataagcccctactttaactg

SEQ ID NO: 5679 - RNA, 20 nt, synthetic construct
  source 1..20: mol_type = other RNA
attaattacctaacctccat

SEQ ID NO: 5680 - RNA, 20 nt, synthetic construct
  source 1..20: mol_type = other RNA
tttctgacttacagtggttc

SEQ ID NO: 5681 - RNA, 20 nt, synthetic construct
  source 1..20: mol_type = other RNA
ggtcattttcccagtgccaa

SEQ ID NO: 5682 - RNA, 20 nt, synthetic construct
  source 1..20: mol_type = other RNA
tcctaccagtcagggagcca

SEQ ID NO: 5683 - RNA, 20 nt, synthetic construct
  source 1..20: mol_type = other RNA
ctgactggtaggatgagggc

SEQ ID NO: 5684 - RNA, 20 nt, synthetic construct
  source 1..20: mol_type = other RNA
aatggcttctgtttggcctt

SEQ ID NO: 5685 - RNA, 20 nt, synthetic construct
  source 1..20: mol_type = other RNA
acctagaaaaataaaaaaat

SEQ ID NO: 5686 - RNA, 20 nt, synthetic construct
  source 1..20: mol_type = other RNA
agggatgggatattgttttt

SEQ ID NO: 5687 - RNA, 20 nt, synthetic construct
  source 1..20: mol_type = other RNA
gcacaggtcaaatgggagag

SEQ ID NO: 5688 - RNA, 20 nt, synthetic construct
  source 1..20: mol_type = other RNA
cccatttgacctgtgcagag

SEQ ID NO: 5689 - RNA, 20 nt, synthetic construct
  source 1..20: mol_type = other RNA
catttgacctgtgcagagga

SEQ ID NO: 5690 - RNA, 20 nt, synthetic construct
  source 1..20: mol_type = other RNA
aattgcagctgctctaccag

SEQ ID NO: 5691 - RNA, 20 nt, synthetic construct
  source 1..20: mol_type = other RNA
accagttgtggttttgttgc

SEQ ID NO: 5692 - RNA, 20 nt, synthetic construct
  source 1..20: mol_type = other RNA
agcaacaaaaccacaactgg

SEQ ID NO: 5693 - RNA, 20 nt, synthetic construct
  source 1..20: mol_type = other RNA
tggtgcctggtatgcagcca

SEQ ID NO: 5694 - RNA, 20 nt, synthetic construct
  source 1..20: mol_type = other RNA
attcctgtccataagaccca

SEQ ID NO: 5695 - RNA, 20 nt, synthetic construct
  source 1..20: mol_type = other RNA
ggggtgtatcaactctccag

SEQ ID NO: 5696 - RNA, 20 nt, synthetic construct
  source 1..20: mol_type = other RNA
ccagctttgtgtcataatct

SEQ ID NO: 5697 - RNA, 20 nt, synthetic construct
  source 1..20: mol_type = other RNA
agctttgtgtcataatctta

SEQ ID NO: 5698 - RNA, 20 nt, synthetic construct
  source 1..20: mol_type = other RNA
aaataagattatgacacaaa

SEQ ID NO: 5699 - RNA, 20 nt, synthetic construct
  source 1..20: mol_type = other RNA
ccaaataagattatgacaca

SEQ ID NO: 5700 - RNA, 20 nt, synthetic construct
  source 1..20: mol_type = other RNA
tggaagtgaaaagcgagcaa

SEQ ID NO: 5701 - RNA, 20 nt, synthetic construct
  source 1..20: mol_type = other RNA
cttttcacttccacgagata

SEQ ID NO: 5702 - RNA, 20 nt, synthetic construct
  source 1..20: mol_type = other RNA
ctgtatccaatcatcataat

SEQ ID NO: 5703 - RNA, 20 nt, synthetic construct
  source 1..20: mol_type = other RNA
ccaataagttcagtgtgttt

SEQ ID NO: 5704 - RNA, 20 nt, synthetic construct
  source 1..20: mol_type = other RNA
ggcatacaaatgtctcacca

SEQ ID NO: 5705 - RNA, 20 nt, synthetic construct
  source 1..20: mol_type = other RNA
gtaaaatttctagggttcca

SEQ ID NO: 5706 - RNA, 20 nt, synthetic construct
  source 1..20: mol_type = other RNA
tgccactggaaccctagaaa

SEQ ID NO: 5707 - RNA, 20 nt, synthetic construct
  source 1..20: mol_type = other RNA
ataggtctcatgccactgga

SEQ ID NO: 5708 - RNA, 20 nt, synthetic construct
  source 1..20: mol_type = other RNA
ttcttggttgtaagaggggc

SEQ ID NO: 5709 - RNA, 20 nt, synthetic construct
  source 1..20: mol_type = other RNA
tacaaccaagaaagaggcac

SEQ ID NO: 5710 - RNA, 20 nt, synthetic construct
  source 1..20: mol_type = other RNA
aaaatccaaataggcccacc

SEQ ID NO: 5711 - RNA, 20 nt, synthetic construct
  source 1..20: mol_type = other RNA
tttgggtgtgttactctggc

SEQ ID NO: 5712 - RNA, 20 nt, synthetic construct
  source 1..20: mol_type = other RNA
ataaatgggccagagtaaca

SEQ ID NO: 5713 - RNA, 20 nt, synthetic construct
  source 1..20: mol_type = other RNA
ggcccatttatcgagtgacc

SEQ ID NO: 5714 - RNA, 20 nt, synthetic construct
  source 1..20: mol_type = other RNA
gaaacaggtccaggctgctg

SEQ ID NO: 5715 - RNA, 20 nt, synthetic construct
  source 1..20: mol_type = other RNA
gccatttgggccacatgacc

SEQ ID NO: 5716 - RNA, 20 nt, synthetic construct
  source 1..20: mol_type = other RNA
agcaccattggatctgcggg

SEQ ID NO: 5717 - RNA, 20 nt, synthetic construct
  source 1..20: mol_type = other RNA
aaacagcatccctatctgcc

SEQ ID NO: 5718 - RNA, 20 nt, synthetic construct
  source 1..20: mol_type = other RNA
actgtgattcacctatgggg

SEQ ID NO: 5719 - RNA, 20 nt, synthetic construct
  source 1..20: mol_type = other RNA
aaaatcctagaggtctccac

SEQ ID NO: 5720 - RNA, 20 nt, synthetic construct
  source 1..20: mol_type = other RNA
aggattttggagcaaggccc

SEQ ID NO: 5721 - RNA, 20 nt, synthetic construct
  source 1..20: mol_type = other RNA
aaaggagagtagttatctgc

SEQ ID NO: 5722 - RNA, 20 nt, synthetic construct
  source 1..20: mol_type = other RNA
caaaaggagagtagttatct

SEQ ID NO: 5723 - RNA, 20 nt, synthetic construct
  source 1..20: mol_type = other RNA
ccttttgagagacagctatt

SEQ ID NO: 5724 - RNA, 20 nt, synthetic construct
  source 1..20: mol_type = other RNA
ttttgagagacagctattgg

SEQ ID NO: 5725 - RNA, 20 nt, synthetic construct
  source 1..20: mol_type = other RNA
agcccgatcacatacacacc

SEQ ID NO: 5726 - RNA, 20 nt, synthetic construct
  source 1..20: mol_type = other RNA
aatgcccatgttctccactc

SEQ ID NO: 5727 - RNA, 20 nt, synthetic construct
  source 1..20: mol_type = other RNA
actcatgccaccctgccttc

SEQ ID NO: 5728 - RNA, 20 nt, synthetic construct
  source 1..20: mol_type = other RNA
tgccaccctgccttccctcc

SEQ ID NO: 5729 - RNA, 20 nt, synthetic construct
  source 1..20: mol_type = other RNA
cccagcctgcaccaatggcc

SEQ ID NO: 5730 - RNA, 20 nt, synthetic construct
  source 1..20: mol_type = other RNA
ccatgaggccattggtgcag

SEQ ID NO: 5731 - RNA, 20 nt, synthetic construct
  source 1..20: mol_type = other RNA
tggggagttccctatgatca

SEQ ID NO: 5732 - RNA, 20 nt, synthetic construct
  source 1..20: mol_type = other RNA
gtcaactgatcatagggaac

SEQ ID NO: 5733 - RNA, 20 nt, synthetic construct
  source 1..20: mol_type = other RNA
tacaaccagaaacgcaccaa

SEQ ID NO: 5734 - RNA, 20 nt, synthetic construct
  source 1..20: mol_type = other RNA
ttgtcaacttgaacccatac

SEQ ID NO: 5735 - RNA, 20 nt, synthetic construct
  source 1..20: mol_type = other RNA
cagacataaccgagattaat

SEQ ID NO: 5736 - RNA, 20 nt, synthetic construct
  source 1..20: mol_type = other RNA
gttatgtctgtgagggtgtg

SEQ ID NO: 5737 - RNA, 20 nt, synthetic construct
  source 1..20: mol_type = other RNA
ttttgccacaccctcacaga

SEQ ID NO: 5738 - RNA, 20 nt, synthetic construct
  source 1..20: mol_type = other RNA
aatgttaatctccttttgcc

SEQ ID NO: 5739 - RNA, 20 nt, synthetic construct
  source 1..20: mol_type = other RNA
ctgctttacaatctggccac

SEQ ID NO: 5740 - RNA, 20 nt, synthetic construct
  source 1..20: mol_type = other RNA
tgtgccaaatgcttcctgct

SEQ ID NO: 5741 - RNA, 20 nt, synthetic construct
  source 1..20: mol_type = other RNA
tgaacatcggactccaagtt

SEQ ID NO: 5742 - RNA, 20 nt, synthetic construct
  source 1..20: mol_type = other RNA
caacgctgaagaacttggag

SEQ ID NO: 5743 - RNA, 20 nt, synthetic construct
  source 1..20: mol_type = other RNA
aagttcttcagcgttgggag

SEQ ID NO: 5744 - RNA, 20 nt, synthetic construct
  source 1..20: mol_type = other RNA
gcaagctgaggagcaagaaa

SEQ ID NO: 5745 - RNA, 20 nt, synthetic construct
  source 1..20: mol_type = other RNA
tcagcttgcagagggcctgt

SEQ ID NO: 5746 - RNA, 20 nt, synthetic construct
  source 1..20: mol_type = other RNA
gcttgcagagggcctgttgt

SEQ ID NO: 5747 - RNA, 20 nt, synthetic construct
  source 1..20: mol_type = other RNA
gcggatcacaaggttccaca

SEQ ID NO: 5748 - RNA, 20 nt, synthetic construct
  source 1..20: mol_type = other RNA
agagggacagaactaatagg

SEQ ID NO: 5749 - RNA, 20 nt, synthetic construct
  source 1..20: mol_type = other RNA
agagaaccctgactaataca

SEQ ID NO: 5750 - RNA, 20 nt, synthetic construct
  source 1..20: mol_type = other RNA
tttattgatttgtatacatt

SEQ ID NO: 5751 - RNA, 20 nt, synthetic construct
  source 1..20: mol_type = other RNA
tggattcaattgctggtatt

SEQ ID NO: 5752 - RNA, 20 nt, synthetic construct
  source 1..20: mol_type = other RNA
ataaaataccagcaattgaa

SEQ ID NO: 5753 - RNA, 20 nt, synthetic construct
  source 1..20: mol_type = other RNA
ttctatgaggtcgtcatcat

SEQ ID NO: 5754 - RNA, 20 nt, synthetic construct
  source 1..20: mol_type = other RNA
tagaatgagttagtctgtcc

SEQ ID NO: 5755 - RNA, 20 nt, synthetic construct
  source 1..20: mol_type = other RNA
tttatcttttggaattgttt

SEQ ID NO: 5756 - RNA, 20 nt, synthetic construct
  source 1..20: mol_type = other RNA
tgaaacaattccaaaagata

SEQ ID NO: 5757 - RNA, 20 nt, synthetic construct
  source 1..20: mol_type = other RNA
tctttatatgactggtatac

SEQ ID NO: 5758 - RNA, 20 nt, synthetic construct
  source 1..20: mol_type = other RNA
ctggtccaggggtttttctg

SEQ ID NO: 5759 - RNA, 20 nt, synthetic construct
  source 1..20: mol_type = other RNA
ggtccaggggtttttctggt

SEQ ID NO: 5760 - RNA, 20 nt, synthetic construct
  source 1..20: mol_type = other RNA
ataatgagtaatgagttctg

SEQ ID NO: 5761 - RNA, 20 nt, synthetic construct
  source 1..20: mol_type = other RNA
ttactcattattgagttcta

SEQ ID NO: 5762 - RNA, 20 nt, synthetic construct
  source 1..20: mol_type = other RNA
ttattgagttctaaaactca

SEQ ID NO: 5763 - RNA, 20 nt, synthetic construct
  source 1..20: mol_type = other RNA
ctttcatgtactcttcaaaa

SEQ ID NO: 5764 - RNA, 20 nt, synthetic construct
  source 1..20: mol_type = other RNA
tcaaaagactgtcttcttct

SEQ ID NO: 5765 - RNA, 20 nt, synthetic construct
  source 1..20: mol_type = other RNA
acaacagaagaagacagtct

SEQ ID NO: 5766 - RNA, 20 nt, synthetic construct
  source 1..20: mol_type = other RNA
caaggtcgtttaggtgaagg

SEQ ID NO: 5767 - RNA, 20 nt, synthetic construct
  source 1..20: mol_type = other RNA
aggtcgtttaggtgaaggtg

SEQ ID NO: 5768 - RNA, 20 nt, synthetic construct
  source 1..20: mol_type = other RNA
gtagtcaataaaaaaagaga

SEQ ID NO: 5769 - RNA, 20 nt, synthetic construct
  source 1..20: mol_type = other RNA
ttttttattgactactgagg

SEQ ID NO: 5770 - RNA, 20 nt, synthetic construct
  source 1..20: mol_type = other RNA
agattagtctatttctcttt

SEQ ID NO: 5771 - RNA, 20 nt, synthetic construct
  source 1..20: mol_type = other RNA
tttagattgtaactctgttt

SEQ ID NO: 5772 - RNA, 20 nt, synthetic construct
  source 1..20: mol_type = other RNA
gttttatatattttgaagct

SEQ ID NO: 5773 - RNA, 20 nt, synthetic construct
  source 1..20: mol_type = other RNA
gttgttaggcatgtgtattt

SEQ ID NO: 5774 - RNA, 20 nt, synthetic construct
  source 1..20: mol_type = other RNA
ggaagtattcgttgttctga

SEQ ID NO: 5775 - RNA, 20 nt, synthetic construct
  source 1..20: mol_type = other RNA
attttcactagtatttgtat

SEQ ID NO: 5776 - RNA, 20 nt, synthetic construct
  source 1..20: mol_type = other RNA
atttaaaagctgagaaaaag

SEQ ID NO: 5777 - RNA, 20 nt, synthetic construct
  source 1..20: mol_type = other RNA
gcttttaaattgagatgttc

SEQ ID NO: 5778 - RNA, 20 nt, synthetic construct
  source 1..20: mol_type = other RNA
ttgtcccatttaaactttgt

SEQ ID NO: 5779 - RNA, 20 nt, synthetic construct
  source 1..20: mol_type = other RNA
atataaatgaaggcagaaaa

SEQ ID NO: 5780 - RNA, 20 nt, synthetic construct
  source 1..20: mol_type = other RNA
acgacttacttattaaatta

SEQ ID NO: 5781 - RNA, 20 nt, synthetic construct
  source 1..20: mol_type = other RNA
ttcctccctctcaaaatgtt

SEQ ID NO: 5782 - RNA, 20 nt, synthetic construct
  source 1..20: mol_type = other RNA
ctctcaaaatgttgtgctat

SEQ ID NO: 5783 - RNA, 20 nt, synthetic construct
  source 1..20: mol_type = other RNA
caaaatgttgtgctattgct

SEQ ID NO: 5784 - RNA, 20 nt, synthetic construct
  source 1..20: mol_type = other RNA
aaatgttgtgctattgctct

SEQ ID NO: 5785 - RNA, 20 nt, synthetic construct
  source 1..20: mol_type = other RNA
attacaaagagcaatagcac

SEQ ID NO: 5786 - RNA, 20 nt, synthetic construct
  source 1..20: mol_type = other RNA
ttgtaatagaggcttacttc

SEQ ID NO: 5787 - RNA, 20 nt, synthetic construct
  source 1..20: mol_type = other RNA
cataatacattgacactatt

SEQ ID NO: 5788 - RNA, 20 nt, synthetic construct
  source 1..20: mol_type = other RNA
taatacattgacactatttt

SEQ ID NO: 5789 - RNA, 20 nt, synthetic construct
  source 1..20: mol_type = other RNA
ttatcttttacagtagatcc

SEQ ID NO: 5790 - RNA, 20 nt, synthetic construct
  source 1..20: mol_type = other RNA
agatggaaattgggatctac

SEQ ID NO: 5791 - RNA, 20 nt, synthetic construct
  source 1..20: mol_type = other RNA
gcaaaatcacttttaaaaac

SEQ ID NO: 5792 - RNA, 20 nt, synthetic construct
  source 1..20: mol_type = other RNA
acccagtatctatactcagc

SEQ ID NO: 5793 - RNA, 20 nt, synthetic construct
  source 1..20: mol_type = other RNA
caacccagtatctatactca

SEQ ID NO: 5794 - RNA, 20 nt, synthetic construct
  source 1..20: mol_type = other RNA
gactgcctttaagatattct

SEQ ID NO: 5795 - RNA, 20 nt, synthetic construct
  source 1..20: mol_type = other RNA
tctttgtttttcaacagttt

SEQ ID NO: 5796 - RNA, 20 nt, synthetic construct
  source 1..20: mol_type = other RNA
agcagaataaatacaaaaag

SEQ ID NO: 5797 - RNA, 20 nt, synthetic construct
  source 1..20: mol_type = other RNA
ggaaacctcaagcagaataa

SEQ ID NO: 5798 - RNA, 20 nt, synthetic construct
  source 1..20: mol_type = other RNA
ttggatttgcagattgttga

SEQ ID NO: 5799 - RNA, 20 nt, synthetic construct
  source 1..20: mol_type = other RNA
ctctctgtattcttcttttt

SEQ ID NO: 5800 - RNA, 20 nt, synthetic construct
  source 1..20: mol_type = other RNA
ctctgtattcttctttttgg

SEQ ID NO: 5801 - RNA, 20 nt, synthetic construct
  source 1..20: mol_type = other RNA
ctgtattcttctttttggac

SEQ ID NO: 5802 - RNA, 20 nt, synthetic construct
  source 1..20: mol_type = other RNA
gtattcttctttttggactg

SEQ ID NO: 5803 - RNA, 20 nt, synthetic construct
  source 1..20: mol_type = other RNA
ttttttgtatctgtgttggt

SEQ ID NO: 5804 - RNA, 20 nt, synthetic construct
  source 1..20: mol_type = other RNA
gaatgcactgaggagtcaat

SEQ ID NO: 5805 - RNA, 20 nt, synthetic construct
  source 1..20: mol_type = other RNA
tcagtgcattcagagaattc

SEQ ID NO: 5806 - RNA, 20 nt, synthetic construct
  source 1..20: mol_type = other RNA
gtgcattcagagaattcttc

SEQ ID NO: 5807 - RNA, 20 nt, synthetic construct
  source 1..20: mol_type = other RNA
gatattataaatctcttcct

SEQ ID NO: 5808 - RNA, 20 nt, synthetic construct
  source 1..20: mol_type = other RNA
tcctagcattttcatgttac

SEQ ID NO: 5809 - RNA, 20 nt, synthetic construct
  source 1..20: mol_type = other RNA
tttctatagtttccatctct

SEQ ID NO: 5810 - RNA, 20 nt, synthetic construct
  source 1..20: mol_type = other RNA
ttgctgaaattctcccccta

SEQ ID NO: 5811 - RNA, 20 nt, synthetic construct
  source 1..20: mol_type = other RNA
ccctatccatggatattgtc

SEQ ID NO: 5812 - RNA, 20 nt, synthetic construct
  source 1..20: mol_type = other RNA
gaaaagacaccatctggaaa

SEQ ID NO: 5813 - RNA, 20 nt, synthetic construct
  source 1..20: mol_type = other RNA
tcagcttttggtgtgtcttg

SEQ ID NO: 5814 - RNA, 20 nt, synthetic construct
  source 1..20: mol_type = other RNA
atttatgatacccagtgttt

SEQ ID NO: 5815 - RNA, 20 nt, synthetic construct
  source 1..20: mol_type = other RNA
actgttcctccatttatgat

SEQ ID NO: 5816 - RNA, 20 nt, synthetic construct
  source 1..20: mol_type = other RNA
attgaccacaaaacatattt

SEQ ID NO: 5817 - RNA, 20 nt, synthetic construct
  source 1..20: mol_type = other RNA
agtgatgggttgctgctatc

SEQ ID NO: 5818 - RNA, 20 nt, synthetic construct
  source 1..20: mol_type = other RNA
aagcaaaagatagcagcaac

SEQ ID NO: 5819 - RNA, 20 nt, synthetic construct
  source 1..20: mol_type = other RNA
gtgttcctatctattattag

SEQ ID NO: 5820 - RNA, 20 nt, synthetic construct
  source 1..20: mol_type = other RNA
gtagtgcaggcatgcagtga

SEQ ID NO: 5821 - RNA, 20 nt, synthetic construct
  source 1..20: mol_type = other RNA
atctttggtggaaataaaca

SEQ ID NO: 5822 - RNA, 20 nt, synthetic construct
  source 1..20: mol_type = other RNA
aggagatacagcatttgttt

SEQ ID NO: 5823 - RNA, 20 nt, synthetic construct
  source 1..20: mol_type = other RNA
tggagccacttcagtcttag

SEQ ID NO: 5824 - RNA, 20 nt, synthetic construct
  source 1..20: mol_type = other RNA
gtattcttgtgccttatttg

SEQ ID NO: 5825 - RNA, 20 nt, synthetic construct
  source 1..20: mol_type = other RNA
aaacccaccacaggttcaag

SEQ ID NO: 5826 - RNA, 20 nt, synthetic construct
  source 1..20: mol_type = other RNA
ccaaacccaccacaggttca

SEQ ID NO: 5827 - RNA, 20 nt, synthetic construct
  source 1..20: mol_type = other RNA
ttctctccaaacccaccaca

SEQ ID NO: 5828 - RNA, 20 nt, synthetic construct
  source 1..20: mol_type = other RNA
cctccaaggaaataagattt

SEQ ID NO: 5829 - RNA, 20 nt, synthetic construct
  source 1..20: mol_type = other RNA
tccaaggaaataagatttga

SEQ ID NO: 5830 - RNA, 20 nt, synthetic construct
  source 1..20: mol_type = other RNA
aaggaaataagatttgatca

SEQ ID NO: 5831 - RNA, 20 nt, synthetic construct
  source 1..20: mol_type = other RNA
gggataggtagatgatcaaa

SEQ ID NO: 5832 - RNA, 20 nt, synthetic construct
  source 1..20: mol_type = other RNA
ccccattgcccagaaactta

SEQ ID NO: 5833 - RNA, 20 nt, synthetic construct
  source 1..20: mol_type = other RNA
gaaaagccaaagccttaagt

SEQ ID NO: 5834 - RNA, 20 nt, synthetic construct
  source 1..20: mol_type = other RNA
ctctgatctctcctgtcctg

SEQ ID NO: 5835 - RNA, 20 nt, synthetic construct
  source 1..20: mol_type = other RNA
gatctctcctgtcctgtggt

SEQ ID NO: 5836 - RNA, 20 nt, synthetic construct
  source 1..20: mol_type = other RNA
cctgtcctgtggtcctcatg

SEQ ID NO: 5837 - RNA, 20 nt, synthetic construct
  source 1..20: mol_type = other RNA
tgtcctgtggtcctcatgaa

SEQ ID NO: 5838 - RNA, 20 nt, synthetic construct
  source 1..20: mol_type = other RNA
tcttaatgttcatgaggacc

SEQ ID NO: 5839 - RNA, 20 nt, synthetic construct
  source 1..20: mol_type = other RNA
tgaacattaagaagagattt

SEQ ID NO: 5840 - RNA, 20 nt, synthetic construct
  source 1..20: mol_type = other RNA
tttttagaaatctcttctta

SEQ ID NO: 5841 - RNA, 20 nt, synthetic construct
  source 1..20: mol_type = other RNA
tgtgcaagctcttttttaga

SEQ ID NO: 5842 - RNA, 20 nt, synthetic construct
  source 1..20: mol_type = other RNA
ccagaaactatgctcatgtg

SEQ ID NO: 5843 - RNA, 20 nt, synthetic construct
  source 1..20: mol_type = other RNA
aaacttttaaataaaatatt

SEQ ID NO: 5844 - RNA, 20 nt, synthetic construct
  source 1..20: mol_type = other RNA
tgattagcaggcagacagac

SEQ ID NO: 5845 - RNA, 20 nt, synthetic construct
  source 1..20: mol_type = other RNA
tctcttgattagcaggcaga

SEQ ID NO: 5846 - RNA, 20 nt, synthetic construct
  source 1..20: mol_type = other RNA
gagaattacgaccattctct

SEQ ID NO: 5847 - RNA, 20 nt, synthetic construct
  source 1..20: mol_type = other RNA
gagactttttcctgtttgtg

SEQ ID NO: 5848 - RNA, 20 nt, synthetic construct
  source 1..20: mol_type = other RNA
ggtgctgctaaaattaaaac

SEQ ID NO: 5849 - RNA, 20 nt, synthetic construct
  source 1..20: mol_type = other RNA
gtccatcaccatggtagcaa

SEQ ID NO: 5850 - RNA, 20 nt, synthetic construct
  source 1..20: mol_type = other RNA
ataactctgtccatcaccat

SEQ ID NO: 5851 - RNA, 20 nt, synthetic construct
  source 1..20: mol_type = other RNA
accactgtcacaggaaggac

SEQ ID NO: 5852 - RNA, 20 nt, synthetic construct
  source 1..20: mol_type = other RNA
cacatagaatgcatggcaaa

SEQ ID NO: 5853 - RNA, 20 nt, synthetic construct
  source 1..20: mol_type = other RNA
gacattttgccatgcattct

SEQ ID NO: 5854 - RNA, 20 nt, synthetic construct
  source 1..20: mol_type = other RNA
aagtaatgtttctcagacat

SEQ ID NO: 5855 - RNA, 20 nt, synthetic construct
  source 1..20: mol_type = other RNA
ttgctcaaagtaatgtttct

SEQ ID NO: 5856 - RNA, 20 nt, synthetic construct
  source 1..20: mol_type = other RNA
tctatcatactctttgctca

SEQ ID NO: 5857 - RNA, 20 nt, synthetic construct
  source 1..20: mol_type = other RNA
ggaaagagagccagcttaac

SEQ ID NO: 5858 - RNA, 20 nt, synthetic construct
  source 1..20: mol_type = other RNA
caggaaagagagccagctta

SEQ ID NO: 5859 - RNA, 20 nt, synthetic construct
  source 1..20: mol_type = other RNA
ctttcctgagagtttgataa

SEQ ID NO: 5860 - RNA, 20 nt, synthetic construct
  source 1..20: mol_type = other RNA
ttcctgagagtttgataaaa

SEQ ID NO: 5861 - RNA, 20 nt, synthetic construct
  source 1..20: mol_type = other RNA
tgattttatcaaactctcag

SEQ ID NO: 5862 - RNA, 20 nt, synthetic construct
  source 1..20: mol_type = other RNA
ccaccgccagatattctcct

SEQ ID NO: 5863 - RNA, 20 nt, synthetic construct
  source 1..20: mol_type = other RNA
gtctaaacattctgattttc

SEQ ID NO: 5864 - RNA, 20 nt, synthetic construct
  source 1..20: mol_type = other RNA
ctaaaggtcaatgtgatctt

SEQ ID NO: 5865 - RNA, 20 nt, synthetic construct
  source 1..20: mol_type = other RNA
aattcctgaagtgaaggttg

SEQ ID NO: 5866 - RNA, 20 nt, synthetic construct
  source 1..20: mol_type = other RNA
caagtaaatgatatgtgcat

SEQ ID NO: 5867 - RNA, 20 nt, synthetic construct
  source 1..20: mol_type = other RNA
ggacccagggtgtttctacc

SEQ ID NO: 5868 - RNA, 20 nt, synthetic construct
  source 1..20: mol_type = other RNA
tcctggcaacccgtattcct

SEQ ID NO: 5869 - RNA, 20 nt, synthetic construct
  source 1..20: mol_type = other RNA
cttcctggcaacccgtattc

SEQ ID NO: 5870 - RNA, 20 nt, synthetic construct
  source 1..20: mol_type = other RNA
tttcttactttcatctgcct

SEQ ID NO: 5871 - RNA, 20 nt, synthetic construct
  source 1..20: mol_type = other RNA
accatctattgtccaacaag

SEQ ID NO: 5872 - RNA, 20 nt, synthetic construct
  source 1..20: mol_type = other RNA
caattcccttggtcctctac

SEQ ID NO: 5873 - RNA, 20 nt, synthetic construct
  source 1..20: mol_type = other RNA
cgcaattcccttggtcctct

SEQ ID NO: 5874 - RNA, 20 nt, synthetic construct
  source 1..20: mol_type = other RNA
ctcgcaattcccttggtcct

SEQ ID NO: 5875 - RNA, 20 nt, synthetic construct
  source 1..20: mol_type = other RNA
ctctcgcaattcccttggtc

SEQ ID NO: 5876 - RNA, 20 nt, synthetic construct
  source 1..20: mol_type = other RNA
ttgttctctctctcgcaatt

SEQ ID NO: 5877 - RNA, 20 nt, synthetic construct
  source 1..20: mol_type = other RNA
acagatgcactggttttctt

SEQ ID NO: 5878 - RNA, 20 nt, synthetic construct
  source 1..20: mol_type = other RNA
aggaagaaaaccagtgcatc

SEQ ID NO: 5879 - RNA, 20 nt, synthetic construct
  source 1..20: mol_type = other RNA
tgcccttcagtgcaggaagg

SEQ ID NO: 5880 - RNA, 20 nt, synthetic construct
  source 1..20: mol_type = other RNA
atctcctgcccttcagtgca

SEQ ID NO: 5881 - RNA, 20 nt, synthetic construct
  source 1..20: mol_type = other RNA
gttcagcaagatggctacag

SEQ ID NO: 5882 - RNA, 20 nt, synthetic construct
  source 1..20: mol_type = other RNA
tctgttcagcaagatggcta

SEQ ID NO: 5883 - RNA, 20 nt, synthetic construct
  source 1..20: mol_type = other RNA
aatgtccctcctctgttcag

SEQ ID NO: 5884 - RNA, 20 nt, synthetic construct
  source 1..20: mol_type = other RNA
ttgttagcaggcctagaaaa

SEQ ID NO: 5885 - RNA, 20 nt, synthetic construct
  source 1..20: mol_type = other RNA
acaaatctgttctcattgtt

SEQ ID NO: 5886 - RNA, 20 nt, synthetic construct
  source 1..20: mol_type = other RNA
tttcctccacaaatctgttc

SEQ ID NO: 5887 - RNA, 20 nt, synthetic construct
  source 1..20: mol_type = other RNA
aggagatttctatgcatatt

SEQ ID NO: 5888 - RNA, 20 nt, synthetic construct
  source 1..20: mol_type = other RNA
tcgagtcattggctaaacat

SEQ ID NO: 5889 - RNA, 20 nt, synthetic construct
  source 1..20: mol_type = other RNA
agtcattggctaaacatgaa

SEQ ID NO: 5890 - RNA, 20 nt, synthetic construct
  source 1..20: mol_type = other RNA
tccgtagatgttctttgccc

SEQ ID NO: 5891 - RNA, 20 nt, synthetic construct
  source 1..20: mol_type = other RNA
ctgttccattgtagttgctg

SEQ ID NO: 5892 - RNA, 20 nt, synthetic construct
  source 1..20: mol_type = other RNA
gtcatgtttattgagctcac

SEQ ID NO: 5893 - RNA, 20 nt, synthetic construct
  source 1..20: mol_type = other RNA
ataaacatgacagagctcaa

SEQ ID NO: 5894 - RNA, 20 nt, synthetic construct
  source 1..20: mol_type = other RNA
aatatcccttagtgctattt

SEQ ID NO: 5895 - RNA, 20 nt, synthetic construct
  source 1..20: mol_type = other RNA
aatagcactaagggatattg

SEQ ID NO: 5896 - RNA, 20 nt, synthetic construct
  source 1..20: mol_type = other RNA
gtgtggtccaaactccaata

SEQ ID NO: 5897 - RNA, 20 nt, synthetic construct
  source 1..20: mol_type = other RNA
tctgtgtggtccaaactcca

SEQ ID NO: 5898 - RNA, 20 nt, synthetic construct
  source 1..20: mol_type = other RNA
cctctgtgtggtccaaactc

SEQ ID NO: 5899 - RNA, 20 nt, synthetic construct
  source 1..20: mol_type = other RNA
ctcctctgtgtggtccaaac

SEQ ID NO: 5900 - RNA, 20 nt, synthetic construct
  source 1..20: mol_type = other RNA
actgaatgcccaagatgttc

SEQ ID NO: 5901 - RNA, 20 nt, synthetic construct
  source 1..20: mol_type = other RNA
taaagtatggcttttcctgg

SEQ ID NO: 5902 - RNA, 20 nt, synthetic construct
  source 1..20: mol_type = other RNA
acacaaacaatagcaaaact

SEQ ID NO: 5903 - RNA, 20 nt, synthetic construct
  source 1..20: mol_type = other RNA
aagcatcagaatgatgtcca

SEQ ID NO: 5904 - RNA, 20 nt, synthetic construct
  source 1..20: mol_type = other RNA
gaggcagttcattgacttgg

SEQ ID NO: 5905 - RNA, 20 nt, synthetic construct
  source 1..20: mol_type = other RNA
cagaggcagttcattgactt

SEQ ID NO: 5906 - RNA, 20 nt, synthetic construct
  source 1..20: mol_type = other RNA
gagaggaaaactcaaccatc

SEQ ID NO: 5907 - RNA, 20 nt, synthetic construct
  source 1..20: mol_type = other RNA
aaagatggttgagttttcct

SEQ ID NO: 5908 - RNA, 20 nt, synthetic construct
  source 1..20: mol_type = other RNA
accatctttagaggtaaaca

SEQ ID NO: 5909 - RNA, 20 nt, synthetic construct
  source 1..20: mol_type = other RNA
cactgtggatactgcatagc

SEQ ID NO: 5910 - RNA, 20 nt, synthetic construct
  source 1..20: mol_type = other RNA
gctatgcagtatccacagtg

SEQ ID NO: 5911 - RNA, 20 nt, synthetic construct
  source 1..20: mol_type = other RNA
tgcttgtgggtcacactaaa

SEQ ID NO: 5912 - RNA, 20 nt, synthetic construct
  source 1..20: mol_type = other RNA
tctgggtctgtttgtattgg

SEQ ID NO: 5913 - RNA, 20 nt, synthetic construct
  source 1..20: mol_type = other RNA
attattatatagtgatatgt

SEQ ID NO: 5914 - RNA, 20 nt, synthetic construct
  source 1..20: mol_type = other RNA
ggataaggtgtctgttgcat

SEQ ID NO: 5915 - RNA, 20 nt, synthetic construct
  source 1..20: mol_type = other RNA
tactgtctctggataaggtg

SEQ ID NO: 5916 - RNA, 20 nt, synthetic construct
  source 1..20: mol_type = other RNA
ttatactcttactgtctctg

SEQ ID NO: 5917 - RNA, 20 nt, synthetic construct
  source 1..20: mol_type = other RNA
tagtagttcttcgatttggc

SEQ ID NO: 5918 - RNA, 20 nt, synthetic construct
  source 1..20: mol_type = other RNA
ccatctagttagacatttca

SEQ ID NO: 5919 - RNA, 20 nt, synthetic construct
  source 1..20: mol_type = other RNA
aacatgtataagcttacaaa

SEQ ID NO: 5920 - RNA, 20 nt, synthetic construct
  source 1..20: mol_type = other RNA
gttgatttcatttttcagca

SEQ ID NO: 5921 - RNA, 20 nt, synthetic construct
  source 1..20: mol_type = other RNA
ttccccctttctgtgacttg

SEQ ID NO: 5922 - RNA, 20 nt, synthetic construct
  source 1..20: mol_type = other RNA
agaagctcaatggatcagaa

SEQ ID NO: 5923 - RNA, 20 nt, synthetic construct
  source 1..20: mol_type = other RNA
atggatcagaaaaataattt

SEQ ID NO: 5924 - RNA, 20 nt, synthetic construct
  source 1..20: mol_type = other RNA
gacagttgaactgctatgta

SEQ ID NO: 5925 - RNA, 20 nt, synthetic construct
  source 1..20: mol_type = other RNA
taaggaacgggaaaaacaaa

SEQ ID NO: 5926 - RNA, 20 nt, synthetic construct
  source 1..20: mol_type = other RNA
agcaagacacagctttttgt

SEQ ID NO: 5927 - RNA, 20 nt, synthetic construct
  source 1..20: mol_type = other RNA
tctttcttacgtttattact

SEQ ID NO: 5928 - RNA, 20 nt, synthetic construct
  source 1..20: mol_type = other RNA
gttgagctcttctttcttac

SEQ ID NO: 5929 - RNA, 20 nt, synthetic construct
  source 1..20: mol_type = other RNA
actgagaaggctacatccag

SEQ ID NO: 5930 - RNA, 20 nt, synthetic construct
  source 1..20: mol_type = other RNA
aacatggatgaacttcaagg

SEQ ID NO: 5931 - RNA, 20 nt, synthetic construct
  source 1..20: mol_type = other RNA
cctaaacaaagaaaccggaa

SEQ ID NO: 5932 - RNA, 20 nt, synthetic construct
  source 1..20: mol_type = other RNA
tttgttacataagcctgctg

SEQ ID NO: 5933 - RNA, 20 nt, synthetic construct
  source 1..20: mol_type = other RNA
ttaattccttagggtcacct

SEQ ID NO: 5934 - RNA, 20 nt, synthetic construct
  source 1..20: mol_type = other RNA
tttaaaaagatataaacgtt

SEQ ID NO: 5935 - RNA, 20 nt, synthetic construct
  source 1..20: mol_type = other RNA
catttaaaaagatataaacg

SEQ ID NO: 5936 - RNA, 20 nt, synthetic construct
  source 1..20: mol_type = other RNA
tcaactctcatttaaaaaga

SEQ ID NO: 5937 - RNA, 20 nt, synthetic construct
  source 1..20: mol_type = other RNA
tgcacgatagtatgtaatac

SEQ ID NO: 5938 - RNA, 20 nt, synthetic construct
  source 1..20: mol_type = other RNA
aggatttgcaatatcccttt

SEQ ID NO: 5939 - RNA, 20 nt, synthetic construct
  source 1..20: mol_type = other RNA
gagttaaaaactttgtgatt

SEQ ID NO: 5940 - RNA, 20 nt, synthetic construct
  source 1..20: mol_type = other RNA
gaggtttgttgtataataac

SEQ ID NO: 5941 - RNA, 20 nt, synthetic construct
  source 1..20: mol_type = other RNA
tttgaatacataaaatattg

SEQ ID NO: 5942 - RNA, 20 nt, synthetic construct
  source 1..20: mol_type = other RNA
ttaaagacttttttttcttc

SEQ ID NO: 5943 - RNA, 20 nt, synthetic construct
  source 1..20: mol_type = other RNA
ggctcttagtacatccagtt

SEQ ID NO: 5944 - RNA, 20 nt, synthetic construct
  source 1..20: mol_type = other RNA
tagtacatccagttgctcat

SEQ ID NO: 5945 - RNA, 20 nt, synthetic construct
  source 1..20: mol_type = other RNA
ttcaatgagcaactggatgt

SEQ ID NO: 5946 - RNA, 20 nt, synthetic construct
  source 1..20: mol_type = other RNA
attccaggaagctcattcaa

SEQ ID NO: 5947 - RNA, 20 nt, synthetic construct
  source 1..20: mol_type = other RNA
ttgaatgagcttcctggaat

SEQ ID NO: 5948 - RNA, 20 nt, synthetic construct
  source 1..20: mol_type = other RNA
gtcccagaccctccattcca

SEQ ID NO: 5949 - RNA, 20 nt, synthetic construct
  source 1..20: mol_type = other RNA
acacatgtggcctagtctca

SEQ ID NO: 5950 - RNA, 20 nt, synthetic construct
  source 1..20: mol_type = other RNA
agtggctctacacatgtggc

SEQ ID NO: 5951 - RNA, 20 nt, synthetic construct
  source 1..20: mol_type = other RNA
ggcagccacaggtcatgaat

SEQ ID NO: 5952 - RNA, 20 nt, synthetic construct
  source 1..20: mol_type = other RNA
cattcatgacctgtggctgc

SEQ ID NO: 5953 - RNA, 20 nt, synthetic construct
  source 1..20: mol_type = other RNA
gtatcctcacattcatgacc

SEQ ID NO: 5954 - RNA, 20 nt, synthetic construct
  source 1..20: mol_type = other RNA
cagtatcctcacattcatga

SEQ ID NO: 5955 - RNA, 20 nt, synthetic construct
  source 1..20: mol_type = other RNA
aacctctcagtatcctcaca

SEQ ID NO: 5956 - RNA, 20 nt, synthetic construct
  source 1..20: mol_type = other RNA
caagaacgttgctccaacct

SEQ ID NO: 5957 - RNA, 20 nt, synthetic construct
  source 1..20: mol_type = other RNA
tccttatgcctcccaagaac

SEQ ID NO: 5958 - RNA, 20 nt, synthetic construct
  source 1..20: mol_type = other RNA
tcagctgctttgcctcctaa

SEQ ID NO: 5959 - RNA, 20 nt, synthetic construct
  source 1..20: mol_type = other RNA
gctgctttgcctcctaattc

SEQ ID NO: 5960 - RNA, 20 nt, synthetic construct
  source 1..20: mol_type = other RNA
taattcattgttttttgctc

SEQ ID NO: 5961 - RNA, 20 nt, synthetic construct
  source 1..20: mol_type = other RNA
tccatagctgtccgacctct

SEQ ID NO: 5962 - RNA, 20 nt, synthetic construct
  source 1..20: mol_type = other RNA
atagctgtccgacctcttca

SEQ ID NO: 5963 - RNA, 20 nt, synthetic construct
  source 1..20: mol_type = other RNA
tcagatctcttagtcttcct

SEQ ID NO: 5964 - RNA, 20 nt, synthetic construct
  source 1..20: mol_type = other RNA
tagtcttcctgccatcttcc

SEQ ID NO: 5965 - RNA, 20 nt, synthetic construct
  source 1..20: mol_type = other RNA
agaactgggggatgagttga

SEQ ID NO: 5966 - RNA, 20 nt, synthetic construct
  source 1..20: mol_type = other RNA
tcccccagttctggagtggc

SEQ ID NO: 5967 - RNA, 20 nt, synthetic construct
  source 1..20: mol_type = other RNA
gctgtccacagccactccag

SEQ ID NO: 5968 - RNA, 20 nt, synthetic construct
  source 1..20: mol_type = other RNA
gtctatcctctgctgtccac

SEQ ID NO: 5969 - RNA, 20 nt, synthetic construct
  source 1..20: mol_type = other RNA
cagtctatcctctgctgtcc

SEQ ID NO: 5970 - RNA, 20 nt, synthetic construct
  source 1..20: mol_type = other RNA
tgctctcagtctatcctctg

SEQ ID NO: 5971 - RNA, 20 nt, synthetic construct
  source 1..20: mol_type = other RNA
cctgctctcagtctatcctc

SEQ ID NO: 5972 - RNA, 20 nt, synthetic construct
  source 1..20: mol_type = other RNA
agaatgggttcctgggcagg

SEQ ID NO: 5973 - RNA, 20 nt, synthetic construct
  source 1..20: mol_type = other RNA
caggcagaatgcagtatctc

SEQ ID NO: 5974 - RNA, 20 nt, synthetic construct
  source 1..20: mol_type = other RNA
aagctgccctggaaaacttg

SEQ ID NO: 5975 - RNA, 20 nt, synthetic construct
  source 1..20: mol_type = other RNA
acctttcccatggaaaagca

SEQ ID NO: 5976 - RNA, 20 nt, synthetic construct
  source 1..20: mol_type = other RNA
aaacctagtgaaaaggctct

SEQ ID NO: 5977 - RNA, 20 nt, synthetic construct
  source 1..20: mol_type = other RNA
atgtactcaaaacctagtga

SEQ ID NO: 5978 - RNA, 20 nt, synthetic construct
  source 1..20: mol_type = other RNA
cactccatgtactcaaaacc

SEQ ID NO: 5979 - RNA, 20 nt, synthetic construct
  source 1..20: mol_type = other RNA
cacactccatgtactcaaaa

SEQ ID NO: 5980 - RNA, 20 nt, synthetic construct
  source 1..20: mol_type = other RNA
ttgatgccatgttttctctg

SEQ ID NO: 5981 - RNA, 20 nt, synthetic construct
  source 1..20: mol_type = other RNA
gaagaactacatgttcgttg

SEQ ID NO: 5982 - RNA, 20 nt, synthetic construct
  source 1..20: mol_type = other RNA
cacattagaatatgaagtcc

SEQ ID NO: 5983 - RNA, 20 nt, synthetic construct
  source 1..20: mol_type = other RNA
gtaggacttcatattctaat

SEQ ID NO: 5984 - RNA, 20 nt, synthetic construct
  source 1..20: mol_type = other RNA
cggtaggacttcatattcta

SEQ ID NO: 5985 - RNA, 20 nt, synthetic construct
  source 1..20: mol_type = other RNA
ctcggtaggacttcatattc

SEQ ID NO: 5986 - RNA, 20 nt, synthetic construct
  source 1..20: mol_type = other RNA
gtatctctctcggtaggact

SEQ ID NO: 5987 - RNA, 20 nt, synthetic construct
  source 1..20: mol_type = other RNA
ggaataactggtatgggttt

SEQ ID NO: 5988 - RNA, 20 nt, synthetic construct
  source 1..20: mol_type = other RNA
ctggaataactggtatgggt

SEQ ID NO: 5989 - RNA, 20 nt, synthetic construct
  source 1..20: mol_type = other RNA
ttctgccttctgcccaatcc

SEQ ID NO: 5990 - RNA, 20 nt, synthetic construct
  source 1..20: mol_type = other RNA
gatcgtttttcggccacgtg

SEQ ID NO: 5991 - RNA, 20 nt, synthetic construct
  source 1..20: mol_type = other RNA
gtgtttctaagaagcgtttg

SEQ ID NO: 5992 - RNA, 20 nt, synthetic construct
  source 1..20: mol_type = other RNA
tacttaatagattattacta

SEQ ID NO: 5993 - RNA, 20 nt, synthetic construct
  source 1..20: mol_type = other RNA
catacttaatagattattac

SEQ ID NO: 5994 - RNA, 20 nt, synthetic construct
  source 1..20: mol_type = other RNA
gcacatctctcatacttaat

SEQ ID NO: 5995 - RNA, 20 nt, synthetic construct
  source 1..20: mol_type = other RNA
ctgcacatctctcatactta

SEQ ID NO: 5996 - RNA, 20 nt, synthetic construct
  source 1..20: mol_type = other RNA
atcactaatcctctctgcac

SEQ ID NO: 5997 - RNA, 20 nt, synthetic construct
  source 1..20: mol_type = other RNA
cgatcactaatcctctctgc

SEQ ID NO: 5998 - RNA, 20 nt, synthetic construct
  source 1..20: mol_type = other RNA
tttgtgctgcaacaaggtca

SEQ ID NO: 5999 - RNA, 20 nt, synthetic construct
  source 1..20: mol_type = other RNA
cctttgtgctgcaacaaggt

SEQ ID NO: 6000 - RNA, 20 nt, synthetic construct
  source 1..20: mol_type = other RNA
ctcctttgtgctgcaacaag

SEQ ID NO: 6001 - RNA, 20 nt, synthetic construct
  source 1..20: mol_type = other RNA
tgtgacgtgtatcgttttgg

SEQ ID NO: 6002 - RNA, 20 nt, synthetic construct
  source 1..20: mol_type = other RNA
tataacaataaggagctgcc

SEQ ID NO: 6003 - RNA, 20 nt, synthetic construct
  source 1..20: mol_type = other RNA
ttattgttatacgagggatc

SEQ ID NO: 6004 - RNA, 20 nt, synthetic construct
  source 1..20: mol_type = other RNA
cacctgacaccgggatccct

SEQ ID NO: 6005 - RNA, 20 nt, synthetic construct
  source 1..20: mol_type = other RNA
gacgcagaagggactgccgt

SEQ ID NO: 6006 - RNA, 20 nt, synthetic construct
  source 1..20: mol_type = other RNA
gactgttaccccggttccaa

SEQ ID NO: 6007 - RNA, 20 nt, synthetic construct
  source 1..20: mol_type = other RNA
aggcttggaaccggggtaac

SEQ ID NO: 6008 - RNA, 20 nt, synthetic construct
  source 1..20: mol_type = other RNA
ttaccttgttcggaaggagc

SEQ ID NO: 6009 - RNA, 20 nt, synthetic construct
  source 1..20: mol_type = other RNA
ttccgaacaaggtaaggagt

SEQ ID NO: 6010 - RNA, 20 nt, synthetic construct
  source 1..20: mol_type = other RNA
agcatccgtttaccattgaa

SEQ ID NO: 6011 - RNA, 20 nt, synthetic construct
  source 1..20: mol_type = other RNA
ggcaacactcgagcatccgt

SEQ ID NO: 6012 - RNA, 20 nt, synthetic construct
  source 1..20: mol_type = other RNA
agtgttgcctgagttctacc

SEQ ID NO: 6013 - RNA, 20 nt, synthetic construct
  source 1..20: mol_type = other RNA
tacatggtagaactcaggca

SEQ ID NO: 6014 - RNA, 20 nt, synthetic construct
  source 1..20: mol_type = other RNA
cccagagagtgcacggaggc

SEQ ID NO: 6015 - RNA, 20 nt, synthetic construct
  source 1..20: mol_type = other RNA
gtgcactctctgggggagcc

SEQ ID NO: 6016 - RNA, 20 nt, synthetic construct
  source 1..20: mol_type = other RNA
gctggctcccccagagagtg

SEQ ID NO: 6017 - RNA, 20 nt, synthetic construct
  source 1..20: mol_type = other RNA
ctgggggagccagcggagtg

SEQ ID NO: 6018 - RNA, 20 nt, synthetic construct
  source 1..20: mol_type = other RNA
gggggagccagcggagtgat

SEQ ID NO: 6019 - RNA, 20 nt, synthetic construct
  source 1..20: mol_type = other RNA
agggggatcgacttcaaaat

SEQ ID NO: 6020 - RNA, 20 nt, synthetic construct
  source 1..20: mol_type = other RNA
gtgtcccagccaaaattttt

SEQ ID NO: 6021 - RNA, 20 nt, synthetic construct
  source 1..20: mol_type = other RNA
ttccaagccagtaagctttt

SEQ ID NO: 6022 - RNA, 20 nt, synthetic construct
  source 1..20: mol_type = other RNA
gaatgctggctacttgaaga

SEQ ID NO: 6023 - RNA, 20 nt, synthetic construct
  source 1..20: mol_type = other RNA
gaatctgcaatgctgaagat

SEQ ID NO: 6024 - RNA, 20 nt, synthetic construct
  source 1..20: mol_type = other RNA
agagccacatttctcagaat

SEQ ID NO: 6025 - RNA, 20 nt, synthetic construct
  source 1..20: mol_type = other RNA
agggtgacaggctccagagc

SEQ ID NO: 6026 - RNA, 20 nt, synthetic construct
  source 1..20: mol_type = other RNA
ggagcctgtcaccctcgaga

SEQ ID NO: 6027 - RNA, 20 nt, synthetic construct
  source 1..20: mol_type = other RNA
taggtttctcgagggtgaca

SEQ ID NO: 6028 - RNA, 20 nt, synthetic construct
  source 1..20: mol_type = other RNA
agaaacctaagagggctgca

SEQ ID NO: 6029 - RNA, 20 nt, synthetic construct
  source 1..20: mol_type = other RNA
atagacccagggccacatgg

SEQ ID NO: 6030 - RNA, 20 nt, synthetic construct
  source 1..20: mol_type = other RNA
tgtactgctccatagaccca

SEQ ID NO: 6031 - RNA, 20 nt, synthetic construct
  source 1..20: mol_type = other RNA
cagtgctctaaggctcttca

SEQ ID NO: 6032 - RNA, 20 nt, synthetic construct
  source 1..20: mol_type = other RNA
aaggctcttcagccctaggc

SEQ ID NO: 6033 - RNA, 20 nt, synthetic construct
  source 1..20: mol_type = other RNA
cttcaaagcctagggctgaa

SEQ ID NO: 6034 - RNA, 20 nt, synthetic construct
  source 1..20: mol_type = other RNA
tcagccctaggctttgaagg

SEQ ID NO: 6035 - RNA, 20 nt, synthetic construct
  source 1..20: mol_type = other RNA
gtattcttaaacctctttct

SEQ ID NO: 6036 - RNA, 20 nt, synthetic construct
  source 1..20: mol_type = other RNA
ttctgatgacacttgtacct

SEQ ID NO: 6037 - RNA, 20 nt, synthetic construct
  source 1..20: mol_type = other RNA
caggtacaagtgtcatcaga

SEQ ID NO: 6038 - RNA, 20 nt, synthetic construct
  source 1..20: mol_type = other RNA
agacccctcacaggtacaag

SEQ ID NO: 6039 - RNA, 20 nt, synthetic construct
  source 1..20: mol_type = other RNA
ctagacccctcacaggtaca

SEQ ID NO: 6040 - RNA, 20 nt, synthetic construct
  source 1..20: mol_type = other RNA
ttctctctagacccctcaca

SEQ ID NO: 6041 - RNA, 20 nt, synthetic construct
  source 1..20: mol_type = other RNA
tactttactacaattcagga

SEQ ID NO: 6042 - RNA, 20 nt, synthetic construct
  source 1..20: mol_type = other RNA
tgccctgcatcctgaattgt

SEQ ID NO: 6043 - RNA, 20 nt, synthetic construct
  source 1..20: mol_type = other RNA
catgccctgcatcctgaatt

SEQ ID NO: 6044 - RNA, 20 nt, synthetic construct
  source 1..20: mol_type = other RNA
ctcctccaagggaagaagct

SEQ ID NO: 6045 - RNA, 20 nt, synthetic construct
  source 1..20: mol_type = other RNA
cctccaagggaagaagcttt

SEQ ID NO: 6046 - RNA, 20 nt, synthetic construct
  source 1..20: mol_type = other RNA
tccaagggaagaagcttttg

SEQ ID NO: 6047 - RNA, 20 nt, synthetic construct
  source 1..20: mol_type = other RNA
aagggaagaagcttttggcg

SEQ ID NO: 6048 - RNA, 20 nt, synthetic construct
  source 1..20: mol_type = other RNA
gggatgtgtgcacgccaaaa

SEQ ID NO: 6049 - RNA, 20 nt, synthetic construct
  source 1..20: mol_type = other RNA
gcccccgacagccaattacc

SEQ ID NO: 6050 - RNA, 20 nt, synthetic construct
  source 1..20: mol_type = other RNA
actgaatcttcatgcaaacg

SEQ ID NO: 6051 - RNA, 20 nt, synthetic construct
  source 1..20: mol_type = other RNA
cgaggtagcacctttctagg

SEQ ID NO: 6052 - RNA, 20 nt, synthetic construct
  source 1..20: mol_type = other RNA
ttggaaagtgagctcacgag

SEQ ID NO: 6053 - RNA, 20 nt, synthetic construct
  source 1..20: mol_type = other RNA
tgagctcactttccaatgag

SEQ ID NO: 6054 - RNA, 20 nt, synthetic construct
  source 1..20: mol_type = other RNA
ctttccaatgaggaatctga

SEQ ID NO: 6055 - RNA, 20 nt, synthetic construct
  source 1..20: mol_type = other RNA
aaggtgtcaggtgaaatatt

SEQ ID NO: 6056 - RNA, 20 nt, synthetic construct
  source 1..20: mol_type = other RNA
cattctagaactgtagtaag

SEQ ID NO: 6057 - RNA, 20 nt, synthetic construct
  source 1..20: mol_type = other RNA
catccatctgcctatggata

SEQ ID NO: 6058 - RNA, 20 nt, synthetic construct
  source 1..20: mol_type = other RNA
tttccttatccataggcaga

SEQ ID NO: 6059 - RNA, 20 nt, synthetic construct
  source 1..20: mol_type = other RNA
tagactcctttctggttgtg

SEQ ID NO: 6060 - RNA, 20 nt, synthetic construct
  source 1..20: mol_type = other RNA
tttctggttgtgtcacaaat

SEQ ID NO: 6061 - RNA, 20 nt, synthetic construct
  source 1..20: mol_type = other RNA
gagcatagagaaacatgtga

SEQ ID NO: 6062 - RNA, 20 nt, synthetic construct
  source 1..20: mol_type = other RNA
atgctcagagatactcagct

SEQ ID NO: 6063 - RNA, 20 nt, synthetic construct
  source 1..20: mol_type = other RNA
gagatactcagcttgatttc

SEQ ID NO: 6064 - RNA, 20 nt, synthetic construct
  source 1..20: mol_type = other RNA
gcttgatttcccgtgttttc

SEQ ID NO: 6065 - RNA, 20 nt, synthetic construct
  source 1..20: mol_type = other RNA
gtcggtgctgaaatgaaaac

SEQ ID NO: 6066 - RNA, 20 nt, synthetic construct
  source 1..20: mol_type = other RNA
tgcaccccaggcctttgctc

SEQ ID NO: 6067 - RNA, 20 nt, synthetic construct
  source 1..20: mol_type = other RNA
gtccattaccatggtagcac

SEQ ID NO: 6068 - RNA, 20 nt, synthetic construct
  source 1..20: mol_type = other RNA
ataactctgtccattaccat

SEQ ID NO: 6069 - RNA, 20 nt, synthetic construct
  source 1..20: mol_type = other RNA
accactgtcacaggaagaac

SEQ ID NO: 6070 - RNA, 20 nt, synthetic construct
  source 1..20: mol_type = other RNA
catagtcggaccccagaata

SEQ ID NO: 6071 - RNA, 20 nt, synthetic construct
  source 1..20: mol_type = other RNA
tatggtaaagaacaaagaca

SEQ ID NO: 6072 - RNA, 20 nt, synthetic construct
  source 1..20: mol_type = other RNA
tgtaacagaaacttcacttg

SEQ ID NO: 6073 - RNA, 20 nt, synthetic construct
  source 1..20: mol_type = other RNA
gcttgagacacatctcttgt

SEQ ID NO: 6074 - RNA, 20 nt, synthetic construct
  source 1..20: mol_type = other RNA
agctgagttctccgaactca

SEQ ID NO: 6075 - RNA, 20 nt, synthetic construct
  source 1..20: mol_type = other RNA
gaactcaacttgtgacagat

SEQ ID NO: 6076 - RNA, 20 nt, synthetic construct
  source 1..20: mol_type = other RNA
acttgtgacagatgcagatg

SEQ ID NO: 6077 - RNA, 20 nt, synthetic construct
  source 1..20: mol_type = other RNA
aaggcaatcatcctgagaca

SEQ ID NO: 6078 - RNA, 20 nt, synthetic construct
  source 1..20: mol_type = other RNA
ggatgattgccttggagcta

SEQ ID NO: 6079 - RNA, 20 nt, synthetic construct
  source 1..20: mol_type = other RNA
gacccttagctccaaggcaa

SEQ ID NO: 6080 - RNA, 20 nt, synthetic construct
  source 1..20: mol_type = other RNA
cagacccttagctccaaggc

SEQ ID NO: 6081 - RNA, 20 nt, synthetic construct
  source 1..20: mol_type = other RNA
ctctccttcctcctagttct

SEQ ID NO: 6082 - RNA, 20 nt, synthetic construct
  source 1..20: mol_type = other RNA
atagaactaggaggaaggag

SEQ ID NO: 6083 - RNA, 20 nt, synthetic construct
  source 1..20: mol_type = other RNA
ccttcctcctagttctattg

SEQ ID NO: 6084 - RNA, 20 nt, synthetic construct
  source 1..20: mol_type = other RNA
ttcctcctagttctattgag

SEQ ID NO: 6085 - RNA, 20 nt, synthetic construct
  source 1..20: mol_type = other RNA
tagttctattgagcagaagg

SEQ ID NO: 6086 - RNA, 20 nt, synthetic construct
  source 1..20: mol_type = other RNA
agatttcccttctgctcaat

SEQ ID NO: 6087 - RNA, 20 nt, synthetic construct
  source 1..20: mol_type = other RNA
cctccagatttcccttctgc

SEQ ID NO: 6088 - RNA, 20 nt, synthetic construct
  source 1..20: mol_type = other RNA
tcacctccagatttcccttc

SEQ ID NO: 6089 - RNA, 20 nt, synthetic construct
  source 1..20: mol_type = other RNA
attgacgtttagttggtgtt

SEQ ID NO: 6090 - RNA, 20 nt, synthetic construct
  source 1..20: mol_type = other RNA
tgaacccagagagaaaaggc

SEQ ID NO: 6091 - RNA, 20 nt, synthetic construct
  source 1..20: mol_type = other RNA
ctgggttcaagaggaaagaa

SEQ ID NO: 6092 - RNA, 20 nt, synthetic construct
  source 1..20: mol_type = other RNA
gggttcaagaggaaagaata

SEQ ID NO: 6093 - RNA, 20 nt, synthetic construct
  source 1..20: mol_type = other RNA
ttcctaagtaccagtggcct

SEQ ID NO: 6094 - RNA, 20 nt, synthetic construct
  source 1..20: mol_type = other RNA
tgctgggaacctgtatccct

SEQ ID NO: 6095 - RNA, 20 nt, synthetic construct
  source 1..20: mol_type = other RNA
tctgccttccttccttggat

SEQ ID NO: 6096 - RNA, 20 nt, synthetic construct
  source 1..20: mol_type = other RNA
catctgccttccttccttgg

SEQ ID NO: 6097 - RNA, 20 nt, synthetic construct
  source 1..20: mol_type = other RNA
gtgctgactctcatctgcct

SEQ ID NO: 6098 - RNA, 20 nt, synthetic construct
  source 1..20: mol_type = other RNA
ctgtgctgactctcatctgc

SEQ ID NO: 6099 - RNA, 20 nt, synthetic construct
  source 1..20: mol_type = other RNA
atccacccatcccttttact

SEQ ID NO: 6100 - RNA, 20 nt, synthetic construct
  source 1..20: mol_type = other RNA
ccatccacccatccctttta

SEQ ID NO: 6101 - RNA, 20 nt, synthetic construct
  source 1..20: mol_type = other RNA
ggtagtcgcttgtggccaaa

SEQ ID NO: 6102 - RNA, 20 nt, synthetic construct
  source 1..20: mol_type = other RNA
accatctgttgtcccacatg

SEQ ID NO: 6103 - RNA, 20 nt, synthetic construct
  source 1..20: mol_type = other RNA
aggtcctctaccatctgttg

SEQ ID NO: 6104 - RNA, 20 nt, synthetic construct
  source 1..20: mol_type = other RNA
attctctaggtcctctacca

SEQ ID NO: 6105 - RNA, 20 nt, synthetic construct
  source 1..20: mol_type = other RNA
caattctctaggtcctctac

SEQ ID NO: 6106 - RNA, 20 nt, synthetic construct
  source 1..20: mol_type = other RNA
ctcaattctctaggtcctct

SEQ ID NO: 6107 - RNA, 20 nt, synthetic construct
  source 1..20: mol_type = other RNA
actccgcagatgccttggct

SEQ ID NO: 6108 - RNA, 20 nt, synthetic construct
  source 1..20: mol_type = other RNA
gcagatgccttggctttctt

SEQ ID NO: 6109 - RNA, 20 nt, synthetic construct
  source 1..20: mol_type = other RNA
ttgctattcagtgcaggaag

SEQ ID NO: 6110 - RNA, 20 nt, synthetic construct
  source 1..20: mol_type = other RNA
atctccttgctattcagtgc

SEQ ID NO: 6111 - RNA, 20 nt, synthetic construct
  source 1..20: mol_type = other RNA
attcagcaagatggctacag

SEQ ID NO: 6112 - RNA, 20 nt, synthetic construct
  source 1..20: mol_type = other RNA
tccattcagcaagatggcta

SEQ ID NO: 6113 - RNA, 20 nt, synthetic construct
  source 1..20: mol_type = other RNA
cctccattcagcaagatggc

SEQ ID NO: 6114 - RNA, 20 nt, synthetic construct
  source 1..20: mol_type = other RNA
aatccctctcctccattcag

SEQ ID NO: 6115 - RNA, 20 nt, synthetic construct
  source 1..20: mol_type = other RNA
acacaaaccagttcttattt

SEQ ID NO: 6116 - RNA, 20 nt, synthetic construct
  source 1..20: mol_type = other RNA
tttcctccacacaaaccagt

SEQ ID NO: 6117 - RNA, 20 nt, synthetic construct
  source 1..20: mol_type = other RNA
acaaatacgcatagaagtct

SEQ ID NO: 6118 - RNA, 20 nt, synthetic construct
  source 1..20: mol_type = other RNA
tccagtcgttggcctgacat

SEQ ID NO: 6119 - RNA, 20 nt, synthetic construct
  source 1..20: mol_type = other RNA
agtcgttggcctgacatgac

SEQ ID NO: 6120 - RNA, 20 nt, synthetic construct
  source 1..20: mol_type = other RNA
tggaaccatttcctgtgcac

SEQ ID NO: 6121 - RNA, 20 nt, synthetic construct
  source 1..20: mol_type = other RNA
gtaaatgttctttgccacac

SEQ ID NO: 6122 - RNA, 20 nt, synthetic construct
  source 1..20: mol_type = other RNA
tgtacttgctgtttctcagt

SEQ ID NO: 6123 - RNA, 20 nt, synthetic construct
  source 1..20: mol_type = other RNA
tctttattgagcttcctgtg

SEQ ID NO: 6124 - RNA, 20 nt, synthetic construct
  source 1..20: mol_type = other RNA
cttctttattgagcttcctg

SEQ ID NO: 6125 - RNA, 20 nt, synthetic construct
  source 1..20: mol_type = other RNA
ctcttctttattgagcttcc

SEQ ID NO: 6126 - RNA, 20 nt, synthetic construct
  source 1..20: mol_type = other RNA
ataaagaagagagagatcac

SEQ ID NO: 6127 - RNA, 20 nt, synthetic construct
  source 1..20: mol_type = other RNA
agtatcccagagtgctatgt

SEQ ID NO: 6128 - RNA, 20 nt, synthetic construct
  source 1..20: mol_type = other RNA
gggatactggagttcttccc

SEQ ID NO: 6129 - RNA, 20 nt, synthetic construct
  source 1..20: mol_type = other RNA
ggtctagctgggaagaactc

SEQ ID NO: 6130 - RNA, 20 nt, synthetic construct
  source 1..20: mol_type = other RNA
ctggtctagctgggaagaac

SEQ ID NO: 6131 - RNA, 20 nt, synthetic construct
  source 1..20: mol_type = other RNA
gtgaggactctctggtctag

SEQ ID NO: 6132 - RNA, 20 nt, synthetic construct
  source 1..20: mol_type = other RNA
cggagcacattgccaattca

SEQ ID NO: 6133 - RNA, 20 nt, synthetic construct
  source 1..20: mol_type = other RNA
actgaattggcaatgtgctc

SEQ ID NO: 6134 - RNA, 20 nt, synthetic construct
  source 1..20: mol_type = other RNA
caggcacttcattgattgga

SEQ ID NO: 6135 - RNA, 20 nt, synthetic construct
  source 1..20: mol_type = other RNA
cacaggcacttcattgattg

SEQ ID NO: 6136 - RNA, 20 nt, synthetic construct
  source 1..20: mol_type = other RNA
actctctttagaagtaaaca

SEQ ID NO: 6137 - RNA, 20 nt, synthetic construct
  source 1..20: mol_type = other RNA
ctttagaagtaaacaacaaa

SEQ ID NO: 6138 - RNA, 20 nt, synthetic construct
  source 1..20: mol_type = other RNA
ttagaagtaaacaacaaagt

SEQ ID NO: 6139 - RNA, 20 nt, synthetic construct
  source 1..20: mol_type = other RNA
gcggataccgcatagctgag

SEQ ID NO: 6140 - RNA, 20 nt, synthetic construct
  source 1..20: mol_type = other RNA
ctctgcggataccgcatagc

SEQ ID NO: 6141 - RNA, 20 nt, synthetic construct
  source 1..20: mol_type = other RNA
gctatgcggtatccgcagag

SEQ ID NO: 6142 - RNA, 20 nt, synthetic construct
  source 1..20: mol_type = other RNA
ttcctgagcctgtttgtatt

SEQ ID NO: 6143 - RNA, 20 nt, synthetic construct
  source 1..20: mol_type = other RNA
cattcctgagcctgtttgta

SEQ ID NO: 6144 - RNA, 20 nt, synthetic construct
  source 1..20: mol_type = other RNA
ggaatgagagaaatgattag

SEQ ID NO: 6145 - RNA, 20 nt, synthetic construct
  source 1..20: mol_type = other RNA
tgatatgatatctgctttct

SEQ ID NO: 6146 - RNA, 20 nt, synthetic construct
  source 1..20: mol_type = other RNA
ttaatttaatttggctattc

SEQ ID NO: 6147 - RNA, 20 nt, synthetic construct
  source 1..20: mol_type = other RNA
gaaacgtctaaattgatcag

SEQ ID NO: 6148 - RNA, 20 nt, synthetic construct
  source 1..20: mol_type = other RNA
agaattgtgtgttgggtaat

SEQ ID NO: 6149 - RNA, 20 nt, synthetic construct
  source 1..20: mol_type = other RNA
ttctgtaggttctctagaat

SEQ ID NO: 6150 - RNA, 20 nt, synthetic construct
  source 1..20: mol_type = other RNA
cacacacgcagaaactcaca

SEQ ID NO: 6151 - RNA, 20 nt, synthetic construct
  source 1..20: mol_type = other RNA
caagttctaacacacacaga

SEQ ID NO: 6152 - RNA, 20 nt, synthetic construct
  source 1..20: mol_type = other RNA
cttaattttatatttcactg

SEQ ID NO: 6153 - RNA, 20 nt, synthetic construct
  source 1..20: mol_type = other RNA
cagacatgtaggaaaatatg

SEQ ID NO: 6154 - RNA, 20 nt, synthetic construct
  source 1..20: mol_type = other RNA
ttactgtgacttgcttccca

SEQ ID NO: 6155 - RNA, 20 nt, synthetic construct
  source 1..20: mol_type = other RNA
cttgctctttactgtgactt

SEQ ID NO: 6156 - RNA, 20 nt, synthetic construct
  source 1..20: mol_type = other RNA
agggatcatatagggaattt

SEQ ID NO: 6157 - RNA, 20 nt, synthetic construct
  source 1..20: mol_type = other RNA
tgacaggtttcttcttatta

SEQ ID NO: 6158 - RNA, 20 nt, synthetic construct
  source 1..20: mol_type = other RNA
agtttctcgtgacaggtttc

SEQ ID NO: 6159 - RNA, 20 nt, synthetic construct
  source 1..20: mol_type = other RNA
ttttcctccagtttctcgtg

SEQ ID NO: 6160 - RNA, 20 nt, synthetic construct
  source 1..20: mol_type = other RNA
gaaacactggaagccagata

SEQ ID NO: 6161 - RNA, 20 nt, synthetic construct
  source 1..20: mol_type = other RNA
ttttgttcctgattatcatt

SEQ ID NO: 6162 - RNA, 20 nt, synthetic construct
  source 1..20: mol_type = other RNA
tgttacataagcctgctgat

SEQ ID NO: 6163 - RNA, 20 nt, synthetic construct
  source 1..20: mol_type = other RNA
cttgttacataagcctgctg

SEQ ID NO: 6164 - RNA, 20 nt, synthetic construct
  source 1..20: mol_type = other RNA
tttacaaagatatagaaatt

SEQ ID NO: 6165 - RNA, 20 nt, synthetic construct
  source 1..20: mol_type = other RNA
catttacaaagatatagaaa

SEQ ID NO: 6166 - RNA, 20 nt, synthetic construct
  source 1..20: mol_type = other RNA
acatatgctgaagttaaata

SEQ ID NO: 6167 - RNA, 20 nt, synthetic construct
  source 1..20: mol_type = other RNA
tgcacgatggtgtgtcatat

SEQ ID NO: 6168 - RNA, 20 nt, synthetic construct
  source 1..20: mol_type = other RNA
aggatttgcaatatcccttc

SEQ ID NO: 6169 - RNA, 20 nt, synthetic construct
  source 1..20: mol_type = other RNA
gagttcaaacctttgtgatt

SEQ ID NO: 6170 - RNA, 20 nt, synthetic construct
  source 1..20: mol_type = other RNA
gaggtttttggtataataag

SEQ ID NO: 6171 - RNA, 20 nt, synthetic construct
  source 1..20: mol_type = other RNA
tttgaatgcatggactattc

SEQ ID NO: 6172 - RNA, 20 nt, synthetic construct
  source 1..20: mol_type = other RNA
tgaaagacttctagttcttc

SEQ ID NO: 6173 - RNA, 20 nt, synthetic construct
  source 1..20: mol_type = other RNA
ggctcttatacatccagttg

SEQ ID NO: 6174 - RNA, 20 nt, synthetic construct
  source 1..20: mol_type = other RNA
tatacatccagttgctcatt

SEQ ID NO: 6175 - RNA, 20 nt, synthetic construct
  source 1..20: mol_type = other RNA
attccaggaagctggttcaa

SEQ ID NO: 6176 - RNA, 20 nt, synthetic construct
  source 1..20: mol_type = other RNA
ttgaaccagcttcctggaat

SEQ ID NO: 6177 - RNA, 20 nt, synthetic construct
  source 1..20: mol_type = other RNA
accccagaccctccattcca

SEQ ID NO: 6178 - RNA, 20 nt, synthetic construct
  source 1..20: mol_type = other RNA
agacttgtggcctagtctca

SEQ ID NO: 6179 - RNA, 20 nt, synthetic construct
  source 1..20: mol_type = other RNA
agagactctagacttgtggc

SEQ ID NO: 6180 - RNA, 20 nt, synthetic construct
  source 1..20: mol_type = other RNA
ctagagactctagacttgtg

SEQ ID NO: 6181 - RNA, 20 nt, synthetic construct
  source 1..20: mol_type = other RNA
agagagacagtgttggaacc

SEQ ID NO: 6182 - RNA, 20 nt, synthetic construct
  source 1..20: mol_type = other RNA
ggctgcctgagaaaatggga

SEQ ID NO: 6183 - RNA, 20 nt, synthetic construct
  source 1..20: mol_type = other RNA
ggcagccagaggtcatgaat

SEQ ID NO: 6184 - RNA, 20 nt, synthetic construct
  source 1..20: mol_type = other RNA
cattcatgacctctggctgc

SEQ ID NO: 6185 - RNA, 20 nt, synthetic construct
  source 1..20: mol_type = other RNA
cagtatcctcacattcatga

SEQ ID NO: 6186 - RNA, 20 nt, synthetic construct
  source 1..20: mol_type = other RNA
aacctcccagtatcctcaca

SEQ ID NO: 6187 - RNA, 20 nt, synthetic construct
  source 1..20: mol_type = other RNA
caagaacgttgctccaacct

SEQ ID NO: 6188 - RNA, 20 nt, synthetic construct
  source 1..20: mol_type = other RNA
tccttatgcctcccaagaac

SEQ ID NO: 6189 - RNA, 20 nt, synthetic construct
  source 1..20: mol_type = other RNA
cctgctttgccccctaatgc

SEQ ID NO: 6190 - RNA, 20 nt, synthetic construct
  source 1..20: mol_type = other RNA
gctgctccgtagctgtccga

SEQ ID NO: 6191 - RNA, 20 nt, synthetic construct
  source 1..20: mol_type = other RNA
gtagctgtccgacctcttca

SEQ ID NO: 6192 - RNA, 20 nt, synthetic construct
  source 1..20: mol_type = other RNA
tcagatctcttagtccaccc

SEQ ID NO: 6193 - RNA, 20 nt, synthetic construct
  source 1..20: mol_type = other RNA
tagtccaccctgccgtcttc

SEQ ID NO: 6194 - RNA, 20 nt, synthetic construct
  source 1..20: mol_type = other RNA
gggactgagggaaaggggga

SEQ ID NO: 6195 - RNA, 20 nt, synthetic construct
  source 1..20: mol_type = other RNA
tccccctttccctcagtccc

SEQ ID NO: 6196 - RNA, 20 nt, synthetic construct
  source 1..20: mol_type = other RNA
gtcccggagtagctgcggcc

SEQ ID NO: 6197 - RNA, 20 nt, synthetic construct
  source 1..20: mol_type = other RNA
gctggccgcagctactccgg

SEQ ID NO: 6198 - RNA, 20 nt, synthetic construct
  source 1..20: mol_type = other RNA
gtctaccctctgctggccgc

SEQ ID NO: 6199 - RNA, 20 nt, synthetic construct
  source 1..20: mol_type = other RNA
cagtctaccctctgctggcc

SEQ ID NO: 6200 - RNA, 20 nt, synthetic construct
  source 1..20: mol_type = other RNA
tgctctcagtctaccctctg

SEQ ID NO: 6201 - RNA, 20 nt, synthetic construct
  source 1..20: mol_type = other RNA
cctgctctcagtctaccctc

SEQ ID NO: 6202 - RNA, 20 nt, synthetic construct
  source 1..20: mol_type = other RNA
agaaggggttcctaggcagg

SEQ ID NO: 6203 - RNA, 20 nt, synthetic construct
  source 1..20: mol_type = other RNA
caggcaggatgcagtatctc

SEQ ID NO: 6204 - RNA, 20 nt, synthetic construct
  source 1..20: mol_type = other RNA
aagctgccctggaaaacttg

SEQ ID NO: 6205 - RNA, 20 nt, synthetic construct
  source 1..20: mol_type = other RNA
aagacttctcaaagctgccc

SEQ ID NO: 6206 - RNA, 20 nt, synthetic construct
  source 1..20: mol_type = other RNA
acctttcccacagaaaagca

SEQ ID NO: 6207 - RNA, 20 nt, synthetic construct
  source 1..20: mol_type = other RNA
atacgtagtgaaaaggctct

SEQ ID NO: 6208 - RNA, 20 nt, synthetic construct
  source 1..20: mol_type = other RNA
atgtactcaatacgtagtga

SEQ ID NO: 6209 - RNA, 20 nt, synthetic construct
  source 1..20: mol_type = other RNA
cactctatgtactcaatacg

SEQ ID NO: 6210 - RNA, 20 nt, synthetic construct
  source 1..20: mol_type = other RNA
tggatgacgtgtgttttctg

SEQ ID NO: 6211 - RNA, 20 nt, synthetic construct
  source 1..20: mol_type = other RNA
cacattagaatatgaagtcc

SEQ ID NO: 6212 - RNA, 20 nt, synthetic construct
  source 1..20: mol_type = other RNA
gtaggacttcatattctaat

SEQ ID NO: 6213 - RNA, 20 nt, synthetic construct
  source 1..20: mol_type = other RNA
cggtaggacttcatattcta

SEQ ID NO: 6214 - RNA, 20 nt, synthetic construct
  source 1..20: mol_type = other RNA
ctcggtaggacttcatattc

SEQ ID NO: 6215 - RNA, 20 nt, synthetic construct
  source 1..20: mol_type = other RNA
gtatctctctcggtaggact

SEQ ID NO: 6216 - RNA, 20 nt, synthetic construct
  source 1..20: mol_type = other RNA
ggaataactggtatgggttt

SEQ ID NO: 6217 - RNA, 20 nt, synthetic construct
  source 1..20: mol_type = other RNA
ctggaataactggtatgggt

SEQ ID NO: 6218 - RNA, 20 nt, synthetic construct
  source 1..20: mol_type = other RNA
ttctgccttctgcccaatcc

SEQ ID NO: 6219 - RNA, 20 nt, synthetic construct
  source 1..20: mol_type = other RNA
gatcgtttttcggccacgtg

SEQ ID NO: 6220 - RNA, 20 nt, synthetic construct
  source 1..20: mol_type = other RNA
gtgtttctaagaagcgtttg

SEQ ID NO: 6221 - RNA, 20 nt, synthetic construct
  source 1..20: mol_type = other RNA
tacttaatagattattacta

SEQ ID NO: 6222 - RNA, 20 nt, synthetic construct
  source 1..20: mol_type = other RNA
catacttaatagattattac

SEQ ID NO: 6223 - RNA, 20 nt, synthetic construct
  source 1..20: mol_type = other RNA
gcacatctctcatacttaat

SEQ ID NO: 6224 - RNA, 20 nt, synthetic construct
  source 1..20: mol_type = other RNA
ctgcacatctctcatactta

SEQ ID NO: 6225 - RNA, 20 nt, synthetic construct
  source 1..20: mol_type = other RNA
atcactaatcctctctgcac

SEQ ID NO: 6226 - RNA, 20 nt, synthetic construct
  source 1..20: mol_type = other RNA
cgatcactaatcctctctgc

SEQ ID NO: 6227 - RNA, 20 nt, synthetic construct
  source 1..20: mol_type = other RNA
tttgtgctgcaacaaggtca

SEQ ID NO: 6228 - RNA, 20 nt, synthetic construct
  source 1..20: mol_type = other RNA
cctttgtgctgcaacaaggt

SEQ ID NO: 6229 - RNA, 20 nt, synthetic construct
  source 1..20: mol_type = other RNA
ctcctttgtgctgcaacaag

SEQ ID NO: 6230 - RNA, 20 nt, synthetic construct
  source 1..20: mol_type = other RNA
tgtgacgtgtatcgttttgg

SEQ ID NO: 6231 - RNA, 20 nt, synthetic construct
  source 1..20: mol_type = other RNA
tataacaataaggagctgcc

SEQ ID NO: 6232 - RNA, 20 nt, synthetic construct
  source 1..20: mol_type = other RNA
ttattgttatacgagggatc

SEQ ID NO: 6233 - RNA, 20 nt, synthetic construct
  source 1..20: mol_type = other RNA
cacctgacaccgggatccct

SEQ ID NO: 6234 - RNA, 20 nt, synthetic construct
  source 1..20: mol_type = other RNA
gacgcagaagggactgccgt

SEQ ID NO: 6235 - RNA, 20 nt, synthetic construct
  source 1..20: mol_type = other RNA
gactgttaccccggttccaa

SEQ ID NO: 6236 - RNA, 20 nt, synthetic construct
  source 1..20: mol_type = other RNA
aggcttggaaccggggtaac

SEQ ID NO: 6237 - RNA, 20 nt, synthetic construct
  source 1..20: mol_type = other RNA
ttaccttgttcggaaggagc

SEQ ID NO: 6238 - RNA, 20 nt, synthetic construct
  source 1..20: mol_type = other RNA
ttccgaacaaggtaaggagt

SEQ ID NO: 6239 - RNA, 20 nt, synthetic construct
  source 1..20: mol_type = other RNA
agcatccgtttaccattgaa

SEQ ID NO: 6240 - RNA, 20 nt, synthetic construct
  source 1..20: mol_type = other RNA
ggcaacactcgagcatccgt

SEQ ID NO: 6241 - RNA, 20 nt, synthetic construct
  source 1..20: mol_type = other RNA
agtgttgcctgagttctacc

SEQ ID NO: 6242 - RNA, 20 nt, synthetic construct
  source 1..20: mol_type = other RNA
tacatggtagaactcaggca

SEQ ID NO: 6243 - RNA, 20 nt, synthetic construct
  source 1..20: mol_type = other RNA
cccagagagtgcacggaggc

SEQ ID NO: 6244 - RNA, 20 nt, synthetic construct
  source 1..20: mol_type = other RNA
gtgcactctctgggggagcc

SEQ ID NO: 6245 - RNA, 20 nt, synthetic construct
  source 1..20: mol_type = other RNA
gctggctcccccagagagtg

SEQ ID NO: 6246 - RNA, 20 nt, synthetic construct
  source 1..20: mol_type = other RNA
ctgggggagccagcggagtg

SEQ ID NO: 6247 - RNA, 20 nt, synthetic construct
  source 1..20: mol_type = other RNA
gggggagccagcggagtgat

SEQ ID NO: 6248 - RNA, 20 nt, synthetic construct
  source 1..20: mol_type = other RNA
agggggatcgacttcaaaat

SEQ ID NO: 6249 - RNA, 20 nt, synthetic construct
  source 1..20: mol_type = other RNA
gtgtcccagccaaaattttt

SEQ ID NO: 6250 - RNA, 20 nt, synthetic construct
  source 1..20: mol_type = other RNA
ttccaagccagtaagctttt

SEQ ID NO: 6251 - RNA, 20 nt, synthetic construct
  source 1..20: mol_type = other RNA
gaatgctggctacttgaaga

SEQ ID NO: 6252 - RNA, 20 nt, synthetic construct
  source 1..20: mol_type = other RNA
gaatctgcaatgctgaagat

SEQ ID NO: 6253 - RNA, 20 nt, synthetic construct
  source 1..20: mol_type = other RNA
agagccacatttctcagaat

SEQ ID NO: 6254 - RNA, 20 nt, synthetic construct
  source 1..20: mol_type = other RNA
agggtgacaggctccagagc

SEQ ID NO: 6255 - RNA, 20 nt, synthetic construct
  source 1..20: mol_type = other RNA
ggagcctgtcaccctcgaga

SEQ ID NO: 6256 - RNA, 20 nt, synthetic construct
  source 1..20: mol_type = other RNA
taggtttctcgagggtgaca

SEQ ID NO: 6257 - RNA, 20 nt, synthetic construct
  source 1..20: mol_type = other RNA
agaaacctaagagggctgca

SEQ ID NO: 6258 - RNA, 20 nt, synthetic construct
  source 1..20: mol_type = other RNA
atagacccagggccacatgg

SEQ ID NO: 6259 - RNA, 20 nt, synthetic construct
  source 1..20: mol_type = other RNA
tgtactgctccatagaccca

SEQ ID NO: 6260 - RNA, 20 nt, synthetic construct
  source 1..20: mol_type = other RNA
cagtgctctaaggctcttca

SEQ ID NO: 6261 - RNA, 20 nt, synthetic construct
  source 1..20: mol_type = other RNA
aaggctcttcagccctaggc

SEQ ID NO: 6262 - RNA, 20 nt, synthetic construct
  source 1..20: mol_type = other RNA
cttcaaagcctagggctgaa

SEQ ID NO: 6263 - RNA, 20 nt, synthetic construct
  source 1..20: mol_type = other RNA
tcagccctaggctttgaagg

SEQ ID NO: 6264 - RNA, 20 nt, synthetic construct
  source 1..20: mol_type = other RNA
gtattcttaaacctctttct

SEQ ID NO: 6265 - RNA, 20 nt, synthetic construct
  source 1..20: mol_type = other RNA
ttctgatgacacttgtacct

SEQ ID NO: 6266 - RNA, 20 nt, synthetic construct
  source 1..20: mol_type = other RNA
caggtacaagtgtcatcaga

SEQ ID NO: 6267 - RNA, 20 nt, synthetic construct
  source 1..20: mol_type = other RNA
agacccctcacaggtacaag

SEQ ID NO: 6268 - RNA, 20 nt, synthetic construct
  source 1..20: mol_type = other RNA
ctagacccctcacaggtaca

SEQ ID NO: 6269 - RNA, 20 nt, synthetic construct
  source 1..20: mol_type = other RNA
ttctctctagacccctcaca

SEQ ID NO: 6270 - RNA, 20 nt, synthetic construct
  source 1..20: mol_type = other RNA
tactttactacaattcagga

SEQ ID NO: 6271 - RNA, 20 nt, synthetic construct
  source 1..20: mol_type = other RNA
tgccctgcatcctgaattgt

SEQ ID NO: 6272 - RNA, 20 nt, synthetic construct
  source 1..20: mol_type = other RNA
catgccctgcatcctgaatt

SEQ ID NO: 6273 - RNA, 20 nt, synthetic construct
  source 1..20: mol_type = other RNA
ctcctccaagggaagaagct

SEQ ID NO: 6274 - RNA, 20 nt, synthetic construct
  source 1..20: mol_type = other RNA
cctccaagggaagaagcttt

SEQ ID NO: 6275 - RNA, 20 nt, synthetic construct
  source 1..20: mol_type = other RNA
tccaagggaagaagcttttg

SEQ ID NO: 6276 - RNA, 20 nt, synthetic construct
  source 1..20: mol_type = other RNA
aagggaagaagcttttggcg

SEQ ID NO: 6277 - RNA, 20 nt, synthetic construct
  source 1..20: mol_type = other RNA
gggatgtgtgcacgccaaaa

SEQ ID NO: 6278 - RNA, 20 nt, synthetic construct
  source 1..20: mol_type = other RNA
gcccccgacagccaattacc

SEQ ID NO: 6279 - RNA, 20 nt, synthetic construct
  source 1..20: mol_type = other RNA
actgaatcttcatgcaaacg

SEQ ID NO: 6280 - RNA, 20 nt, synthetic construct
  source 1..20: mol_type = other RNA
cgaggtagcacctttctagg

SEQ ID NO: 6281 - RNA, 20 nt, synthetic construct
  source 1..20: mol_type = other RNA
ttggaaagtgagctcacgag

SEQ ID NO: 6282 - RNA, 20 nt, synthetic construct
  source 1..20: mol_type = other RNA
tgagctcactttccaatgag

SEQ ID NO: 6283 - RNA, 20 nt, synthetic construct
  source 1..20: mol_type = other RNA
ctttccaatgaggaatctga

SEQ ID NO: 6284 - RNA, 20 nt, synthetic construct
  source 1..20: mol_type = other RNA
aaggtgtcaggtgaaatatt

SEQ ID NO: 6285 - RNA, 20 nt, synthetic construct
  source 1..20: mol_type = other RNA
cattctagaactgtagtaag

SEQ ID NO: 6286 - RNA, 20 nt, synthetic construct
  source 1..20: mol_type = other RNA
catccatctgcctatggata

SEQ ID NO: 6287 - RNA, 20 nt, synthetic construct
  source 1..20: mol_type = other RNA
tttccttatccataggcaga

SEQ ID NO: 6288 - RNA, 20 nt, synthetic construct
  source 1..20: mol_type = other RNA
tagactcctttctggttgtg

SEQ ID NO: 6289 - RNA, 20 nt, synthetic construct
  source 1..20: mol_type = other RNA
tttctggttgtgtcacaaat

SEQ ID NO: 6290 - RNA, 20 nt, synthetic construct
  source 1..20: mol_type = other RNA
gagcatagagaaacatgtga

SEQ ID NO: 6291 - RNA, 20 nt, synthetic construct
  source 1..20: mol_type = other RNA
atgctcagagatactcagct

SEQ ID NO: 6292 - RNA, 20 nt, synthetic construct
  source 1..20: mol_type = other RNA
gagatactcagcttgatttc

SEQ ID NO: 6293 - RNA, 20 nt, synthetic construct
  source 1..20: mol_type = other RNA
gcttgatttcccgtgttttc

SEQ ID NO: 6294 - RNA, 20 nt, synthetic construct
  source 1..20: mol_type = other RNA
gtcggtgctgaaatgaaaac

SEQ ID NO: 6295 - RNA, 20 nt, synthetic construct
  source 1..20: mol_type = other RNA
tgcaccccaggcctttgctc

SEQ ID NO: 6296 - RNA, 20 nt, synthetic construct
  source 1..20: mol_type = other RNA
gtccattaccatggtagcac

SEQ ID NO: 6297 - RNA, 20 nt, synthetic construct
  source 1..20: mol_type = other RNA
ataactctgtccattaccat

SEQ ID NO: 6298 - RNA, 20 nt, synthetic construct
  source 1..20: mol_type = other RNA
accactgtcacaggaagaac

SEQ ID NO: 6299 - RNA, 20 nt, synthetic construct
  source 1..20: mol_type = other RNA
catagtcggaccccagaata

SEQ ID NO: 6300 - RNA, 20 nt, synthetic construct
  source 1..20: mol_type = other RNA
tatggtaaagaacaaagaca

SEQ ID NO: 6301 - RNA, 20 nt, synthetic construct
  source 1..20: mol_type = other RNA
tgtaacagaaacttcacttg

SEQ ID NO: 6302 - RNA, 20 nt, synthetic construct
  source 1..20: mol_type = other RNA
gcttgagacacatctcttgt

SEQ ID NO: 6303 - RNA, 20 nt, synthetic construct
  source 1..20: mol_type = other RNA
agctgagttctccgaactca

SEQ ID NO: 6304 - RNA, 20 nt, synthetic construct
  source 1..20: mol_type = other RNA
gaactcaacttgtgacagat

SEQ ID NO: 6305 - RNA, 20 nt, synthetic construct
  source 1..20: mol_type = other RNA
acttgtgacagatgcagatg

SEQ ID NO: 6306 - RNA, 20 nt, synthetic construct
  source 1..20: mol_type = other RNA
aaggcaatcatcctgagaca

SEQ ID NO: 6307 - RNA, 20 nt, synthetic construct
  source 1..20: mol_type = other RNA
ggatgattgccttggagcta

SEQ ID NO: 6308 - RNA, 20 nt, synthetic construct
  source 1..20: mol_type = other RNA
gacccttagctccaaggcaa

SEQ ID NO: 6309 - RNA, 20 nt, synthetic construct
  source 1..20: mol_type = other RNA
cagacccttagctccaaggc

SEQ ID NO: 6310 - RNA, 20 nt, synthetic construct
  source 1..20: mol_type = other RNA
ctctccttcctcctagttct

SEQ ID NO: 6311 - RNA, 20 nt, synthetic construct
  source 1..20: mol_type = other RNA
atagaactaggaggaaggag

SEQ ID NO: 6312 - RNA, 20 nt, synthetic construct
  source 1..20: mol_type = other RNA
ccttcctcctagttctattg

SEQ ID NO: 6313 - RNA, 20 nt, synthetic construct
  source 1..20: mol_type = other RNA
ttcctcctagttctattgag

SEQ ID NO: 6314 - RNA, 20 nt, synthetic construct
  source 1..20: mol_type = other RNA
tagttctattgagcagaagg

SEQ ID NO: 6315 - RNA, 20 nt, synthetic construct
  source 1..20: mol_type = other RNA
agatttcccttctgctcaat

SEQ ID NO: 6316 - RNA, 20 nt, synthetic construct
  source 1..20: mol_type = other RNA
cctccagatttcccttctgc

SEQ ID NO: 6317 - RNA, 20 nt, synthetic construct
  source 1..20: mol_type = other RNA
tcacctccagatttcccttc

SEQ ID NO: 6318 - RNA, 20 nt, synthetic construct
  source 1..20: mol_type = other RNA
attgacgtttagttggtgtt

SEQ ID NO: 6319 - RNA, 20 nt, synthetic construct
  source 1..20: mol_type = other RNA
tgaacccagagagaaaaggc

SEQ ID NO: 6320 - RNA, 20 nt, synthetic construct
  source 1..20: mol_type = other RNA
ctgggttcaagaggaaagaa

SEQ ID NO: 6321 - RNA, 20 nt, synthetic construct
  source 1..20: mol_type = other RNA
gggttcaagaggaaagaata

SEQ ID NO: 6322 - RNA, 20 nt, synthetic construct
  source 1..20: mol_type = other RNA
ttcctaagtaccagtggcct

SEQ ID NO: 6323 - RNA, 20 nt, synthetic construct
  source 1..20: mol_type = other RNA
tgctgggaacctgtatccct

SEQ ID NO: 6324 - RNA, 20 nt, synthetic construct
  source 1..20: mol_type = other RNA
tctgccttccttccttggat

SEQ ID NO: 6325 - RNA, 20 nt, synthetic construct
  source 1..20: mol_type = other RNA
catctgccttccttccttgg

SEQ ID NO: 6326 - RNA, 20 nt, synthetic construct
  source 1..20: mol_type = other RNA
gtgctgactctcatctgcct

SEQ ID NO: 6327 - RNA, 20 nt, synthetic construct
  source 1..20: mol_type = other RNA
ctgtgctgactctcatctgc

SEQ ID NO: 6328 - RNA, 20 nt, synthetic construct
  source 1..20: mol_type = other RNA
atccacccatcccttttact

SEQ ID NO: 6329 - RNA, 20 nt, synthetic construct
  source 1..20: mol_type = other RNA
ccatccacccatccctttta

SEQ ID NO: 6330 - RNA, 20 nt, synthetic construct
  source 1..20: mol_type = other RNA
ggtagtcgcttgtggccaaa

SEQ ID NO: 6331 - RNA, 20 nt, synthetic construct
  source 1..20: mol_type = other RNA
accatctgttgtcccacatg

SEQ ID NO: 6332 - RNA, 20 nt, synthetic construct
  source 1..20: mol_type = other RNA
aggtcctctaccatctgttg

SEQ ID NO: 6333 - RNA, 20 nt, synthetic construct
  source 1..20: mol_type = other RNA
attctctaggtcctctacca

SEQ ID NO: 6334 - RNA, 20 nt, synthetic construct
  source 1..20: mol_type = other RNA
caattctctaggtcctctac

SEQ ID NO: 6335 - RNA, 20 nt, synthetic construct
  source 1..20: mol_type = other RNA
ctcaattctctaggtcctct

SEQ ID NO: 6336 - RNA, 20 nt, synthetic construct
  source 1..20: mol_type = other RNA
actccgcagatgccttggct

SEQ ID NO: 6337 - RNA, 20 nt, synthetic construct
  source 1..20: mol_type = other RNA
gcagatgccttggctttctt

SEQ ID NO: 6338 - RNA, 20 nt, synthetic construct
  source 1..20: mol_type = other RNA
ttgctattcagtgcaggaag

SEQ ID NO: 6339 - RNA, 20 nt, synthetic construct
  source 1..20: mol_type = other RNA
atctccttgctattcagtgc

SEQ ID NO: 6340 - RNA, 20 nt, synthetic construct
  source 1..20: mol_type = other RNA
attcagcaagatggctacag

SEQ ID NO: 6341 - RNA, 20 nt, synthetic construct
  source 1..20: mol_type = other RNA
tccattcagcaagatggcta

SEQ ID NO: 6342 - RNA, 20 nt, synthetic construct
  source 1..20: mol_type = other RNA
cctccattcagcaagatggc

SEQ ID NO: 6343 - RNA, 20 nt, synthetic construct
  source 1..20: mol_type = other RNA
aatccctctcctccattcag

SEQ ID NO: 6344 - RNA, 20 nt, synthetic construct
  source 1..20: mol_type = other RNA
acaaaccagttcttatttct

SEQ ID NO: 6345 - RNA, 20 nt, synthetic construct
  source 1..20: mol_type = other RNA
tttcctccacaaaccagttc

SEQ ID NO: 6346 - RNA, 20 nt, synthetic construct
  source 1..20: mol_type = other RNA
acaaatacgcatagaagtct

SEQ ID NO: 6347 - RNA, 20 nt, synthetic construct
  source 1..20: mol_type = other RNA
tccagtcgttggcctgacat

SEQ ID NO: 6348 - RNA, 20 nt, synthetic construct
  source 1..20: mol_type = other RNA
agtcgttggcctgacatgac

SEQ ID NO: 6349 - RNA, 20 nt, synthetic construct
  source 1..20: mol_type = other RNA
tggaaccatttcctgtgcac

SEQ ID NO: 6350 - RNA, 20 nt, synthetic construct
  source 1..20: mol_type = other RNA
gtaaatgttctttgccacac

SEQ ID NO: 6351 - RNA, 20 nt, synthetic construct
  source 1..20: mol_type = other RNA
tgtacttgctgtttctcagt

SEQ ID NO: 6352 - RNA, 20 nt, synthetic construct
  source 1..20: mol_type = other RNA
tctttattgagcttcctgtg

SEQ ID NO: 6353 - RNA, 20 nt, synthetic construct
  source 1..20: mol_type = other RNA
cttctttattgagcttcctg

SEQ ID NO: 6354 - RNA, 20 nt, synthetic construct
  source 1..20: mol_type = other RNA
ctcttctttattgagcttcc

SEQ ID NO: 6355 - RNA, 20 nt, synthetic construct
  source 1..20: mol_type = other RNA
ataaagaagagagagatcac

SEQ ID NO: 6356 - RNA, 20 nt, synthetic construct
  source 1..20: mol_type = other RNA
agtatcccagagtgctatgt

SEQ ID NO: 6357 - RNA, 20 nt, synthetic construct
  source 1..20: mol_type = other RNA
gggatactggagttcttccc

SEQ ID NO: 6358 - RNA, 20 nt, synthetic construct
  source 1..20: mol_type = other RNA
ggtctagctgggaagaactc

SEQ ID NO: 6359 - RNA, 20 nt, synthetic construct
  source 1..20: mol_type = other RNA
ctggtctagctgggaagaac

SEQ ID NO: 6360 - RNA, 20 nt, synthetic construct
  source 1..20: mol_type = other RNA
gtgaggactctctggtctag

SEQ ID NO: 6361 - RNA, 20 nt, synthetic construct
  source 1..20: mol_type = other RNA
cggagcacattgccaattca

SEQ ID NO: 6362 - RNA, 20 nt, synthetic construct
  source 1..20: mol_type = other RNA
actgaattggcaatgtgctc

SEQ ID NO: 6363 - RNA, 20 nt, synthetic construct
  source 1..20: mol_type = other RNA
caggcacttcattgattgga

SEQ ID NO: 6364 - RNA, 20 nt, synthetic construct
  source 1..20: mol_type = other RNA
cacaggcacttcattgattg

SEQ ID NO: 6365 - RNA, 20 nt, synthetic construct
  source 1..20: mol_type = other RNA
actctctttagaagtaaaca

SEQ ID NO: 6366 - RNA, 20 nt, synthetic construct
  source 1..20: mol_type = other RNA
ctttagaagtaaacaacaaa

SEQ ID NO: 6367 - RNA, 20 nt, synthetic construct
  source 1..20: mol_type = other RNA
ttagaagtaaacaacaaagt

SEQ ID NO: 6368 - RNA, 20 nt, synthetic construct
  source 1..20: mol_type = other RNA
gcggataccgcatagctgag

SEQ ID NO: 6369 - RNA, 20 nt, synthetic construct
  source 1..20: mol_type = other RNA
ctctgcggataccgcatagc

SEQ ID NO: 6370 - RNA, 20 nt, synthetic construct
  source 1..20: mol_type = other RNA
gctatgcggtatccgcagag

SEQ ID NO: 6371 - RNA, 20 nt, synthetic construct
  source 1..20: mol_type = other RNA
ttcctgagcctgtttgtatt

SEQ ID NO: 6372 - RNA, 20 nt, synthetic construct
  source 1..20: mol_type = other RNA
cattcctgagcctgtttgta

SEQ ID NO: 6373 - RNA, 20 nt, synthetic construct
  source 1..20: mol_type = other RNA
ggaatgagagaaatgattag

SEQ ID NO: 6374 - RNA, 20 nt, synthetic construct
  source 1..20: mol_type = other RNA
tgatatgatatctgctttct

SEQ ID NO: 6375 - RNA, 20 nt, synthetic construct
  source 1..20: mol_type = other RNA
ttaatttaatttggctattc

SEQ ID NO: 6376 - RNA, 20 nt, synthetic construct
  source 1..20: mol_type = other RNA
gaaacgtctaaattgatcag

SEQ ID NO: 6377 - RNA, 20 nt, synthetic construct
  source 1..20: mol_type = other RNA
agaattgtgtgttgggtaat

SEQ ID NO: 6378 - RNA, 20 nt, synthetic construct
  source 1..20: mol_type = other RNA
ttctgtaggttctctagaat

SEQ ID NO: 6379 - RNA, 20 nt, synthetic construct
  source 1..20: mol_type = other RNA
cacacacgcagaaactcaca

SEQ ID NO: 6380 - RNA, 20 nt, synthetic construct
  source 1..20: mol_type = other RNA
caagttctaacacacacaga

SEQ ID NO: 6381 - RNA, 20 nt, synthetic construct
  source 1..20: mol_type = other RNA
cttaattttatatttcactg

SEQ ID NO: 6382 - RNA, 20 nt, synthetic construct
  source 1..20: mol_type = other RNA
cagacatgtaggaaaatatg

SEQ ID NO: 6383 - RNA, 20 nt, synthetic construct
  source 1..20: mol_type = other RNA
ttactgtgacttgcttccca

SEQ ID NO: 6384 - RNA, 20 nt, synthetic construct
  source 1..20: mol_type = other RNA
cttgctctttactgtgactt

SEQ ID NO: 6385 - RNA, 20 nt, synthetic construct
  source 1..20: mol_type = other RNA
agggatcacatagggaattt

SEQ ID NO: 6386 - RNA, 20 nt, synthetic construct
  source 1..20: mol_type = other RNA
tgacaggtttcttcttatta

SEQ ID NO: 6387 - RNA, 20 nt, synthetic construct
  source 1..20: mol_type = other RNA
agtttctcgtgacaggtttc

SEQ ID NO: 6388 - RNA, 20 nt, synthetic construct
  source 1..20: mol_type = other RNA
ttttcctccagtttctcgtg

SEQ ID NO: 6389 - RNA, 20 nt, synthetic construct
  source 1..20: mol_type = other RNA
gaaacactggaagccagata

SEQ ID NO: 6390 - RNA, 20 nt, synthetic construct
  source 1..20: mol_type = other RNA
ttttgttcctgattatcatt

SEQ ID NO: 6391 - RNA, 20 nt, synthetic construct
  source 1..20: mol_type = other RNA
tgttacataagcctgctgat

SEQ ID NO: 6392 - RNA, 20 nt, synthetic construct
  source 1..20: mol_type = other RNA
cttgttacataagcctgctg

SEQ ID NO: 6393 - RNA, 20 nt, synthetic construct
  source 1..20: mol_type = other RNA
tttacaaagatatagaaatt

SEQ ID NO: 6394 - RNA, 20 nt, synthetic construct
  source 1..20: mol_type = other RNA
catttacaaagatatagaaa

SEQ ID NO: 6395 - RNA, 20 nt, synthetic construct
  source 1..20: mol_type = other RNA
acatatgctgaagttaaata

SEQ ID NO: 6396 - RNA, 20 nt, synthetic construct
  source 1..20: mol_type = other RNA
tgcacgatggtgtgtcatat

SEQ ID NO: 6397 - RNA, 20 nt, synthetic construct
  source 1..20: mol_type = other RNA
aggatttgcaatatcccttc

SEQ ID NO: 6398 - RNA, 20 nt, synthetic construct
  source 1..20: mol_type = other RNA
gagttcaaacctttgtgatt

SEQ ID NO: 6399 - RNA, 20 nt, synthetic construct
  source 1..20: mol_type = other RNA
gaggtttttggtataataag

SEQ ID NO: 6400 - RNA, 20 nt, synthetic construct
  source 1..20: mol_type = other RNA
tttgaatgcatggactattc

SEQ ID NO: 6401 - RNA, 20 nt, synthetic construct
  source 1..20: mol_type = other RNA
tgaaagacttctagttcttc

SEQ ID NO: 6402 - RNA, 20 nt, synthetic construct
  source 1..20: mol_type = other RNA
ggctcttatacatccagttg

SEQ ID NO: 6403 - RNA, 20 nt, synthetic construct
  source 1..20: mol_type = other RNA
tatacatccagttgctcatt

SEQ ID NO: 6404 - RNA, 20 nt, synthetic construct
  source 1..20: mol_type = other RNA
attccaggaagctggttcaa

SEQ ID NO: 6405 - RNA, 20 nt, synthetic construct
  source 1..20: mol_type = other RNA
ttgaaccagcttcctggaat

SEQ ID NO: 6406 - RNA, 20 nt, synthetic construct
  source 1..20: mol_type = other RNA
accccagaccctccattcca

SEQ ID NO: 6407 - RNA, 20 nt, synthetic construct
  source 1..20: mol_type = other RNA
agacttgtggcctagtctca

SEQ ID NO: 6408 - RNA, 20 nt, synthetic construct
  source 1..20: mol_type = other RNA
agagactctagacttgtggc

SEQ ID NO: 6409 - RNA, 20 nt, synthetic construct
  source 1..20: mol_type = other RNA
ctagagactctagacttgtg

SEQ ID NO: 6410 - RNA, 20 nt, synthetic construct
  source 1..20: mol_type = other RNA
agagagacagtgttggaacc

SEQ ID NO: 6411 - RNA, 20 nt, synthetic construct
  source 1..20: mol_type = other RNA
ggctgcctgagaaaatggga

SEQ ID NO: 6412 - RNA, 20 nt, synthetic construct
  source 1..20: mol_type = other RNA
ggcagccagaggtcatgaat

SEQ ID NO: 6413 - RNA, 20 nt, synthetic construct
  source 1..20: mol_type = other RNA
cattcatgacctctggctgc

SEQ ID NO: 6414 - RNA, 20 nt, synthetic construct
  source 1..20: mol_type = other RNA
cagtatcctcacattcatga

SEQ ID NO: 6415 - RNA, 20 nt, synthetic construct
  source 1..20: mol_type = other RNA
aacctcccagtatcctcaca

SEQ ID NO: 6416 - RNA, 20 nt, synthetic construct
  source 1..20: mol_type = other RNA
caagaacgttgctccaacct

SEQ ID NO: 6417 - RNA, 20 nt, synthetic construct
  source 1..20: mol_type = other RNA
tccttatgcctcccaagaac

SEQ ID NO: 6418 - RNA, 20 nt, synthetic construct
  source 1..20: mol_type = other RNA
cctgctttgccccctaatgc

SEQ ID NO: 6419 - RNA, 20 nt, synthetic construct
  source 1..20: mol_type = other RNA
gctgctccgtagctgtccga

SEQ ID NO: 6420 - RNA, 20 nt, synthetic construct
  source 1..20: mol_type = other RNA
gtagctgtccgacctcttca

SEQ ID NO: 6421 - RNA, 20 nt, synthetic construct
  source 1..20: mol_type = other RNA
tcagatctcttagtccaccc

SEQ ID NO: 6422 - RNA, 20 nt, synthetic construct
  source 1..20: mol_type = other RNA
tagtccaccctgccgtcttc

SEQ ID NO: 6423 - RNA, 20 nt, synthetic construct
  source 1..20: mol_type = other RNA
gggactgagggaaaggggga

SEQ ID NO: 6424 - RNA, 20 nt, synthetic construct
  source 1..20: mol_type = other RNA
tccccctttccctcagtccc

SEQ ID NO: 6425 - RNA, 20 nt, synthetic construct
  source 1..20: mol_type = other RNA
gtcccggagtagctgcggcc

SEQ ID NO: 6426 - RNA, 20 nt, synthetic construct
  source 1..20: mol_type = other RNA
gctggccgcagctactccgg

SEQ ID NO: 6427 - RNA, 20 nt, synthetic construct
  source 1..20: mol_type = other RNA
gtctaccctctgctggccgc

SEQ ID NO: 6428 - RNA, 20 nt, synthetic construct
  source 1..20: mol_type = other RNA
cagtctaccctctgctggcc

SEQ ID NO: 6429 - RNA, 20 nt, synthetic construct
  source 1..20: mol_type = other RNA
tgctctcagtctaccctctg

SEQ ID NO: 6430 - RNA, 20 nt, synthetic construct
  source 1..20: mol_type = other RNA
cctgctctcagtctaccctc

SEQ ID NO: 6431 - RNA, 20 nt, synthetic construct
  source 1..20: mol_type = other RNA
agaaggggttcctaggcagg

SEQ ID NO: 6432 - RNA, 20 nt, synthetic construct
  source 1..20: mol_type = other RNA
caggcaggatgcagtatctc

SEQ ID NO: 6433 - RNA, 20 nt, synthetic construct
  source 1..20: mol_type = other RNA
aagctgccctggaaaacttg

SEQ ID NO: 6434 - RNA, 20 nt, synthetic construct
  source 1..20: mol_type = other RNA
aagacttctcaaagctgccc

SEQ ID NO: 6435 - RNA, 20 nt, synthetic construct
  source 1..20: mol_type = other RNA
acctttcccacagaaaagca

SEQ ID NO: 6436 - RNA, 20 nt, synthetic construct
  source 1..20: mol_type = other RNA
atacgtagtgaaaaggctct

SEQ ID NO: 6437 - RNA, 20 nt, synthetic construct
  source 1..20: mol_type = other RNA
atgtactcaatacgtagtga

SEQ ID NO: 6438 - RNA, 20 nt, synthetic construct
  source 1..20: mol_type = other RNA
cactctatgtactcaatacg

SEQ ID NO: 6439 - RNA, 20 nt, synthetic construct
  source 1..20: mol_type = other RNA
tggatgacgtgtgttttctg

SEQ ID NO: 6440 - RNA, 20 nt, synthetic construct
  source 1..20: mol_type = other RNA
cacattagaatatgaagtcc

SEQ ID NO: 6441 - RNA, 20 nt, synthetic construct
  source 1..20: mol_type = other RNA
gtaggacttcatattctaat

SEQ ID NO: 6442 - RNA, 20 nt, synthetic construct
  source 1..20: mol_type = other RNA
cggtaggacttcatattcta

SEQ ID NO: 6443 - RNA, 20 nt, synthetic construct
  source 1..20: mol_type = other RNA
ctcggtaggacttcatattc

SEQ ID NO: 6444 - RNA, 20 nt, synthetic construct
  source 1..20: mol_type = other RNA
gtatctctctcggtaggact

SEQ ID NO: 6445 - RNA, 20 nt, synthetic construct
  source 1..20: mol_type = other RNA
ggaataactggtatgggttt

SEQ ID NO: 6446 - RNA, 20 nt, synthetic construct
  source 1..20: mol_type = other RNA
ctggaataactggtatgggt

SEQ ID NO: 6447 - RNA, 20 nt, synthetic construct
  source 1..20: mol_type = other RNA
tacccaatccatctctctgg

SEQ ID NO: 6448 - RNA, 20 nt, synthetic construct
  source 1..20: mol_type = other RNA
ttctgcctcctacccaatcc

SEQ ID NO: 6449 - RNA, 20 nt, synthetic construct
  source 1..20: mol_type = other RNA
gatcgtttttcggccacgtg

SEQ ID NO: 6450 - RNA, 20 nt, synthetic construct
  source 1..20: mol_type = other RNA
gtgtttctaagaagcgtttg

SEQ ID NO: 6451 - RNA, 20 nt, synthetic construct
  source 1..20: mol_type = other RNA
tacttaatagattattacta

SEQ ID NO: 6452 - RNA, 20 nt, synthetic construct
  source 1..20: mol_type = other RNA
catacttaatagattattac

SEQ ID NO: 6453 - RNA, 20 nt, synthetic construct
  source 1..20: mol_type = other RNA
gcacatctctcatacttaat

SEQ ID NO: 6454 - RNA, 20 nt, synthetic construct
  source 1..20: mol_type = other RNA
ctgcacatctctcatactta

SEQ ID NO: 6455 - RNA, 20 nt, synthetic construct
  source 1..20: mol_type = other RNA
atcactaatcctctctgcac

SEQ ID NO: 6456 - RNA, 20 nt, synthetic construct
  source 1..20: mol_type = other RNA
cgatcactaatcctctctgc

SEQ ID NO: 6457 - RNA, 20 nt, synthetic construct
  source 1..20: mol_type = other RNA
tttgtgctgcaacaaggtca

SEQ ID NO: 6458 - RNA, 20 nt, synthetic construct
  source 1..20: mol_type = other RNA
cctttgtgctgcaacaaggt

SEQ ID NO: 6459 - RNA, 20 nt, synthetic construct
  source 1..20: mol_type = other RNA
ctcctttgtgctgcaacaag

SEQ ID NO: 6460 - RNA, 20 nt, synthetic construct
  source 1..20: mol_type = other RNA
tgtgacgtgtatcgttttgg

SEQ ID NO: 6461 - RNA, 20 nt, synthetic construct
  source 1..20: mol_type = other RNA
tataacaataaggagctgcc

SEQ ID NO: 6462 - RNA, 20 nt, synthetic construct
  source 1..20: mol_type = other RNA
ttattgttatacgagggatc

SEQ ID NO: 6463 - RNA, 20 nt, synthetic construct
  source 1..20: mol_type = other RNA
cacctgacaccgggatccct

SEQ ID NO: 6464 - RNA, 20 nt, synthetic construct
  source 1..20: mol_type = other RNA
gacgcagaagggactgccgt

SEQ ID NO: 6465 - RNA, 20 nt, synthetic construct
  source 1..20: mol_type = other RNA
gactgttaccccggttccaa

SEQ ID NO: 6466 - RNA, 20 nt, synthetic construct
  source 1..20: mol_type = other RNA
aggcttggaaccggggtaac

SEQ ID NO: 6467 - RNA, 20 nt, synthetic construct
  source 1..20: mol_type = other RNA
ttaccttgttcggaaggagc

SEQ ID NO: 6468 - RNA, 20 nt, synthetic construct
  source 1..20: mol_type = other RNA
ttccgaacaaggtaaggagt

SEQ ID NO: 6469 - RNA, 20 nt, synthetic construct
  source 1..20: mol_type = other RNA
agcatccgtttaccattgaa

SEQ ID NO: 6470 - RNA, 20 nt, synthetic construct
  source 1..20: mol_type = other RNA
ggcaacactcgagcatccgt

SEQ ID NO: 6471 - RNA, 20 nt, synthetic construct
  source 1..20: mol_type = other RNA
agtgttgccggagttctgcc

SEQ ID NO: 6472 - RNA, 20 nt, synthetic construct
  source 1..20: mol_type = other RNA
cccagagagtacacggaggc

SEQ ID NO: 6473 - RNA, 20 nt, synthetic construct
  source 1..20: mol_type = other RNA
gtgtactctctgggggagcc

SEQ ID NO: 6474 - RNA, 20 nt, synthetic construct
  source 1..20: mol_type = other RNA
gctggctcccccagagagta

SEQ ID NO: 6475 - RNA, 20 nt, synthetic construct
  source 1..20: mol_type = other RNA
ctgggggagccagcggagtg

SEQ ID NO: 6476 - RNA, 20 nt, synthetic construct
  source 1..20: mol_type = other RNA
gggggagccagcggagtgat

SEQ ID NO: 6477 - RNA, 20 nt, synthetic construct
  source 1..20: mol_type = other RNA
cctccttctaaaatgggcta

SEQ ID NO: 6478 - RNA, 20 nt, synthetic construct
  source 1..20: mol_type = other RNA
ttctaaaatgggctatctca

SEQ ID NO: 6479 - RNA, 20 nt, synthetic construct
  source 1..20: mol_type = other RNA
gtgtcttagccaaaattttt

SEQ ID NO: 6480 - RNA, 20 nt, synthetic construct
  source 1..20: mol_type = other RNA
agagccacattttttgaaat

SEQ ID NO: 6481 - RNA, 20 nt, synthetic construct
  source 1..20: mol_type = other RNA
aggatgacaggctccagagc

SEQ ID NO: 6482 - RNA, 20 nt, synthetic construct
  source 1..20: mol_type = other RNA
ggagcctgtcatcctcgaga

SEQ ID NO: 6483 - RNA, 20 nt, synthetic construct
  source 1..20: mol_type = other RNA
agaaacctaacagggctgca

SEQ ID NO: 6484 - RNA, 20 nt, synthetic construct
  source 1..20: mol_type = other RNA
atagacccaggaccatatgg

SEQ ID NO: 6485 - RNA, 20 nt, synthetic construct
  source 1..20: mol_type = other RNA
tatactgctccatagaccca

SEQ ID NO: 6486 - RNA, 20 nt, synthetic construct
  source 1..20: mol_type = other RNA
caatgctctaaggctcttca

SEQ ID NO: 6487 - RNA, 20 nt, synthetic construct
  source 1..20: mol_type = other RNA
aaggctcttcagtcctaggc

SEQ ID NO: 6488 - RNA, 20 nt, synthetic construct
  source 1..20: mol_type = other RNA
cttcaaagcctaggactgaa

SEQ ID NO: 6489 - RNA, 20 nt, synthetic construct
  source 1..20: mol_type = other RNA
tcagtcctaggctttgaagg

SEQ ID NO: 6490 - RNA, 20 nt, synthetic construct
  source 1..20: mol_type = other RNA
gtgttcttaaacctctttct

SEQ ID NO: 6491 - RNA, 20 nt, synthetic construct
  source 1..20: mol_type = other RNA
ttctgatggcacttgtacct

SEQ ID NO: 6492 - RNA, 20 nt, synthetic construct
  source 1..20: mol_type = other RNA
caggtacaagtgccatcaga

SEQ ID NO: 6493 - RNA, 20 nt, synthetic construct
  source 1..20: mol_type = other RNA
agacccctcacaggtacaag

SEQ ID NO: 6494 - RNA, 20 nt, synthetic construct
  source 1..20: mol_type = other RNA
ctagacccctcacaggtaca

SEQ ID NO: 6495 - RNA, 20 nt, synthetic construct
  source 1..20: mol_type = other RNA
tttactgcaattcaggatgc

SEQ ID NO: 6496 - RNA, 20 nt, synthetic construct
  source 1..20: mol_type = other RNA
tgccctgcatcctgaattgc

SEQ ID NO: 6497 - RNA, 20 nt, synthetic construct
  source 1..20: mol_type = other RNA
ctcctccaagggaagaaggt

SEQ ID NO: 6498 - RNA, 20 nt, synthetic construct
  source 1..20: mol_type = other RNA
tccaagggaagaaggttttg

SEQ ID NO: 6499 - RNA, 20 nt, synthetic construct
  source 1..20: mol_type = other RNA
aagggaagaaggttttggcg

SEQ ID NO: 6500 - RNA, 20 nt, synthetic construct
  source 1..20: mol_type = other RNA
aggatgtgtgcacgccaaaa

SEQ ID NO: 6501 - RNA, 20 nt, synthetic construct
  source 1..20: mol_type = other RNA
ggcttccaggccatggggca

SEQ ID NO: 6502 - RNA, 20 nt, synthetic construct
  source 1..20: mol_type = other RNA
tctgccctcgacagccaatt

SEQ ID NO: 6503 - RNA, 20 nt, synthetic construct
  source 1..20: mol_type = other RNA
gccctcgacagccaattacc

SEQ ID NO: 6504 - RNA, 20 nt, synthetic construct
  source 1..20: mol_type = other RNA
acagccaattaccacctgca

SEQ ID NO: 6505 - RNA, 20 nt, synthetic construct
  source 1..20: mol_type = other RNA
actgaatgttcatacaaagg

SEQ ID NO: 6506 - RNA, 20 nt, synthetic construct
  source 1..20: mol_type = other RNA
cgaagtagcacctttctatg

SEQ ID NO: 6507 - RNA, 20 nt, synthetic construct
  source 1..20: mol_type = other RNA
ctgcaaagtgcgctcacgaa

SEQ ID NO: 6508 - RNA, 20 nt, synthetic construct
  source 1..20: mol_type = other RNA
ttctcactgcaaagtgcgct

SEQ ID NO: 6509 - RNA, 20 nt, synthetic construct
  source 1..20: mol_type = other RNA
catccatctgcctacaggta

SEQ ID NO: 6510 - RNA, 20 nt, synthetic construct
  source 1..20: mol_type = other RNA
tagactcctttctggttgtg

SEQ ID NO: 6511 - RNA, 20 nt, synthetic construct
  source 1..20: mol_type = other RNA
tttctggttgtgtcataaat

SEQ ID NO: 6512 - RNA, 20 nt, synthetic construct
  source 1..20: mol_type = other RNA
gagaataacgaaatatgtga

SEQ ID NO: 6513 - RNA, 20 nt, synthetic construct
  source 1..20: mol_type = other RNA
gagatactcagtttatttct

SEQ ID NO: 6514 - RNA, 20 nt, synthetic construct
  source 1..20: mol_type = other RNA
gtttatttcttgtgttttca

SEQ ID NO: 6515 - RNA, 20 nt, synthetic construct
  source 1..20: mol_type = other RNA
gtcggtgctgaaatgaaaac

SEQ ID NO: 6516 - RNA, 20 nt, synthetic construct
  source 1..20: mol_type = other RNA
gctcagtcggtgctgaaatg

SEQ ID NO: 6517 - RNA, 20 nt, synthetic construct
  source 1..20: mol_type = other RNA
tgcaccccaggcctctgctc

SEQ ID NO: 6518 - RNA, 20 nt, synthetic construct
  source 1..20: mol_type = other RNA
gtccattaccgtggtagcac

SEQ ID NO: 6519 - RNA, 20 nt, synthetic construct
  source 1..20: mol_type = other RNA
ataactctgtccattaccgt

SEQ ID NO: 6520 - RNA, 20 nt, synthetic construct
  source 1..20: mol_type = other RNA
accactgtcactggaagaac

SEQ ID NO: 6521 - RNA, 20 nt, synthetic construct
  source 1..20: mol_type = other RNA
catagtcggaccccagaata

SEQ ID NO: 6522 - RNA, 20 nt, synthetic construct
  source 1..20: mol_type = other RNA
tatggtaaagaacaaagaca

SEQ ID NO: 6523 - RNA, 20 nt, synthetic construct
  source 1..20: mol_type = other RNA
tgtaacagaaacttcacttg

SEQ ID NO: 6524 - RNA, 20 nt, synthetic construct
  source 1..20: mol_type = other RNA
gcttgagacacatctcttgt

SEQ ID NO: 6525 - RNA, 20 nt, synthetic construct
  source 1..20: mol_type = other RNA
agctgagttctccgaactca

SEQ ID NO: 6526 - RNA, 20 nt, synthetic construct
  source 1..20: mol_type = other RNA
gaactcaacttgtgacagat

SEQ ID NO: 6527 - RNA, 20 nt, synthetic construct
  source 1..20: mol_type = other RNA
acttgtgacagatgcagatg

SEQ ID NO: 6528 - RNA, 20 nt, synthetic construct
  source 1..20: mol_type = other RNA
aaggcaatcatcctgagaca

SEQ ID NO: 6529 - RNA, 20 nt, synthetic construct
  source 1..20: mol_type = other RNA
ggatgattgccttggagcta

SEQ ID NO: 6530 - RNA, 20 nt, synthetic construct
  source 1..20: mol_type = other RNA
gacccttagctccaaggcaa

SEQ ID NO: 6531 - RNA, 20 nt, synthetic construct
  source 1..20: mol_type = other RNA
cagacccttagctccaaggc

SEQ ID NO: 6532 - RNA, 20 nt, synthetic construct
  source 1..20: mol_type = other RNA
ctctccttcctcctagttct

SEQ ID NO: 6533 - RNA, 20 nt, synthetic construct
  source 1..20: mol_type = other RNA
atagaactaggaggaaggag

SEQ ID NO: 6534 - RNA, 20 nt, synthetic construct
  source 1..20: mol_type = other RNA
ccttcctcctagttctattg

SEQ ID NO: 6535 - RNA, 20 nt, synthetic construct
  source 1..20: mol_type = other RNA
ttcctcctagttctattgag

SEQ ID NO: 6536 - RNA, 20 nt, synthetic construct
  source 1..20: mol_type = other RNA
tagttctattgagcagaagg

SEQ ID NO: 6537 - RNA, 20 nt, synthetic construct
  source 1..20: mol_type = other RNA
agatttcccttctgctcaat

SEQ ID NO: 6538 - RNA, 20 nt, synthetic construct
  source 1..20: mol_type = other RNA
cctccagatttcccttctgc

SEQ ID NO: 6539 - RNA, 20 nt, synthetic construct
  source 1..20: mol_type = other RNA
tcacctccagatttcccttc

SEQ ID NO: 6540 - RNA, 20 nt, synthetic construct
  source 1..20: mol_type = other RNA
attgacgtttagttggtgtt

SEQ ID NO: 6541 - RNA, 20 nt, synthetic construct
  source 1..20: mol_type = other RNA
tgaacccagagagaaaaggc

SEQ ID NO: 6542 - RNA, 20 nt, synthetic construct
  source 1..20: mol_type = other RNA
ctgggttcaagaggaaagaa

SEQ ID NO: 6543 - RNA, 20 nt, synthetic construct
  source 1..20: mol_type = other RNA
gggttcaagaggaaagaata

SEQ ID NO: 6544 - RNA, 20 nt, synthetic construct
  source 1..20: mol_type = other RNA
ttcctaagtaccagtggcct

SEQ ID NO: 6545 - RNA, 20 nt, synthetic construct
  source 1..20: mol_type = other RNA
tgctgggaacctgtatccct

SEQ ID NO: 6546 - RNA, 20 nt, synthetic construct
  source 1..20: mol_type = other RNA
tctgccttccttccttggat

SEQ ID NO: 6547 - RNA, 20 nt, synthetic construct
  source 1..20: mol_type = other RNA
catctgccttccttccttgg

SEQ ID NO: 6548 - RNA, 20 nt, synthetic construct
  source 1..20: mol_type = other RNA
gtgctggctctcatctgcct

SEQ ID NO: 6549 - RNA, 20 nt, synthetic construct
  source 1..20: mol_type = other RNA
ctgtgctggctctcatctgc

SEQ ID NO: 6550 - RNA, 20 nt, synthetic construct
  source 1..20: mol_type = other RNA
atccacccatcccttttact

SEQ ID NO: 6551 - RNA, 20 nt, synthetic construct
  source 1..20: mol_type = other RNA
ccatccacccatccctttta

SEQ ID NO: 6552 - RNA, 20 nt, synthetic construct
  source 1..20: mol_type = other RNA
ggtagtcgcttgtggccaaa

SEQ ID NO: 6553 - RNA, 20 nt, synthetic construct
  source 1..20: mol_type = other RNA
accatctgttgtcccacatg

SEQ ID NO: 6554 - RNA, 20 nt, synthetic construct
  source 1..20: mol_type = other RNA
aggtcctctaccatctgttg

SEQ ID NO: 6555 - RNA, 20 nt, synthetic construct
  source 1..20: mol_type = other RNA
attctctaggtcctctacca

SEQ ID NO: 6556 - RNA, 20 nt, synthetic construct
  source 1..20: mol_type = other RNA
caattctctaggtcctctac

SEQ ID NO: 6557 - RNA, 20 nt, synthetic construct
  source 1..20: mol_type = other RNA
ctcaattctctaggtcctct

SEQ ID NO: 6558 - RNA, 20 nt, synthetic construct
  source 1..20: mol_type = other RNA
actccgcagatgccttggct

SEQ ID NO: 6559 - RNA, 20 nt, synthetic construct
  source 1..20: mol_type = other RNA
gcagatgccttggctttctt

SEQ ID NO: 6560 - RNA, 20 nt, synthetic construct
  source 1..20: mol_type = other RNA
ttgctattcagtgcaggaag

SEQ ID NO: 6561 - RNA, 20 nt, synthetic construct
  source 1..20: mol_type = other RNA
atctccttgctattcagtgc

SEQ ID NO: 6562 - RNA, 20 nt, synthetic construct
  source 1..20: mol_type = other RNA
attcagcaagatggctacag

SEQ ID NO: 6563 - RNA, 20 nt, synthetic construct
  source 1..20: mol_type = other RNA
tccattcagcaagatggcta

SEQ ID NO: 6564 - RNA, 20 nt, synthetic construct
  source 1..20: mol_type = other RNA
cctccattcagcaagatggc

SEQ ID NO: 6565 - RNA, 20 nt, synthetic construct
  source 1..20: mol_type = other RNA
aatccctctcctccattcag

SEQ ID NO: 6566 - RNA, 20 nt, synthetic construct
  source 1..20: mol_type = other RNA
acaaaccagttcttatttct

SEQ ID NO: 6567 - RNA, 20 nt, synthetic construct
  source 1..20: mol_type = other RNA
tttcctccacaaaccagttc

SEQ ID NO: 6568 - RNA, 20 nt, synthetic construct
  source 1..20: mol_type = other RNA
acaaatacgcatagaagtct

SEQ ID NO: 6569 - RNA, 20 nt, synthetic construct
  source 1..20: mol_type = other RNA
tccagtcgttggcctgacat

SEQ ID NO: 6570 - RNA, 20 nt, synthetic construct
  source 1..20: mol_type = other RNA
agtcgttggcctgacatgac

SEQ ID NO: 6571 - RNA, 20 nt, synthetic construct
  source 1..20: mol_type = other RNA
tggaaccatttcctgtgcac

SEQ ID NO: 6572 - RNA, 20 nt, synthetic construct
  source 1..20: mol_type = other RNA
gtaaatgttctttgccacac

SEQ ID NO: 6573 - RNA, 20 nt, synthetic construct
  source 1..20: mol_type = other RNA
tgtacttgctgtttctcagt

SEQ ID NO: 6574 - RNA, 20 nt, synthetic construct
  source 1..20: mol_type = other RNA
tctttattgagcttcctgtg

SEQ ID NO: 6575 - RNA, 20 nt, synthetic construct
  source 1..20: mol_type = other RNA
cttctttattgagcttcctg

SEQ ID NO: 6576 - RNA, 20 nt, synthetic construct
  source 1..20: mol_type = other RNA
ctcttctttattgagcttcc

SEQ ID NO: 6577 - RNA, 20 nt, synthetic construct
  source 1..20: mol_type = other RNA
ataaagaagagagagatcac

SEQ ID NO: 6578 - RNA, 20 nt, synthetic construct
  source 1..20: mol_type = other RNA
agtatcccagagtgctatgt

SEQ ID NO: 6579 - RNA, 20 nt, synthetic construct
  source 1..20: mol_type = other RNA
gggatactggagttcttccc

SEQ ID NO: 6580 - RNA, 20 nt, synthetic construct
  source 1..20: mol_type = other RNA
ggtctagctgggaagaactc

SEQ ID NO: 6581 - RNA, 20 nt, synthetic construct
  source 1..20: mol_type = other RNA
ctggtctagctgggaagaac

SEQ ID NO: 6582 - RNA, 20 nt, synthetic construct
  source 1..20: mol_type = other RNA
gtgaggactctctggtctag

SEQ ID NO: 6583 - RNA, 20 nt, synthetic construct
  source 1..20: mol_type = other RNA
cggagcacattgccaattca

SEQ ID NO: 6584 - RNA, 20 nt, synthetic construct
  source 1..20: mol_type = other RNA
actgaattggcaatgtgctc

SEQ ID NO: 6585 - RNA, 20 nt, synthetic construct
  source 1..20: mol_type = other RNA
cacaggcacttcattgattg

SEQ ID NO: 6586 - RNA, 20 nt, synthetic construct
  source 1..20: mol_type = other RNA
actctctttagaagtaaaca

SEQ ID NO: 6587 - RNA, 20 nt, synthetic construct
  source 1..20: mol_type = other RNA
ctttagaagtaaacaacaaa

SEQ ID NO: 6588 - RNA, 20 nt, synthetic construct
  source 1..20: mol_type = other RNA
ttagaagtaaacaacaaagt

SEQ ID NO: 6589 - RNA, 20 nt, synthetic construct
  source 1..20: mol_type = other RNA
gcggataccgcatagctgag

SEQ ID NO: 6590 - RNA, 20 nt, synthetic construct
  source 1..20: mol_type = other RNA
ctctgcggataccgcatagc

SEQ ID NO: 6591 - RNA, 20 nt, synthetic construct
  source 1..20: mol_type = other RNA
gctatgcggtatccgcagag

SEQ ID NO: 6592 - RNA, 20 nt, synthetic construct
  source 1..20: mol_type = other RNA
ttcctgagcctgtttgtatt

SEQ ID NO: 6593 - RNA, 20 nt, synthetic construct
  source 1..20: mol_type = other RNA
cattcctgagcctgtttgta

SEQ ID NO: 6594 - RNA, 20 nt, synthetic construct
  source 1..20: mol_type = other RNA
ggaatgagagaaatgattag

SEQ ID NO: 6595 - RNA, 20 nt, synthetic construct
  source 1..20: mol_type = other RNA
tgatatgatatctgctttct

SEQ ID NO: 6596 - RNA, 20 nt, synthetic construct
  source 1..20: mol_type = other RNA
ttaatttaatttggctattc

SEQ ID NO: 6597 - RNA, 20 nt, synthetic construct
  source 1..20: mol_type = other RNA
gaaacgtctaatttgatcag

SEQ ID NO: 6598 - RNA, 20 nt, synthetic construct
  source 1..20: mol_type = other RNA
agaattgtgtgttgggtaat

SEQ ID NO: 6599 - RNA, 20 nt, synthetic construct
  source 1..20: mol_type = other RNA
ttctgtaggttctctagaat

SEQ ID NO: 6600 - RNA, 20 nt, synthetic construct
  source 1..20: mol_type = other RNA
cacacacgcagaaactcaca

SEQ ID NO: 6601 - RNA, 20 nt, synthetic construct
  source 1..20: mol_type = other RNA
caagttctaacacacacaga

SEQ ID NO: 6602 - RNA, 20 nt, synthetic construct
  source 1..20: mol_type = other RNA
cttaattttatatttcactg

SEQ ID NO: 6603 - RNA, 20 nt, synthetic construct
  source 1..20: mol_type = other RNA
cagacatgtaggaaaatatg

SEQ ID NO: 6604 - RNA, 20 nt, synthetic construct
  source 1..20: mol_type = other RNA
ttactgtgacttgcttccca

SEQ ID NO: 6605 - RNA, 20 nt, synthetic construct
  source 1..20: mol_type = other RNA
cttgctctttactgtgactt

SEQ ID NO: 6606 - RNA, 20 nt, synthetic construct
  source 1..20: mol_type = other RNA
agggatcatatagggaattt

SEQ ID NO: 6607 - RNA, 20 nt, synthetic construct
  source 1..20: mol_type = other RNA
tgacaggtttcttcttatta

SEQ ID NO: 6608 - RNA, 20 nt, synthetic construct
  source 1..20: mol_type = other RNA
agtttctcgtgacaggtttc

SEQ ID NO: 6609 - RNA, 20 nt, synthetic construct
  source 1..20: mol_type = other RNA
ttttcctccagtttctcgtg

SEQ ID NO: 6610 - RNA, 20 nt, synthetic construct
  source 1..20: mol_type = other RNA
gaaacactggaagccagata

SEQ ID NO: 6611 - RNA, 20 nt, synthetic construct
  source 1..20: mol_type = other RNA
ttttgttcctgattatcatt

SEQ ID NO: 6612 - RNA, 20 nt, synthetic construct
  source 1..20: mol_type = other RNA
tgttacataagcctgctgat

SEQ ID NO: 6613 - RNA, 20 nt, synthetic construct
  source 1..20: mol_type = other RNA
cttgttacataagcctgctg

SEQ ID NO: 6614 - RNA, 20 nt, synthetic construct
  source 1..20: mol_type = other RNA
tttacaaagatatagaaatt

SEQ ID NO: 6615 - RNA, 20 nt, synthetic construct
  source 1..20: mol_type = other RNA
catttacaaagatatagaaa

SEQ ID NO: 6616 - RNA, 20 nt, synthetic construct
  source 1..20: mol_type = other RNA
acatatgctgaagttaaata

SEQ ID NO: 6617 - RNA, 20 nt, synthetic construct
  source 1..20: mol_type = other RNA
tgcacgatggtgtgtcatat

SEQ ID NO: 6618 - RNA, 20 nt, synthetic construct
  source 1..20: mol_type = other RNA
aggatttgcaatatcccttc

SEQ ID NO: 6619 - RNA, 20 nt, synthetic construct
  source 1..20: mol_type = other RNA
gagttcaaacctttgtgatt

SEQ ID NO: 6620 - RNA, 20 nt, synthetic construct
  source 1..20: mol_type = other RNA
gaggtttttggtataataag

SEQ ID NO: 6621 - RNA, 20 nt, synthetic construct
  source 1..20: mol_type = other RNA
tttgaatgcatggactattc

SEQ ID NO: 6622 - RNA, 20 nt, synthetic construct
  source 1..20: mol_type = other RNA
tgaaagacttctagttcttc

SEQ ID NO: 6623 - RNA, 20 nt, synthetic construct
  source 1..20: mol_type = other RNA
ggctcttatacatccagttg

SEQ ID NO: 6624 - RNA, 20 nt, synthetic construct
  source 1..20: mol_type = other RNA
tatacatccagttgctcatt

SEQ ID NO: 6625 - RNA, 20 nt, synthetic construct
  source 1..20: mol_type = other RNA
attccaggaagctggttcaa

SEQ ID NO: 6626 - RNA, 20 nt, synthetic construct
  source 1..20: mol_type = other RNA
ttgaaccagcttcctggaat

SEQ ID NO: 6627 - RNA, 20 nt, synthetic construct
  source 1..20: mol_type = other RNA
accccagaccctccattcca

SEQ ID NO: 6628 - RNA, 20 nt, synthetic construct
  source 1..20: mol_type = other RNA
agacttgtggcctagtctca

SEQ ID NO: 6629 - RNA, 20 nt, synthetic construct
  source 1..20: mol_type = other RNA
agagactctagacttgtggc

SEQ ID NO: 6630 - RNA, 20 nt, synthetic construct
  source 1..20: mol_type = other RNA
ctagagactctagacttgtg

SEQ ID NO: 6631 - RNA, 20 nt, synthetic construct
  source 1..20: mol_type = other RNA
agagagacagtgttggaacc

SEQ ID NO: 6632 - RNA, 20 nt, synthetic construct
  source 1..20: mol_type = other RNA
ggctgcctgagaaaatggga

SEQ ID NO: 6633 - RNA, 20 nt, synthetic construct
  source 1..20: mol_type = other RNA
ggcagccagaggtcatgaat

SEQ ID NO: 6634 - RNA, 20 nt, synthetic construct
  source 1..20: mol_type = other RNA
cattcatgacctctggctgc

SEQ ID NO: 6635 - RNA, 20 nt, synthetic construct
  source 1..20: mol_type = other RNA
cagtatcctcacattcatga

SEQ ID NO: 6636 - RNA, 20 nt, synthetic construct
  source 1..20: mol_type = other RNA
aacctcccagtatcctcaca

SEQ ID NO: 6637 - RNA, 20 nt, synthetic construct
  source 1..20: mol_type = other RNA
caagaacgttgctccaacct

SEQ ID NO: 6638 - RNA, 20 nt, synthetic construct
  source 1..20: mol_type = other RNA
tccttatgcctcccaagaac

SEQ ID NO: 6639 - RNA, 20 nt, synthetic construct
  source 1..20: mol_type = other RNA
cctgctttgccccctaatgc

SEQ ID NO: 6640 - RNA, 20 nt, synthetic construct
  source 1..20: mol_type = other RNA
gctgctccgtagctgtccga

SEQ ID NO: 6641 - RNA, 20 nt, synthetic construct
  source 1..20: mol_type = other RNA
gtagctgtccgacctcttca

SEQ ID NO: 6642 - RNA, 20 nt, synthetic construct
  source 1..20: mol_type = other RNA
tcagatctcttagtccaccc

SEQ ID NO: 6643 - RNA, 20 nt, synthetic construct
  source 1..20: mol_type = other RNA
tagtccaccctgccgtcttc

SEQ ID NO: 6644 - RNA, 20 nt, synthetic construct
  source 1..20: mol_type = other RNA
gggactgagggaaaggggga

SEQ ID NO: 6645 - RNA, 20 nt, synthetic construct
  source 1..20: mol_type = other RNA
tccccctttccctcagtccc

SEQ ID NO: 6646 - RNA, 20 nt, synthetic construct
  source 1..20: mol_type = other RNA
gtcccggagtagctgcggcc

SEQ ID NO: 6647 - RNA, 20 nt, synthetic construct
  source 1..20: mol_type = other RNA
gctggccgcagctactccgg

SEQ ID NO: 6648 - RNA, 20 nt, synthetic construct
  source 1..20: mol_type = other RNA
gtctaccctctgctggccgc

SEQ ID NO: 6649 - RNA, 20 nt, synthetic construct
  source 1..20: mol_type = other RNA
cagtctaccctctgctggcc

SEQ ID NO: 6650 - RNA, 20 nt, synthetic construct
  source 1..20: mol_type = other RNA
tgctctcagtctaccctctg

SEQ ID NO: 6651 - RNA, 20 nt, synthetic construct
  source 1..20: mol_type = other RNA
cctgctctcagtctaccctc

SEQ ID NO: 6652 - RNA, 20 nt, synthetic construct
  source 1..20: mol_type = other RNA
agaaggggttcctaggcagg

SEQ ID NO: 6653 - RNA, 20 nt, synthetic construct
  source 1..20: mol_type = other RNA
caggcaggatgcagtatctc

SEQ ID NO: 6654 - RNA, 20 nt, synthetic construct
  source 1..20: mol_type = other RNA
aagctgccctggaaaacttg

SEQ ID NO: 6655 - RNA, 20 nt, synthetic construct
  source 1..20: mol_type = other RNA
aagacttctcaaagctgccc

SEQ ID NO: 6656 - RNA, 20 nt, synthetic construct
  source 1..20: mol_type = other RNA
acctttcccacagaaaagca

SEQ ID NO: 6657 - RNA, 20 nt, synthetic construct
  source 1..20: mol_type = other RNA
atacgtagtgaaaaggctct

SEQ ID NO: 6658 - RNA, 20 nt, synthetic construct
  source 1..20: mol_type = other RNA
atgtactcaatacgtagtga

SEQ ID NO: 6659 - RNA, 20 nt, synthetic construct
  source 1..20: mol_type = other RNA
cactctatgtactcaatacg

SEQ ID NO: 6660 - RNA, 20 nt, synthetic construct
  source 1..20: mol_type = other RNA
tggatgacgtgcgttttctg

SEQ ID NO: 6661 - RNA, 20 nt, synthetic construct
  source 1..20: mol_type = other RNA
cacattagaatatgaagtcc

SEQ ID NO: 6662 - RNA, 20 nt, synthetic construct
  source 1..20: mol_type = other RNA
gtaggacttcatattctaat

SEQ ID NO: 6663 - RNA, 20 nt, synthetic construct
  source 1..20: mol_type = other RNA
cggtaggacttcatattcta

SEQ ID NO: 6664 - RNA, 20 nt, synthetic construct
  source 1..20: mol_type = other RNA
ctcggtaggacttcatattc

SEQ ID NO: 6665 - RNA, 20 nt, synthetic construct
  source 1..20: mol_type = other RNA
gtatctctctcggtaggact

SEQ ID NO: 6666 - RNA, 20 nt, synthetic construct
  source 1..20: mol_type = other RNA
ggaataactggtatgggttt

SEQ ID NO: 6667 - RNA, 20 nt, synthetic construct
  source 1..20: mol_type = other RNA
ctggaataactggtatgggt

SEQ ID NO: 6668 - RNA, 20 nt, synthetic construct
  source 1..20: mol_type = other RNA
ttctgccttctgcccaatcc

SEQ ID NO: 6669 - RNA, 20 nt, synthetic construct
  source 1..20: mol_type = other RNA
gatcgtttttcggccacgtg

SEQ ID NO: 6670 - RNA, 20 nt, synthetic construct
  source 1..20: mol_type = other RNA
gtgtttctaagaagcgtttg

SEQ ID NO: 6671 - RNA, 20 nt, synthetic construct
  source 1..20: mol_type = other RNA
tacttaatagattattacta

SEQ ID NO: 6672 - RNA, 20 nt, synthetic construct
  source 1..20: mol_type = other RNA
catacttaatagattattac

SEQ ID NO: 6673 - RNA, 20 nt, synthetic construct
  source 1..20: mol_type = other RNA
gcacatctctcatacttaat

SEQ ID NO: 6674 - RNA, 20 nt, synthetic construct
  source 1..20: mol_type = other RNA
ctgcacatctctcatactta

SEQ ID NO: 6675 - RNA, 20 nt, synthetic construct
  source 1..20: mol_type = other RNA
atcactaatcctctctgcac

SEQ ID NO: 6676 - RNA, 20 nt, synthetic construct
  source 1..20: mol_type = other RNA
cgatcactaatcctctctgc

SEQ ID NO: 6677 - RNA, 20 nt, synthetic construct
  source 1..20: mol_type = other RNA
tttgtgctgcaacaaggtca

SEQ ID NO: 6678 - RNA, 20 nt, synthetic construct
  source 1..20: mol_type = other RNA
cctttgtgctgcaacaaggt

SEQ ID NO: 6679 - RNA, 20 nt, synthetic construct
  source 1..20: mol_type = other RNA
ctcctttgtgctgcaacaag

SEQ ID NO: 6680 - RNA, 20 nt, synthetic construct
  source 1..20: mol_type = other RNA
tgtgacgtgtatcgttttgg

SEQ ID NO: 6681 - RNA, 20 nt, synthetic construct
  source 1..20: mol_type = other RNA
tataacaataaggagctgcc

SEQ ID NO: 6682 - RNA, 20 nt, synthetic construct
  source 1..20: mol_type = other RNA
ttattgttatacgagggatc

SEQ ID NO: 6683 - RNA, 20 nt, synthetic construct
  source 1..20: mol_type = other RNA
cacctgacaccgggatccct

SEQ ID NO: 6684 - RNA, 20 nt, synthetic construct
  source 1..20: mol_type = other RNA
gacgcagaagggactgccgt

SEQ ID NO: 6685 - RNA, 20 nt, synthetic construct
  source 1..20: mol_type = other RNA
gactgttaccccggttccaa

SEQ ID NO: 6686 - RNA, 20 nt, synthetic construct
  source 1..20: mol_type = other RNA
aggcttggaaccggggtaac

SEQ ID NO: 6687 - RNA, 20 nt, synthetic construct
  source 1..20: mol_type = other RNA
ttaccttgttcggaaggagc

SEQ ID NO: 6688 - RNA, 20 nt, synthetic construct
  source 1..20: mol_type = other RNA
ttccgaacaaggtaaggagt

SEQ ID NO: 6689 - RNA, 20 nt, synthetic construct
  source 1..20: mol_type = other RNA
agcatccgtttaccattgaa

SEQ ID NO: 6690 - RNA, 20 nt, synthetic construct
  source 1..20: mol_type = other RNA
ggcaacactcgagcatccgt

SEQ ID NO: 6691 - RNA, 20 nt, synthetic construct
  source 1..20: mol_type = other RNA
agtgttgcctgagttctacc

SEQ ID NO: 6692 - RNA, 20 nt, synthetic construct
  source 1..20: mol_type = other RNA
tacatggtagaactcaggca

SEQ ID NO: 6693 - RNA, 20 nt, synthetic construct
  source 1..20: mol_type = other RNA
cccagagagtgcacggaggc

SEQ ID NO: 6694 - RNA, 20 nt, synthetic construct
  source 1..20: mol_type = other RNA
gtgcactctctgggggagcc

SEQ ID NO: 6695 - RNA, 20 nt, synthetic construct
  source 1..20: mol_type = other RNA
gctggctcccccagagagtg

SEQ ID NO: 6696 - RNA, 20 nt, synthetic construct
  source 1..20: mol_type = other RNA
ctgggggagccagcggagtg

SEQ ID NO: 6697 - RNA, 20 nt, synthetic construct
  source 1..20: mol_type = other RNA
gggggagccagcggagtgat

SEQ ID NO: 6698 - RNA, 20 nt, synthetic construct
  source 1..20: mol_type = other RNA
agggggatcgacttcaaaat

SEQ ID NO: 6699 - RNA, 20 nt, synthetic construct
  source 1..20: mol_type = other RNA
gtgtcccagccaaaattttt

SEQ ID NO: 6700 - RNA, 20 nt, synthetic construct
  source 1..20: mol_type = other RNA
ttccaagccagtaagctttt

SEQ ID NO: 6701 - RNA, 20 nt, synthetic construct
  source 1..20: mol_type = other RNA
gaatgctggctacttgaaga

SEQ ID NO: 6702 - RNA, 20 nt, synthetic construct
  source 1..20: mol_type = other RNA
gaatctgcaatgctgaagat

SEQ ID NO: 6703 - RNA, 20 nt, synthetic construct
  source 1..20: mol_type = other RNA
agagccacatttctcagaat

SEQ ID NO: 6704 - RNA, 20 nt, synthetic construct
  source 1..20: mol_type = other RNA
agggtgacaggctccagagc

SEQ ID NO: 6705 - RNA, 20 nt, synthetic construct
  source 1..20: mol_type = other RNA
ggagcctgtcaccctcgaga

SEQ ID NO: 6706 - RNA, 20 nt, synthetic construct
  source 1..20: mol_type = other RNA
taggtttctcgagggtgaca

SEQ ID NO: 6707 - RNA, 20 nt, synthetic construct
  source 1..20: mol_type = other RNA
agaaacctaagagggctgca

SEQ ID NO: 6708 - RNA, 20 nt, synthetic construct
  source 1..20: mol_type = other RNA
atagacccagggccacatgg

SEQ ID NO: 6709 - RNA, 20 nt, synthetic construct
  source 1..20: mol_type = other RNA
tgtactgctccatagaccca

SEQ ID NO: 6710 - RNA, 20 nt, synthetic construct
  source 1..20: mol_type = other RNA
cagtgctctaaggctcttca

SEQ ID NO: 6711 - RNA, 20 nt, synthetic construct
  source 1..20: mol_type = other RNA
aaggctcttcagccctaggc

SEQ ID NO: 6712 - RNA, 20 nt, synthetic construct
  source 1..20: mol_type = other RNA
cttcaaagcctagggctgaa

SEQ ID NO: 6713 - RNA, 20 nt, synthetic construct
  source 1..20: mol_type = other RNA
tcagccctaggctttgaagg

SEQ ID NO: 6714 - RNA, 20 nt, synthetic construct
  source 1..20: mol_type = other RNA
gtattcttaaacctctttct

SEQ ID NO: 6715 - RNA, 20 nt, synthetic construct
  source 1..20: mol_type = other RNA
ttctgatgacacttgtacct

SEQ ID NO: 6716 - RNA, 20 nt, synthetic construct
  source 1..20: mol_type = other RNA
caggtacaagtgtcatcaga

SEQ ID NO: 6717 - RNA, 20 nt, synthetic construct
  source 1..20: mol_type = other RNA
agacccctcacaggtacaag

SEQ ID NO: 6718 - RNA, 20 nt, synthetic construct
  source 1..20: mol_type = other RNA
ctagacccctcacaggtaca

SEQ ID NO: 6719 - RNA, 20 nt, synthetic construct
  source 1..20: mol_type = other RNA
ttctctctagacccctcaca

SEQ ID NO: 6720 - RNA, 20 nt, synthetic construct
  source 1..20: mol_type = other RNA
tactttactacaattcagga

SEQ ID NO: 6721 - RNA, 20 nt, synthetic construct
  source 1..20: mol_type = other RNA
tgccctgcatcctgaattgt

SEQ ID NO: 6722 - RNA, 20 nt, synthetic construct
  source 1..20: mol_type = other RNA
catgccctgcatcctgaatt

SEQ ID NO: 6723 - RNA, 20 nt, synthetic construct
  source 1..20: mol_type = other RNA
ctcctccaagggaagaagct

SEQ ID NO: 6724 - RNA, 20 nt, synthetic construct
  source 1..20: mol_type = other RNA
cctccaagggaagaagcttt

SEQ ID NO: 6725 - RNA, 20 nt, synthetic construct
  source 1..20: mol_type = other RNA
tccaagggaagaagcttttg

SEQ ID NO: 6726 - RNA, 20 nt, synthetic construct
  source 1..20: mol_type = other RNA
aagggaagaagcttttggcg

SEQ ID NO: 6727 - RNA, 20 nt, synthetic construct
  source 1..20: mol_type = other RNA
gggatgtgtgcacgccaaaa

SEQ ID NO: 6728 - RNA, 20 nt, synthetic construct
  source 1..20: mol_type = other RNA
gcccccgacagccaattacc

SEQ ID NO: 6729 - RNA, 20 nt, synthetic construct
  source 1..20: mol_type = other RNA
actgaatcttcatgcaaacg

SEQ ID NO: 6730 - RNA, 20 nt, synthetic construct
  source 1..20: mol_type = other RNA
cgaggtagcacctttctagg

SEQ ID NO: 6731 - RNA, 20 nt, synthetic construct
  source 1..20: mol_type = other RNA
ttggaaagtgagctcacgag

SEQ ID NO: 6732 - RNA, 20 nt, synthetic construct
  source 1..20: mol_type = other RNA
tgagctcactttccaatgag

SEQ ID NO: 6733 - RNA, 20 nt, synthetic construct
  source 1..20: mol_type = other RNA
ctttccaatgaggaatctga

SEQ ID NO: 6734 - RNA, 20 nt, synthetic construct
  source 1..20: mol_type = other RNA
aaggtgtcaggtgaaatatt

SEQ ID NO: 6735 - RNA, 20 nt, synthetic construct
  source 1..20: mol_type = other RNA
cattctagaactgtagtaag

SEQ ID NO: 6736 - RNA, 20 nt, synthetic construct
  source 1..20: mol_type = other RNA
catccatctgcctatggata

SEQ ID NO: 6737 - RNA, 20 nt, synthetic construct
  source 1..20: mol_type = other RNA
tttccttatccataggcaga

SEQ ID NO: 6738 - RNA, 20 nt, synthetic construct
  source 1..20: mol_type = other RNA
tagactcctttctggttgtg

SEQ ID NO: 6739 - RNA, 20 nt, synthetic construct
  source 1..20: mol_type = other RNA
tttctggttgtgtcacaaat

SEQ ID NO: 6740 - RNA, 20 nt, synthetic construct
  source 1..20: mol_type = other RNA
gagcatagagaaacatgtga

SEQ ID NO: 6741 - RNA, 20 nt, synthetic construct
  source 1..20: mol_type = other RNA
atgctcagagatactcagct

SEQ ID NO: 6742 - RNA, 20 nt, synthetic construct
  source 1..20: mol_type = other RNA
gagatactcagcttgatttc

SEQ ID NO: 6743 - RNA, 20 nt, synthetic construct
  source 1..20: mol_type = other RNA
gcttgatttcccgtgttttc

SEQ ID NO: 6744 - RNA, 20 nt, synthetic construct
  source 1..20: mol_type = other RNA
gtcggtgctgaaatgaaaac

SEQ ID NO: 6745 - RNA, 20 nt, synthetic construct
  source 1..20: mol_type = other RNA
tgcaccccaggcctttgctc

SEQ ID NO: 6746 - RNA, 20 nt, synthetic construct
  source 1..20: mol_type = other RNA
gtccattaccatggtagcac

SEQ ID NO: 6747 - RNA, 20 nt, synthetic construct
  source 1..20: mol_type = other RNA
ataactctgtccattaccat

SEQ ID NO: 6748 - RNA, 20 nt, synthetic construct
  source 1..20: mol_type = other RNA
accactgtcacaggaagaac

SEQ ID NO: 6749 - RNA, 20 nt, synthetic construct
  source 1..20: mol_type = other RNA
catagtcggaccccagaata

SEQ ID NO: 6750 - RNA, 20 nt, synthetic construct
  source 1..20: mol_type = other RNA
tatggtaaagaacaaagaca

SEQ ID NO: 6751 - RNA, 20 nt, synthetic construct
  source 1..20: mol_type = other RNA
tgtaacagaaacttcacttg

SEQ ID NO: 6752 - RNA, 20 nt, synthetic construct
  source 1..20: mol_type = other RNA
gcttgagacacatctcttgt

SEQ ID NO: 6753 - RNA, 20 nt, synthetic construct
  source 1..20: mol_type = other RNA
agctgagttctccgaactca

SEQ ID NO: 6754 - RNA, 20 nt, synthetic construct
  source 1..20: mol_type = other RNA
gaactcaacttgtgacagat

SEQ ID NO: 6755 - RNA, 20 nt, synthetic construct
  source 1..20: mol_type = other RNA
acttgtgacagatgcagatg

SEQ ID NO: 6756 - RNA, 20 nt, synthetic construct
  source 1..20: mol_type = other RNA
aaggcaatcatcctgagaca

SEQ ID NO: 6757 - RNA, 20 nt, synthetic construct
  source 1..20: mol_type = other RNA
ggatgattgccttggagcta

SEQ ID NO: 6758 - RNA, 20 nt, synthetic construct
  source 1..20: mol_type = other RNA
gacccttagctccaaggcaa

SEQ ID NO: 6759 - RNA, 20 nt, synthetic construct
  source 1..20: mol_type = other RNA
cagacccttagctccaaggc

SEQ ID NO: 6760 - RNA, 20 nt, synthetic construct
  source 1..20: mol_type = other RNA
ctctccttcctcctagttct

SEQ ID NO: 6761 - RNA, 20 nt, synthetic construct
  source 1..20: mol_type = other RNA
atagaactaggaggaaggag

SEQ ID NO: 6762 - RNA, 20 nt, synthetic construct
  source 1..20: mol_type = other RNA
ccttcctcctagttctattg

SEQ ID NO: 6763 - RNA, 20 nt, synthetic construct
  source 1..20: mol_type = other RNA
ttcctcctagttctattgag

SEQ ID NO: 6764 - RNA, 20 nt, synthetic construct
  source 1..20: mol_type = other RNA
tagttctattgagcagaagg

SEQ ID NO: 6765 - RNA, 20 nt, synthetic construct
  source 1..20: mol_type = other RNA
agatttcccttctgctcaat

SEQ ID NO: 6766 - RNA, 20 nt, synthetic construct
  source 1..20: mol_type = other RNA
cctccagatttcccttctgc

SEQ ID NO: 6767 - RNA, 20 nt, synthetic construct
  source 1..20: mol_type = other RNA
tcacctccagatttcccttc

SEQ ID NO: 6768 - RNA, 20 nt, synthetic construct
  source 1..20: mol_type = other RNA
attgacgtttagttggtgtt

SEQ ID NO: 6769 - RNA, 20 nt, synthetic construct
  source 1..20: mol_type = other RNA
tgaacccagagagaaaaggc

SEQ ID NO: 6770 - RNA, 20 nt, synthetic construct
  source 1..20: mol_type = other RNA
ctgggttcaagaggaaagaa

SEQ ID NO: 6771 - RNA, 20 nt, synthetic construct
  source 1..20: mol_type = other RNA
gggttcaagaggaaagaata

SEQ ID NO: 6772 - RNA, 20 nt, synthetic construct
  source 1..20: mol_type = other RNA
ttcctaagtaccagtggcct

SEQ ID NO: 6773 - RNA, 20 nt, synthetic construct
  source 1..20: mol_type = other RNA
tgctgggaacctgtatccct

SEQ ID NO: 6774 - RNA, 20 nt, synthetic construct
  source 1..20: mol_type = other RNA
tctgccttccttccttggat

SEQ ID NO: 6775 - RNA, 20 nt, synthetic construct
  source 1..20: mol_type = other RNA
catctgccttccttccttgg

SEQ ID NO: 6776 - RNA, 20 nt, synthetic construct
  source 1..20: mol_type = other RNA
gtgctgactctcatctgcct

SEQ ID NO: 6777 - RNA, 20 nt, synthetic construct
  source 1..20: mol_type = other RNA
ctgtgctgactctcatctgc

SEQ ID NO: 6778 - RNA, 20 nt, synthetic construct
  source 1..20: mol_type = other RNA
atccacccatcccttttact

SEQ ID NO: 6779 - RNA, 20 nt, synthetic construct
  source 1..20: mol_type = other RNA
ccatccacccatccctttta

SEQ ID NO: 6780 - RNA, 20 nt, synthetic construct
  source 1..20: mol_type = other RNA
ggtagtcgcttgtggccaaa

SEQ ID NO: 6781 - RNA, 20 nt, synthetic construct
  source 1..20: mol_type = other RNA
accatctgttgtcccacatg

SEQ ID NO: 6782 - RNA, 20 nt, synthetic construct
  source 1..20: mol_type = other RNA
aggtcctctaccatctgttg

SEQ ID NO: 6783 - RNA, 20 nt, synthetic construct
  source 1..20: mol_type = other RNA
attctctaggtcctctacca

SEQ ID NO: 6784 - RNA, 20 nt, synthetic construct
  source 1..20: mol_type = other RNA
caattctctaggtcctctac

SEQ ID NO: 6785 - RNA, 20 nt, synthetic construct
  source 1..20: mol_type = other RNA
ctcaattctctaggtcctct

SEQ ID NO: 6786 - RNA, 20 nt, synthetic construct
  source 1..20: mol_type = other RNA
actccgcagatgccttggct

SEQ ID NO: 6787 - RNA, 20 nt, synthetic construct
  source 1..20: mol_type = other RNA
gcagatgccttggctttctt

SEQ ID NO: 6788 - RNA, 20 nt, synthetic construct
  source 1..20: mol_type = other RNA
ttgctattcagtgcaggaag

SEQ ID NO: 6789 - RNA, 20 nt, synthetic construct
  source 1..20: mol_type = other RNA
atctccttgctattcagtgc

SEQ ID NO: 6790 - RNA, 20 nt, synthetic construct
  source 1..20: mol_type = other RNA
attcagcaagatggctacag

SEQ ID NO: 6791 - RNA, 20 nt, synthetic construct
  source 1..20: mol_type = other RNA
tccattcagcaagatggcta

SEQ ID NO: 6792 - RNA, 20 nt, synthetic construct
  source 1..20: mol_type = other RNA
cctccattcagcaagatggc

SEQ ID NO: 6793 - RNA, 20 nt, synthetic construct
  source 1..20: mol_type = other RNA
aatccctctcctccattcag

SEQ ID NO: 6794 - RNA, 20 nt, synthetic construct
  source 1..20: mol_type = other RNA
acaaaccagttcttatttct

SEQ ID NO: 6795 - RNA, 20 nt, synthetic construct
  source 1..20: mol_type = other RNA
tttcctccacaaaccagttc

SEQ ID NO: 6796 - RNA, 20 nt, synthetic construct
  source 1..20: mol_type = other RNA
acaaatacgcatagaagtct

SEQ ID NO: 6797 - RNA, 20 nt, synthetic construct
  source 1..20: mol_type = other RNA
tccagtcgttggcctgacat

SEQ ID NO: 6798 - RNA, 20 nt, synthetic construct
  source 1..20: mol_type = other RNA
agtcgttggcctgacatgac

SEQ ID NO: 6799 - RNA, 20 nt, synthetic construct
  source 1..20: mol_type = other RNA
tggaaccatttcctgtgcac

SEQ ID NO: 6800 - RNA, 20 nt, synthetic construct
  source 1..20: mol_type = other RNA
gtaaatgttctttgccacac

SEQ ID NO: 6801 - RNA, 20 nt, synthetic construct
  source 1..20: mol_type = other RNA
tgtacttgctgtttctcagt

SEQ ID NO: 6802 - RNA, 20 nt, synthetic construct
  source 1..20: mol_type = other RNA
tctttattgagcttcctgtg

SEQ ID NO: 6803 - RNA, 20 nt, synthetic construct
  source 1..20: mol_type = other RNA
cttctttattgagcttcctg

SEQ ID NO: 6804 - RNA, 20 nt, synthetic construct
  source 1..20: mol_type = other RNA
ctcttctttattgagcttcc

SEQ ID NO: 6805 - RNA, 20 nt, synthetic construct
  source 1..20: mol_type = other RNA
ataaagaagagagagatcac

SEQ ID NO: 6806 - RNA, 20 nt, synthetic construct
  source 1..20: mol_type = other RNA
agtatcccagagtgctatgt

SEQ ID NO: 6807 - RNA, 20 nt, synthetic construct
  source 1..20: mol_type = other RNA
gggatactggagttcttccc

SEQ ID NO: 6808 - RNA, 20 nt, synthetic construct
  source 1..20: mol_type = other RNA
ggtctagctgggaagaactc

SEQ ID NO: 6809 - RNA, 20 nt, synthetic construct
  source 1..20: mol_type = other RNA
ctggtctagctgggaagaac

SEQ ID NO: 6810 - RNA, 20 nt, synthetic construct
  source 1..20: mol_type = other RNA
gtgaggactctctggtctag

SEQ ID NO: 6811 - RNA, 20 nt, synthetic construct
  source 1..20: mol_type = other RNA
cggagcacattgccaattca

SEQ ID NO: 6812 - RNA, 20 nt, synthetic construct
  source 1..20: mol_type = other RNA
actgaattggcaatgtgctc

SEQ ID NO: 6813 - RNA, 20 nt, synthetic construct
  source 1..20: mol_type = other RNA
caggcacttcattgattgga

SEQ ID NO: 6814 - RNA, 20 nt, synthetic construct
  source 1..20: mol_type = other RNA
cacaggcacttcattgattg

SEQ ID NO: 6815 - RNA, 20 nt, synthetic construct
  source 1..20: mol_type = other RNA
actctctttagaagtaaaca

SEQ ID NO: 6816 - RNA, 20 nt, synthetic construct
  source 1..20: mol_type = other RNA
ctttagaagtaaacaacaaa

SEQ ID NO: 6817 - RNA, 20 nt, synthetic construct
  source 1..20: mol_type = other RNA
ttagaagtaaacaacaaagt

SEQ ID NO: 6818 - RNA, 20 nt, synthetic construct
  source 1..20: mol_type = other RNA
gcggataccgcatagctgag

SEQ ID NO: 6819 - RNA, 20 nt, synthetic construct
  source 1..20: mol_type = other RNA
ctctgcggataccgcatagc

SEQ ID NO: 6820 - RNA, 20 nt, synthetic construct
  source 1..20: mol_type = other RNA
gctatgcggtatccgcagag

SEQ ID NO: 6821 - RNA, 20 nt, synthetic construct
  source 1..20: mol_type = other RNA
ttcctgagcctgtttgtatt

SEQ ID NO: 6822 - RNA, 20 nt, synthetic construct
  source 1..20: mol_type = other RNA
cattcctgagcctgtttgta

SEQ ID NO: 6823 - RNA, 20 nt, synthetic construct
  source 1..20: mol_type = other RNA
ggaatgagagaaatgattag

SEQ ID NO: 6824 - RNA, 20 nt, synthetic construct
  source 1..20: mol_type = other RNA
tgatatgatatctgctttct

SEQ ID NO: 6825 - RNA, 20 nt, synthetic construct
  source 1..20: mol_type = other RNA
ttaatttaatttggctattc

SEQ ID NO: 6826 - RNA, 20 nt, synthetic construct
  source 1..20: mol_type = other RNA
gaaacgtctaaattgatcag

SEQ ID NO: 6827 - RNA, 20 nt, synthetic construct
  source 1..20: mol_type = other RNA
agaattgtgtgttgggtaat

SEQ ID NO: 6828 - RNA, 20 nt, synthetic construct
  source 1..20: mol_type = other RNA
ttctgtaggttctctagaat

SEQ ID NO: 6829 - RNA, 20 nt, synthetic construct
  source 1..20: mol_type = other RNA
cacacacgcagaaactcaca

SEQ ID NO: 6830 - RNA, 20 nt, synthetic construct
  source 1..20: mol_type = other RNA
caagttctaacacacacaga

SEQ ID NO: 6831 - RNA, 20 nt, synthetic construct
  source 1..20: mol_type = other RNA
cttaattttatatttcactg

SEQ ID NO: 6832 - RNA, 20 nt, synthetic construct
  source 1..20: mol_type = other RNA
cagacatgtaggaaaatatg

SEQ ID NO: 6833 - RNA, 20 nt, synthetic construct
  source 1..20: mol_type = other RNA
ttactgtgacttgcttccca

SEQ ID NO: 6834 - RNA, 20 nt, synthetic construct
  source 1..20: mol_type = other RNA
cttgctctttactgtgactt

SEQ ID NO: 6835 - RNA, 20 nt, synthetic construct
  source 1..20: mol_type = other RNA
agggatcacatagggaattt

SEQ ID NO: 6836 - RNA, 20 nt, synthetic construct
  source 1..20: mol_type = other RNA
tgacaggtttcttcttatta

SEQ ID NO: 6837 - RNA, 20 nt, synthetic construct
  source 1..20: mol_type = other RNA
agtttctcgtgacaggtttc

SEQ ID NO: 6838 - RNA, 20 nt, synthetic construct
  source 1..20: mol_type = other RNA
ttttcctccagtttctcgtg

SEQ ID NO: 6839 - RNA, 20 nt, synthetic construct
  source 1..20: mol_type = other RNA
gaaacactggaagccagata

SEQ ID NO: 6840 - RNA, 20 nt, synthetic construct
  source 1..20: mol_type = other RNA
ttttgttcctgattatcatt

SEQ ID NO: 6841 - RNA, 20 nt, synthetic construct
  source 1..20: mol_type = other RNA
tgttacataagcctgctgat

SEQ ID NO: 6842 - RNA, 20 nt, synthetic construct
  source 1..20: mol_type = other RNA
cttgttacataagcctgctg

SEQ ID NO: 6843 - RNA, 20 nt, synthetic construct
  source 1..20: mol_type = other RNA
tttacaaagatatagaaatt

SEQ ID NO: 6844 - RNA, 20 nt, synthetic construct
  source 1..20: mol_type = other RNA
catttacaaagatatagaaa

SEQ ID NO: 6845 - RNA, 20 nt, synthetic construct
  source 1..20: mol_type = other RNA
acatatgctgaagttaaata

SEQ ID NO: 6846 - RNA, 20 nt, synthetic construct
  source 1..20: mol_type = other RNA
tgcacgatggtgtgtcatat

SEQ ID NO: 6847 - RNA, 20 nt, synthetic construct
  source 1..20: mol_type = other RNA
aggatttgcaatatcccttc

SEQ ID NO: 6848 - RNA, 20 nt, synthetic construct
  source 1..20: mol_type = other RNA
gagttcaaacctttgtgatt

SEQ ID NO: 6849 - RNA, 20 nt, synthetic construct
  source 1..20: mol_type = other RNA
gaggtttttggtataataag

SEQ ID NO: 6850 - RNA, 20 nt, synthetic construct
  source 1..20: mol_type = other RNA
tttgaatgcatggactattc

SEQ ID NO: 6851 - RNA, 20 nt, synthetic construct
  source 1..20: mol_type = other RNA
tgaaagacttctagttcttc

SEQ ID NO: 6852 - RNA, 20 nt, synthetic construct
  source 1..20: mol_type = other RNA
ggctcttatacatccagttg

SEQ ID NO: 6853 - RNA, 20 nt, synthetic construct
  source 1..20: mol_type = other RNA
tatacatccagttgctcatt

SEQ ID NO: 6854 - RNA, 20 nt, synthetic construct
  source 1..20: mol_type = other RNA
attccaggaagctggttcaa

SEQ ID NO: 6855 - RNA, 20 nt, synthetic construct
  source 1..20: mol_type = other RNA
ttgaaccagcttcctggaat

SEQ ID NO: 6856 - RNA, 20 nt, synthetic construct
  source 1..20: mol_type = other RNA
accccagaccctccattcca

SEQ ID NO: 6857 - RNA, 20 nt, synthetic construct
  source 1..20: mol_type = other RNA
agacttgtggcctagtctca

SEQ ID NO: 6858 - RNA, 20 nt, synthetic construct
  source 1..20: mol_type = other RNA
agagactctagacttgtggc

SEQ ID NO: 6859 - RNA, 20 nt, synthetic construct
  source 1..20: mol_type = other RNA
ctagagactctagacttgtg

SEQ ID NO: 6860 - RNA, 20 nt, synthetic construct
  source 1..20: mol_type = other RNA
agagagacagtgttggaacc

SEQ ID NO: 6861 - RNA, 20 nt, synthetic construct
  source 1..20: mol_type = other RNA
ggctgcctgagaaaatggga

SEQ ID NO: 6862 - RNA, 20 nt, synthetic construct
  source 1..20: mol_type = other RNA
ggcagccagaggtcatgaat

SEQ ID NO: 6863 - RNA, 20 nt, synthetic construct
  source 1..20: mol_type = other RNA
cattcatgacctctggctgc

SEQ ID NO: 6864 - RNA, 20 nt, synthetic construct
  source 1..20: mol_type = other RNA
cagtatcctcacattcatga

SEQ ID NO: 6865 - RNA, 20 nt, synthetic construct
  source 1..20: mol_type = other RNA
aacctcccagtatcctcaca

SEQ ID NO: 6866 - RNA, 20 nt, synthetic construct
  source 1..20: mol_type = other RNA
caagaacgttgctccaacct

SEQ ID NO: 6867 - RNA, 20 nt, synthetic construct
  source 1..20: mol_type = other RNA
tccttatgcctcccaagaac

SEQ ID NO: 6868 - RNA, 20 nt, synthetic construct
  source 1..20: mol_type = other RNA
cctgctttgccccctaatgc

SEQ ID NO: 6869 - RNA, 20 nt, synthetic construct
  source 1..20: mol_type = other RNA
gctgctccgtagctgtccga

SEQ ID NO: 6870 - RNA, 20 nt, synthetic construct
  source 1..20: mol_type = other RNA
gtagctgtccgacctcttca

SEQ ID NO: 6871 - RNA, 20 nt, synthetic construct
  source 1..20: mol_type = other RNA
tcagatctcttagtccaccc

SEQ ID NO: 6872 - RNA, 20 nt, synthetic construct
  source 1..20: mol_type = other RNA
tagtccaccctgccgtcttc

SEQ ID NO: 6873 - RNA, 20 nt, synthetic construct
  source 1..20: mol_type = other RNA
gggactgagggaaaggggga

SEQ ID NO: 6874 - RNA, 20 nt, synthetic construct
  source 1..20: mol_type = other RNA
tccccctttccctcagtccc

SEQ ID NO: 6875 - RNA, 20 nt, synthetic construct
  source 1..20: mol_type = other RNA
gtcccggagtagctgcggcc

SEQ ID NO: 6876 - RNA, 20 nt, synthetic construct
  source 1..20: mol_type = other RNA
gctggccgcagctactccgg

SEQ ID NO: 6877 - RNA, 20 nt, synthetic construct
  source 1..20: mol_type = other RNA
gtctaccctctgctggccgc

SEQ ID NO: 6878 - RNA, 20 nt, synthetic construct
  source 1..20: mol_type = other RNA
cagtctaccctctgctggcc

SEQ ID NO: 6879 - RNA, 20 nt, synthetic construct
  source 1..20: mol_type = other RNA
tgctctcagtctaccctctg

SEQ ID NO: 6880 - RNA, 20 nt, synthetic construct
  source 1..20: mol_type = other RNA
cctgctctcagtctaccctc

SEQ ID NO: 6881 - RNA, 20 nt, synthetic construct
  source 1..20: mol_type = other RNA
agaaggggttcctaggcagg

SEQ ID NO: 6882 - RNA, 20 nt, synthetic construct
  source 1..20: mol_type = other RNA
caggcaggatgcagtatctc

SEQ ID NO: 6883 - RNA, 20 nt, synthetic construct
  source 1..20: mol_type = other RNA
aagctgccctggaaaacttg

SEQ ID NO: 6884 - RNA, 20 nt, synthetic construct
  source 1..20: mol_type = other RNA
aagacttctcaaagctgccc

SEQ ID NO: 6885 - RNA, 20 nt, synthetic construct
  source 1..20: mol_type = other RNA
acctttcccacagaaaagca

SEQ ID NO: 6886 - RNA, 20 nt, synthetic construct
  source 1..20: mol_type = other RNA
atacgtagtgaaaaggctct

SEQ ID NO: 6887 - RNA, 20 nt, synthetic construct
  source 1..20: mol_type = other RNA
atgtactcaatacgtagtga

SEQ ID NO: 6888 - RNA, 20 nt, synthetic construct
  source 1..20: mol_type = other RNA
cactctatgtactcaatacg

SEQ ID NO: 6889 - RNA, 20 nt, synthetic construct
  source 1..20: mol_type = other RNA
tggatgacgtgtgttttctg

SEQ ID NO: 6890 - RNA, 20 nt, synthetic construct
  source 1..20: mol_type = other RNA
cacattagaatatgaagtcc

SEQ ID NO: 6891 - RNA, 20 nt, synthetic construct
  source 1..20: mol_type = other RNA
gtaggacttcatattctaat

SEQ ID NO: 6892 - RNA, 20 nt, synthetic construct
  source 1..20: mol_type = other RNA
cggtaggacttcatattcta

SEQ ID NO: 6893 - RNA, 20 nt, synthetic construct
  source 1..20: mol_type = other RNA
ctcggtaggacttcatattc

SEQ ID NO: 6894 - RNA, 20 nt, synthetic construct
  source 1..20: mol_type = other RNA
gtatctctctcggtaggact

SEQ ID NO: 6895 - RNA, 20 nt, synthetic construct
  source 1..20: mol_type = other RNA
ggaataactggtatgggttt

SEQ ID NO: 6896 - RNA, 20 nt, synthetic construct
  source 1..20: mol_type = other RNA
ctggaataactggtatgggt

SEQ ID NO: 6897 - RNA, 20 nt, synthetic construct
  source 1..20: mol_type = other RNA
ttctgccttctgcccaatcc

SEQ ID NO: 6898 - RNA, 20 nt, synthetic construct
  source 1..20: mol_type = other RNA
gatcgtttttcggccacgtg

SEQ ID NO: 6899 - RNA, 20 nt, synthetic construct
  source 1..20: mol_type = other RNA
gtgtttctaagaagcgtttg

SEQ ID NO: 6900 - RNA, 20 nt, synthetic construct
  source 1..20: mol_type = other RNA
tacttaatagattattacta

SEQ ID NO: 6901 - RNA, 20 nt, synthetic construct
  source 1..20: mol_type = other RNA
catacttaatagattattac

SEQ ID NO: 6902 - RNA, 20 nt, synthetic construct
  source 1..20: mol_type = other RNA
gcacatctctcatacttaat

SEQ ID NO: 6903 - RNA, 20 nt, synthetic construct
  source 1..20: mol_type = other RNA
ctgcacatctctcatactta

SEQ ID NO: 6904 - RNA, 20 nt, synthetic construct
  source 1..20: mol_type = other RNA
atcactaatcctctctgcac

SEQ ID NO: 6905 - RNA, 20 nt, synthetic construct
  source 1..20: mol_type = other RNA
cgatcactaatcctctctgc

SEQ ID NO: 6906 - RNA, 20 nt, synthetic construct
  source 1..20: mol_type = other RNA
tttgtgctgcaacaaggtca

SEQ ID NO: 6907 - RNA, 20 nt, synthetic construct
  source 1..20: mol_type = other RNA
cctttgtgctgcaacaaggt

SEQ ID NO: 6908 - RNA, 20 nt, synthetic construct
  source 1..20: mol_type = other RNA
ctcctttgtgctgcaacaag

SEQ ID NO: 6909 - RNA, 20 nt, synthetic construct
  source 1..20: mol_type = other RNA
tgtgacgtgtatcgttttgg

SEQ ID NO: 6910 - RNA, 20 nt, synthetic construct
  source 1..20: mol_type = other RNA
tataacaataaggagctgcc

SEQ ID NO: 6911 - RNA, 20 nt, synthetic construct
  source 1..20: mol_type = other RNA
ttattgttatacgagggatc

SEQ ID NO: 6912 - RNA, 20 nt, synthetic construct
  source 1..20: mol_type = other RNA
cacctgacaccgggatccct

SEQ ID NO: 6913 - RNA, 20 nt, synthetic construct
  source 1..20: mol_type = other RNA
gacgcagaagggactgccgt

SEQ ID NO: 6914 - RNA, 20 nt, synthetic construct
  source 1..20: mol_type = other RNA
gactgttaccccggttccaa

SEQ ID NO: 6915 - RNA, 20 nt, synthetic construct
  source 1..20: mol_type = other RNA
aggcttggaaccggggtaac

SEQ ID NO: 6916 - RNA, 20 nt, synthetic construct
  source 1..20: mol_type = other RNA
ttaccttgttcggaaggagc

SEQ ID NO: 6917 - RNA, 20 nt, synthetic construct
  source 1..20: mol_type = other RNA
ttccgaacaaggtaaggagt

SEQ ID NO: 6918 - RNA, 20 nt, synthetic construct
  source 1..20: mol_type = other RNA
agcatccgtttaccattgaa

SEQ ID NO: 6919 - RNA, 20 nt, synthetic construct
  source 1..20: mol_type = other RNA
ggcaacactcgagcatccgt

SEQ ID NO: 6920 - RNA, 20 nt, synthetic construct
  source 1..20: mol_type = other RNA
agtgttgcctgagttctacc

SEQ ID NO: 6921 - RNA, 20 nt, synthetic construct
  source 1..20: mol_type = other RNA
tacatggtagaactcaggca

SEQ ID NO: 6922 - RNA, 20 nt, synthetic construct
  source 1..20: mol_type = other RNA
cccagagagtgcacggaggc

SEQ ID NO: 6923 - RNA, 20 nt, synthetic construct
  source 1..20: mol_type = other RNA
gtgcactctctgggggagcc

SEQ ID NO: 6924 - RNA, 20 nt, synthetic construct
  source 1..20: mol_type = other RNA
gctggctcccccagagagtg

SEQ ID NO: 6925 - RNA, 20 nt, synthetic construct
  source 1..20: mol_type = other RNA
ctgggggagccagcggagtg

SEQ ID NO: 6926 - RNA, 20 nt, synthetic construct
  source 1..20: mol_type = other RNA
gggggagccagcggagtgat

SEQ ID NO: 6927 - RNA, 20 nt, synthetic construct
  source 1..20: mol_type = other RNA
agggggatcgacttcaaaat

SEQ ID NO: 6928 - RNA, 20 nt, synthetic construct
  source 1..20: mol_type = other RNA
gtgtcccagccaaaattttt

SEQ ID NO: 6929 - RNA, 20 nt, synthetic construct
  source 1..20: mol_type = other RNA
ttccaagccagtaagctttt

SEQ ID NO: 6930 - RNA, 20 nt, synthetic construct
  source 1..20: mol_type = other RNA
gaatgctggctacttgaaga

SEQ ID NO: 6931 - RNA, 20 nt, synthetic construct
  source 1..20: mol_type = other RNA
gaatctgcaatgctgaagat

SEQ ID NO: 6932 - RNA, 20 nt, synthetic construct
  source 1..20: mol_type = other RNA
agagccacatttctcagaat

SEQ ID NO: 6933 - RNA, 20 nt, synthetic construct
  source 1..20: mol_type = other RNA
agggtgacaggctccagagc

SEQ ID NO: 6934 - RNA, 20 nt, synthetic construct
  source 1..20: mol_type = other RNA
ggagcctgtcaccctcgaga

SEQ ID NO: 6935 - RNA, 20 nt, synthetic construct
  source 1..20: mol_type = other RNA
taggtttctcgagggtgaca

SEQ ID NO: 6936 - RNA, 20 nt, synthetic construct
  source 1..20: mol_type = other RNA
agaaacctaagagggctgca

SEQ ID NO: 6937 - RNA, 20 nt, synthetic construct
  source 1..20: mol_type = other RNA
atagacccagggccacatgg

SEQ ID NO: 6938 - RNA, 20 nt, synthetic construct
  source 1..20: mol_type = other RNA
tgtactgctccatagaccca

SEQ ID NO: 6939 - RNA, 20 nt, synthetic construct
  source 1..20: mol_type = other RNA
cagtgctctaaggctcttca

SEQ ID NO: 6940 - RNA, 20 nt, synthetic construct
  source 1..20: mol_type = other RNA
aaggctcttcagccctaggc

SEQ ID NO: 6941 - RNA, 20 nt, synthetic construct
  source 1..20: mol_type = other RNA
cttcaaagcctagggctgaa

SEQ ID NO: 6942 - RNA, 20 nt, synthetic construct
  source 1..20: mol_type = other RNA
tcagccctaggctttgaagg

SEQ ID NO: 6943 - RNA, 20 nt, synthetic construct
  source 1..20: mol_type = other RNA
gtattcttaaacctctttct

SEQ ID NO: 6944 - RNA, 20 nt, synthetic construct
  source 1..20: mol_type = other RNA
ttctgatgacacttgtacct

SEQ ID NO: 6945 - RNA, 20 nt, synthetic construct
  source 1..20: mol_type = other RNA
caggtacaagtgtcatcaga

SEQ ID NO: 6946 - RNA, 20 nt, synthetic construct
  source 1..20: mol_type = other RNA
agacccctcacaggtacaag

SEQ ID NO: 6947 - RNA, 20 nt, synthetic construct
  source 1..20: mol_type = other RNA
ctagacccctcacaggtaca

SEQ ID NO: 6948 - RNA, 20 nt, synthetic construct
  source 1..20: mol_type = other RNA
ttctctctagacccctcaca

SEQ ID NO: 6949 - RNA, 20 nt, synthetic construct
  source 1..20: mol_type = other RNA
tactttactacaattcagga

SEQ ID NO: 6950 - RNA, 20 nt, synthetic construct
  source 1..20: mol_type = other RNA
tgccctgcatcctgaattgt

SEQ ID NO: 6951 - RNA, 20 nt, synthetic construct
  source 1..20: mol_type = other RNA
catgccctgcatcctgaatt

SEQ ID NO: 6952 - RNA, 20 nt, synthetic construct
  source 1..20: mol_type = other RNA
ctcctccaagggaagaagct

SEQ ID NO: 6953 - RNA, 20 nt, synthetic construct
  source 1..20: mol_type = other RNA
cctccaagggaagaagcttt

SEQ ID NO: 6954 - RNA, 20 nt, synthetic construct
  source 1..20: mol_type = other RNA
tccaagggaagaagcttttg

SEQ ID NO: 6955 - RNA, 20 nt, synthetic construct
  source 1..20: mol_type = other RNA
aagggaagaagcttttggcg

SEQ ID NO: 6956 - RNA, 20 nt, synthetic construct
  source 1..20: mol_type = other RNA
gggatgtgtgcacgccaaaa

SEQ ID NO: 6957 - RNA, 20 nt, synthetic construct
  source 1..20: mol_type = other RNA
tcccccgacagccaattacc

SEQ ID NO: 6958 - RNA, 20 nt, synthetic construct
  source 1..20: mol_type = other RNA
actgaatcttcatgcaaacg

SEQ ID NO: 6959 - RNA, 20 nt, synthetic construct
  source 1..20: mol_type = other RNA
cgaggtagcacctttctagg

SEQ ID NO: 6960 - RNA, 20 nt, synthetic construct
  source 1..20: mol_type = other RNA
ttggaaagtgagctcacgag

SEQ ID NO: 6961 - RNA, 20 nt, synthetic construct
  source 1..20: mol_type = other RNA
tgagctcactttccaatgag

SEQ ID NO: 6962 - RNA, 20 nt, synthetic construct
  source 1..20: mol_type = other RNA
ctttccaatgaggaatctga

SEQ ID NO: 6963 - RNA, 20 nt, synthetic construct
  source 1..20: mol_type = other RNA
aaggtgtcaggtgaaatatt

SEQ ID NO: 6964 - RNA, 20 nt, synthetic construct
  source 1..20: mol_type = other RNA
cattctagaactgtagtaag

SEQ ID NO: 6965 - RNA, 20 nt, synthetic construct
  source 1..20: mol_type = other RNA
catccatctgcctatggata

SEQ ID NO: 6966 - RNA, 20 nt, synthetic construct
  source 1..20: mol_type = other RNA
tttccttatccataggcaga

SEQ ID NO: 6967 - RNA, 20 nt, synthetic construct
  source 1..20: mol_type = other RNA
tagactcctttctggttgtg

SEQ ID NO: 6968 - RNA, 20 nt, synthetic construct
  source 1..20: mol_type = other RNA
tttctggttgtgtcacaaat

SEQ ID NO: 6969 - RNA, 20 nt, synthetic construct
  source 1..20: mol_type = other RNA
gagcatagagaaacatgtga

SEQ ID NO: 6970 - RNA, 20 nt, synthetic construct
  source 1..20: mol_type = other RNA
atgctcagagatactcagct

SEQ ID NO: 6971 - RNA, 20 nt, synthetic construct
  source 1..20: mol_type = other RNA
gagatactcagcttgatttc

SEQ ID NO: 6972 - RNA, 20 nt, synthetic construct
  source 1..20: mol_type = other RNA
gcttgatttcccgtgttttc

SEQ ID NO: 6973 - RNA, 20 nt, synthetic construct
  source 1..20: mol_type = other RNA
gtcggtgctgaaatgaaaac

SEQ ID NO: 6974 - RNA, 20 nt, synthetic construct
  source 1..20: mol_type = other RNA
tgcaccccaggcctttgctc

SEQ ID NO: 6975 - RNA, 20 nt, synthetic construct
  source 1..20: mol_type = other RNA
gtccattaccatggtagcac

SEQ ID NO: 6976 - RNA, 20 nt, synthetic construct
  source 1..20: mol_type = other RNA
ataactctgtccattaccat

SEQ ID NO: 6977 - RNA, 20 nt, synthetic construct
  source 1..20: mol_type = other RNA
accactgtcacaggaagaac

SEQ ID NO: 6978 - RNA, 20 nt, synthetic construct
  source 1..20: mol_type = other RNA
catagtcggaccccagaata

SEQ ID NO: 6979 - RNA, 20 nt, synthetic construct
  source 1..20: mol_type = other RNA
tatggtaaagaacaaagaca

SEQ ID NO: 6980 - RNA, 20 nt, synthetic construct
  source 1..20: mol_type = other RNA
tgtaacagaaacttcacttg

SEQ ID NO: 6981 - RNA, 20 nt, synthetic construct
  source 1..20: mol_type = other RNA
gcttgagacacatctcttgt

SEQ ID NO: 6982 - RNA, 20 nt, synthetic construct
  source 1..20: mol_type = other RNA
agctgagttctccgaactca

SEQ ID NO: 6983 - RNA, 20 nt, synthetic construct
  source 1..20: mol_type = other RNA
gaactcaacttgtgacagat

SEQ ID NO: 6984 - RNA, 20 nt, synthetic construct
  source 1..20: mol_type = other RNA
acttgtgacagatgcagatg

SEQ ID NO: 6985 - RNA, 20 nt, synthetic construct
  source 1..20: mol_type = other RNA
aaggcaatcatcctgagaca

SEQ ID NO: 6986 - RNA, 20 nt, synthetic construct
  source 1..20: mol_type = other RNA
ggatgattgccttggagcta

SEQ ID NO: 6987 - RNA, 20 nt, synthetic construct
  source 1..20: mol_type = other RNA
gacccttagctccaaggcaa

SEQ ID NO: 6988 - RNA, 20 nt, synthetic construct
  source 1..20: mol_type = other RNA
cagacccttagctccaaggc

SEQ ID NO: 6989 - RNA, 20 nt, synthetic construct
  source 1..20: mol_type = other RNA
ctctccttcctcctagttct

SEQ ID NO: 6990 - RNA, 20 nt, synthetic construct
  source 1..20: mol_type = other RNA
atagaactaggaggaaggag

SEQ ID NO: 6991 - RNA, 20 nt, synthetic construct
  source 1..20: mol_type = other RNA
ccttcctcctagttctattg

SEQ ID NO: 6992 - RNA, 20 nt, synthetic construct
  source 1..20: mol_type = other RNA
ttcctcctagttctattgag

SEQ ID NO: 6993 - RNA, 20 nt, synthetic construct
  source 1..20: mol_type = other RNA
tagttctattgagcagaagg

SEQ ID NO: 6994 - RNA, 20 nt, synthetic construct
  source 1..20: mol_type = other RNA
agatttcccttctgctcaat

SEQ ID NO: 6995 - RNA, 20 nt, synthetic construct
  source 1..20: mol_type = other RNA
cctccagatttcccttctgc

SEQ ID NO: 6996 - RNA, 20 nt, synthetic construct
  source 1..20: mol_type = other RNA
attgacgtttagttggtgtt

SEQ ID NO: 6997 - RNA, 20 nt, synthetic construct
  source 1..20: mol_type = other RNA
tgaacccagagagaaaaggc

SEQ ID NO: 6998 - RNA, 20 nt, synthetic construct
  source 1..20: mol_type = other RNA
ctgggttcaagaggaaagaa

SEQ ID NO: 6999 - RNA, 20 nt, synthetic construct
  source 1..20: mol_type = other RNA
gggttcaagaggaaagaata

SEQ ID NO: 7000 - RNA, 20 nt, synthetic construct
  source 1..20: mol_type = other RNA
ttcctaagtaccagtggcct

SEQ ID NO: 7001 - RNA, 20 nt, synthetic construct
  source 1..20: mol_type = other RNA
tgctgggaacctgtatccct

SEQ ID NO: 7002 - RNA, 20 nt, synthetic construct
  source 1..20: mol_type = other RNA
tctgccttccttccttggat

SEQ ID NO: 7003 - RNA, 20 nt, synthetic construct
  source 1..20: mol_type = other RNA
catctgccttccttccttgg

SEQ ID NO: 7004 - RNA, 20 nt, synthetic construct
  source 1..20: mol_type = other RNA
gtgctgactctcatctgcct

SEQ ID NO: 7005 - RNA, 20 nt, synthetic construct
  source 1..20: mol_type = other RNA
ctgtgctgactctcatctgc

SEQ ID NO: 7006 - RNA, 20 nt, synthetic construct
  source 1..20: mol_type = other RNA
atccacccatcccttttact

SEQ ID NO: 7007 - RNA, 20 nt, synthetic construct
  source 1..20: mol_type = other RNA
ccatccacccatccctttta

SEQ ID NO: 7008 - RNA, 20 nt, synthetic construct
  source 1..20: mol_type = other RNA
ggtagtcgcttgtggccaaa

SEQ ID NO: 7009 - RNA, 20 nt, synthetic construct
  source 1..20: mol_type = other RNA
accatctgttgtcccacatg

SEQ ID NO: 7010 - RNA, 20 nt, synthetic construct
  source 1..20: mol_type = other RNA
aggtcctctaccatctgttg

SEQ ID NO: 7011 - RNA, 20 nt, synthetic construct
  source 1..20: mol_type = other RNA
attctctaggtcctctacca

SEQ ID NO: 7012 - RNA, 20 nt, synthetic construct
  source 1..20: mol_type = other RNA
caattctctaggtcctctac

SEQ ID NO: 7013 - RNA, 20 nt, synthetic construct
  source 1..20: mol_type = other RNA
ctcaattctctaggtcctct

SEQ ID NO: 7014 - RNA, 20 nt, synthetic construct
  source 1..20: mol_type = other RNA
actccgcagatgccttggct

SEQ ID NO: 7015 - RNA, 20 nt, synthetic construct
  source 1..20: mol_type = other RNA
gcagatgccttggctttctt

SEQ ID NO: 7016 - RNA, 20 nt, synthetic construct
  source 1..20: mol_type = other RNA
ttgctattcagtgcaggaag

SEQ ID NO: 7017 - RNA, 20 nt, synthetic construct
  source 1..20: mol_type = other RNA
atctccttgctattcagtgc

SEQ ID NO: 7018 - RNA, 20 nt, synthetic construct
  source 1..20: mol_type = other RNA
attcagcaagatggctacag

SEQ ID NO: 7019 - RNA, 20 nt, synthetic construct
  source 1..20: mol_type = other RNA
tccattcagcaagatggcta

SEQ ID NO: 7020 - RNA, 20 nt, synthetic construct
  source 1..20: mol_type = other RNA
cctccattcagcaagatggc

SEQ ID NO: 7021 - RNA, 20 nt, synthetic construct
  source 1..20: mol_type = other RNA
aatccctctcctccattcag

SEQ ID NO: 7022 - RNA, 20 nt, synthetic construct
  source 1..20: mol_type = other RNA
acacaaaccagttcttattt

SEQ ID NO: 7023 - RNA, 20 nt, synthetic construct
  source 1..20: mol_type = other RNA
tttcctccacacaaaccagt

SEQ ID NO: 7024 - RNA, 20 nt, synthetic construct
  source 1..20: mol_type = other RNA
acaaatacgcatagaagtct

SEQ ID NO: 7025 - RNA, 20 nt, synthetic construct
  source 1..20: mol_type = other RNA
tccagtcgttggcctgacat

SEQ ID NO: 7026 - RNA, 20 nt, synthetic construct
  source 1..20: mol_type = other RNA
agtcgttggcctgacatgac

SEQ ID NO: 7027 - RNA, 20 nt, synthetic construct
  source 1..20: mol_type = other RNA
tggaaccatttcctgtgcac

SEQ ID NO: 7028 - RNA, 20 nt, synthetic construct
  source 1..20: mol_type = other RNA
gtaaatgttctttgccacac

SEQ ID NO: 7029 - RNA, 20 nt, synthetic construct
  source 1..20: mol_type = other RNA
tgtacttgctgtttctcagt

SEQ ID NO: 7030 - RNA, 20 nt, synthetic construct
  source 1..20: mol_type = other RNA
tctttattgagcttcctgtg

SEQ ID NO: 7031 - RNA, 20 nt, synthetic construct
  source 1..20: mol_type = other RNA
cttctttattgagcttcctg

SEQ ID NO: 7032 - RNA, 20 nt, synthetic construct
  source 1..20: mol_type = other RNA
ctcttctttattgagcttcc

SEQ ID NO: 7033 - RNA, 20 nt, synthetic construct
  source 1..20: mol_type = other RNA
ataaagaagagagagatcac

SEQ ID NO: 7034 - RNA, 20 nt, synthetic construct
  source 1..20: mol_type = other RNA
agtatcccagagtgctatgt

SEQ ID NO: 7035 - RNA, 20 nt, synthetic construct
  source 1..20: mol_type = other RNA
gggatactggagttcttccc

SEQ ID NO: 7036 - RNA, 20 nt, synthetic construct
  source 1..20: mol_type = other RNA
ggtctagctgggaagaactc

SEQ ID NO: 7037 - RNA, 20 nt, synthetic construct
  source 1..20: mol_type = other RNA
ctggtctagctgggaagaac

SEQ ID NO: 7038 - RNA, 20 nt, synthetic construct
  source 1..20: mol_type = other RNA
gtgaggactctctggtctag

SEQ ID NO: 7039 - RNA, 20 nt, synthetic construct
  source 1..20: mol_type = other RNA
cggagcacattgccaattca

SEQ ID NO: 7040 - RNA, 20 nt, synthetic construct
  source 1..20: mol_type = other RNA
actgaattggcaatgtgctc

SEQ ID NO: 7041 - RNA, 20 nt, synthetic construct
  source 1..20: mol_type = other RNA
caggcacttcattgattgga

SEQ ID NO: 7042 - RNA, 20 nt, synthetic construct
  source 1..20: mol_type = other RNA
cacaggcacttcattgattg

SEQ ID NO: 7043 - RNA, 20 nt, synthetic construct
  source 1..20: mol_type = other RNA
actctctttagaagtaaaca

SEQ ID NO: 7044 - RNA, 20 nt, synthetic construct
  source 1..20: mol_type = other RNA
ctttagaagtaaacaacaaa

SEQ ID NO: 7045 - RNA, 20 nt, synthetic construct
  source 1..20: mol_type = other RNA
ttagaagtaaacaacaaagt

SEQ ID NO: 7046 - RNA, 20 nt, synthetic construct
  source 1..20: mol_type = other RNA
gcggataccgcatagctgag

SEQ ID NO: 7047 - RNA, 20 nt, synthetic construct
  source 1..20: mol_type = other RNA
ctctgcggataccgcatagc

SEQ ID NO: 7048 - RNA, 20 nt, synthetic construct
  source 1..20: mol_type = other RNA
gctatgcggtatccgcagag

SEQ ID NO: 7049 - RNA, 20 nt, synthetic construct
  source 1..20: mol_type = other RNA
ttcctgagcctgtttgtatt

SEQ ID NO: 7050 - RNA, 20 nt, synthetic construct
  source 1..20: mol_type = other RNA
cattcctgagcctgtttgta

SEQ ID NO: 7051 - RNA, 20 nt, synthetic construct
  source 1..20: mol_type = other RNA
ggaatgagagaaatgattag

SEQ ID NO: 7052 - RNA, 20 nt, synthetic construct
  source 1..20: mol_type = other RNA
tgatatgatatctgctttct

SEQ ID NO: 7053 - RNA, 20 nt, synthetic construct
  source 1..20: mol_type = other RNA
ttaatttaatttggctattc

SEQ ID NO: 7054 - RNA, 20 nt, synthetic construct
  source 1..20: mol_type = other RNA
gaaacgtctaaattgatcag

SEQ ID NO: 7055 - RNA, 20 nt, synthetic construct
  source 1..20: mol_type = other RNA
agaattgtgtgttgggtaat

SEQ ID NO: 7056 - RNA, 20 nt, synthetic construct
  source 1..20: mol_type = other RNA
ttctgtaggttctctagaat

SEQ ID NO: 7057 - RNA, 20 nt, synthetic construct
  source 1..20: mol_type = other RNA
cacacacgcagaaactcaca

SEQ ID NO: 7058 - RNA, 20 nt, synthetic construct
  source 1..20: mol_type = other RNA
caagttctaacacacacaga

SEQ ID NO: 7059 - RNA, 20 nt, synthetic construct
  source 1..20: mol_type = other RNA
cttaattttatatttcactg

SEQ ID NO: 7060 - RNA, 20 nt, synthetic construct
  source 1..20: mol_type = other RNA
cagacatgtaggaaaatatg

SEQ ID NO: 7061 - RNA, 20 nt, synthetic construct
  source 1..20: mol_type = other RNA
ttactgtgacttgcttccca

SEQ ID NO: 7062 - RNA, 20 nt, synthetic construct
  source 1..20: mol_type = other RNA
cttgctctttactgtgactt

SEQ ID NO: 7063 - RNA, 20 nt, synthetic construct
  source 1..20: mol_type = other RNA
agggatcacatagggaattt

SEQ ID NO: 7064 - RNA, 20 nt, synthetic construct
  source 1..20: mol_type = other RNA
tgacaggtttcttcttatta

SEQ ID NO: 7065 - RNA, 20 nt, synthetic construct
  source 1..20: mol_type = other RNA
agtttctcgtgacaggtttc

SEQ ID NO: 7066 - RNA, 20 nt, synthetic construct
  source 1..20: mol_type = other RNA
ttttcctccagtttctcgtg

SEQ ID NO: 7067 - RNA, 20 nt, synthetic construct
  source 1..20: mol_type = other RNA
gaaacactggaagccagata

SEQ ID NO: 7068 - RNA, 20 nt, synthetic construct
  source 1..20: mol_type = other RNA
ttttgttcctgattatcatt

SEQ ID NO: 7069 - RNA, 20 nt, synthetic construct
  source 1..20: mol_type = other RNA
tgttacataagcctgctgat

SEQ ID NO: 7070 - RNA, 20 nt, synthetic construct
  source 1..20: mol_type = other RNA
cttgttacataagcctgctg

SEQ ID NO: 7071 - RNA, 20 nt, synthetic construct
  source 1..20: mol_type = other RNA
tttacaaagatatagaaatt

SEQ ID NO: 7072 - RNA, 20 nt, synthetic construct
  source 1..20: mol_type = other RNA
catttacaaagatatagaaa

SEQ ID NO: 7073 - RNA, 20 nt, synthetic construct
  source 1..20: mol_type = other RNA
acatatgctgaagttaaata

SEQ ID NO: 7074 - RNA, 20 nt, synthetic construct
  source 1..20: mol_type = other RNA
tgcacgatggtgtgtcatat

SEQ ID NO: 7075 - RNA, 20 nt, synthetic construct
  source 1..20: mol_type = other RNA
aggatttgcaatatcccttc

SEQ ID NO: 7076 - RNA, 20 nt, synthetic construct
  source 1..20: mol_type = other RNA
gagttcaaacctttgtgatt

SEQ ID NO: 7077 - RNA, 20 nt, synthetic construct
  source 1..20: mol_type = other RNA
gaggtttttggtataataag

SEQ ID NO: 7078 - RNA, 20 nt, synthetic construct
  source 1..20: mol_type = other RNA
tttgaatgcatggactattc

SEQ ID NO: 7079 - RNA, 20 nt, synthetic construct
  source 1..20: mol_type = other RNA
tgaaagacttctagttcttc

SEQ ID NO: 7080 - RNA, 20 nt, synthetic construct
  source 1..20: mol_type = other RNA
ggctcttatacatccagttg

SEQ ID NO: 7081 - RNA, 20 nt, synthetic construct
  source 1..20: mol_type = other RNA
tatacatccagttgctcatt

SEQ ID NO: 7082 - RNA, 20 nt, synthetic construct
  source 1..20: mol_type = other RNA
attccaggaagctggttcaa

SEQ ID NO: 7083 - RNA, 20 nt, synthetic construct
  source 1..20: mol_type = other RNA
ttgaaccagcttcctggaat

SEQ ID NO: 7084 - RNA, 20 nt, synthetic construct
  source 1..20: mol_type = other RNA
accccagaccctccattcca

SEQ ID NO: 7085 - RNA, 20 nt, synthetic construct
  source 1..20: mol_type = other RNA
agacttgtggcctagtctca

SEQ ID NO: 7086 - RNA, 20 nt, synthetic construct
  source 1..20: mol_type = other RNA
agagactctagacttgtggc

SEQ ID NO: 7087 - RNA, 20 nt, synthetic construct
  source 1..20: mol_type = other RNA
ctagagactctagacttgtg

SEQ ID NO: 7088 - RNA, 20 nt, synthetic construct
  source 1..20: mol_type = other RNA
agagagacagtgttggaacc

SEQ ID NO: 7089 - RNA, 20 nt, synthetic construct
  source 1..20: mol_type = other RNA
ggctgcctgagaaaatggga

SEQ ID NO: 7090 - RNA, 20 nt, synthetic construct
  source 1..20: mol_type = other RNA
ggcagccagaggtcatgaat

SEQ ID NO: 7091 - RNA, 20 nt, synthetic construct
  source 1..20: mol_type = other RNA
cattcatgacctctggctgc

SEQ ID NO: 7092 - RNA, 20 nt, synthetic construct
  source 1..20: mol_type = other RNA
cagtatcctcacattcatga

SEQ ID NO: 7093 - RNA, 20 nt, synthetic construct
  source 1..20: mol_type = other RNA
aacctcccagtatcctcaca

SEQ ID NO: 7094 - RNA, 20 nt, synthetic construct
  source 1..20: mol_type = other RNA
caagaacgttgctccaacct

SEQ ID NO: 7095 - RNA, 20 nt, synthetic construct
  source 1..20: mol_type = other RNA
tccttatgcctcccaagaac

SEQ ID NO: 7096 - RNA, 20 nt, synthetic construct
  source 1..20: mol_type = other RNA
cctgctttgccccctaatgc

SEQ ID NO: 7097 - RNA, 20 nt, synthetic construct
  source 1..20: mol_type = other RNA
gctgctccgtagctgtccga

SEQ ID NO: 7098 - RNA, 20 nt, synthetic construct
  source 1..20: mol_type = other RNA
gtagctgtccgacctcttca

SEQ ID NO: 7099 - RNA, 20 nt, synthetic construct
  source 1..20: mol_type = other RNA
tcagatctcttagtccaccc

SEQ ID NO: 7100 - RNA, 20 nt, synthetic construct
  source 1..20: mol_type = other RNA
tagtccaccctgccgtcttc

SEQ ID NO: 7101 - RNA, 20 nt, synthetic construct
  source 1..20: mol_type = other RNA
gggactgagggaaaggggga

SEQ ID NO: 7102 - RNA, 20 nt, synthetic construct
  source 1..20: mol_type = other RNA
tccccctttccctcagtccc

SEQ ID NO: 7103 - RNA, 20 nt, synthetic construct
  source 1..20: mol_type = other RNA
gtcccggagtagctgcggcc

SEQ ID NO: 7104 - RNA, 20 nt, synthetic construct
  source 1..20: mol_type = other RNA
gctggccgcagctactccgg

SEQ ID NO: 7105 - RNA, 20 nt, synthetic construct
  source 1..20: mol_type = other RNA
gtctaccctctgctggccgc

SEQ ID NO: 7106 - RNA, 20 nt, synthetic construct
  source 1..20: mol_type = other RNA
cagtctaccctctgctggcc

SEQ ID NO: 7107 - RNA, 20 nt, synthetic construct
  source 1..20: mol_type = other RNA
tgctctcagtctaccctctg

SEQ ID NO: 7108 - RNA, 20 nt, synthetic construct
  source 1..20: mol_type = other RNA
cctgctctcagtctaccctc

SEQ ID NO: 7109 - RNA, 20 nt, synthetic construct
  source 1..20: mol_type = other RNA
agaaggggttcctaggcagg

SEQ ID NO: 7110 - RNA, 20 nt, synthetic construct
  source 1..20: mol_type = other RNA
caggcaggatgcagtatctc

SEQ ID NO: 7111 - RNA, 20 nt, synthetic construct
  source 1..20: mol_type = other RNA
aagctgccctggaaaacttg

SEQ ID NO: 7112 - RNA, 20 nt, synthetic construct
  source 1..20: mol_type = other RNA
aagacttctcaaagctgccc

SEQ ID NO: 7113 - RNA, 20 nt, synthetic construct
  source 1..20: mol_type = other RNA
acctttcccacagaaaagca

SEQ ID NO: 7114 - RNA, 20 nt, synthetic construct
  source 1..20: mol_type = other RNA
atacgtagtgaaaaggctct

SEQ ID NO: 7115 - RNA, 20 nt, synthetic construct
  source 1..20: mol_type = other RNA
atgtactcaatacgtagtga

SEQ ID NO: 7116 - RNA, 20 nt, synthetic construct
  source 1..20: mol_type = other RNA
cactctatgtactcaatacg

SEQ ID NO: 7117 - RNA, 20 nt, synthetic construct
  source 1..20: mol_type = other RNA
tggatgacgtgcgttttctg

SEQ ID NO: 7118 - RNA, 20 nt, synthetic construct
  source 1..20: mol_type = other RNA
cacattagaatatgaagtcc

SEQ ID NO: 7119 - RNA, 20 nt, synthetic construct
  source 1..20: mol_type = other RNA
gtaggacttcatattctaat

SEQ ID NO: 7120 - RNA, 20 nt, synthetic construct
  source 1..20: mol_type = other RNA
cggtaggacttcatattcta

SEQ ID NO: 7121 - RNA, 20 nt, synthetic construct
  source 1..20: mol_type = other RNA
ctcggtaggacttcatattc

SEQ ID NO: 7122 - RNA, 20 nt, synthetic construct
  source 1..20: mol_type = other RNA
gtatctctctcggtaggact

SEQ ID NO: 7123 - RNA, 20 nt, synthetic construct
  source 1..20: mol_type = other RNA
ggaataactggtatgggttt

SEQ ID NO: 7124 - RNA, 20 nt, synthetic construct
  source 1..20: mol_type = other RNA
ctggaataactggtatgggt

SEQ ID NO: 7125 - RNA, 20 nt, synthetic construct
  source 1..20: mol_type = other RNA
ttctgccttctgcccaatcc

SEQ ID NO: 7126 - RNA, 20 nt, synthetic construct
  source 1..20: mol_type = other RNA
gatcgtttttcggccacgtg

SEQ ID NO: 7127 - RNA, 20 nt, synthetic construct
  source 1..20: mol_type = other RNA
gtgtttctaagaagcgtttg

SEQ ID NO: 7128 - RNA, 20 nt, synthetic construct
  source 1..20: mol_type = other RNA
tacttaatagattattacta

SEQ ID NO: 7129 - RNA, 20 nt, synthetic construct
  source 1..20: mol_type = other RNA
catacttaatagattattac

SEQ ID NO: 7130 - RNA, 20 nt, synthetic construct
  source 1..20: mol_type = other RNA
gcacatctctcatacttaat

SEQ ID NO: 7131 - RNA, 20 nt, synthetic construct
  source 1..20: mol_type = other RNA
ctgcacatctctcatactta

SEQ ID NO: 7132 - RNA, 20 nt, synthetic construct
  source 1..20: mol_type = other RNA
atcactaatcctctctgcac

SEQ ID NO: 7133 - RNA, 20 nt, synthetic construct
  source 1..20: mol_type = other RNA
cgatcactaatcctctctgc

SEQ ID NO: 7134 - RNA, 20 nt, synthetic construct
  source 1..20: mol_type = other RNA
tttgtgctgcaacaaggtca

SEQ ID NO: 7135 - RNA, 20 nt, synthetic construct
  source 1..20: mol_type = other RNA
cctttgtgctgcaacaaggt

SEQ ID NO: 7136 - RNA, 20 nt, synthetic construct
  source 1..20: mol_type = other RNA
ctcctttgtgctgcaacaag

SEQ ID NO: 7137 - RNA, 20 nt, synthetic construct
  source 1..20: mol_type = other RNA
tgtgacgtgtatcgttttgg

SEQ ID NO: 7138 - RNA, 20 nt, synthetic construct
  source 1..20: mol_type = other RNA
tataacaataaggagctgcc

SEQ ID NO: 7139 - RNA, 20 nt, synthetic construct
  source 1..20: mol_type = other RNA
ttattgttatacgagggatc

SEQ ID NO: 7140 - RNA, 20 nt, synthetic construct
  source 1..20: mol_type = other RNA
cacctgacaccgggatccct

SEQ ID NO: 7141 - RNA, 20 nt, synthetic construct
  source 1..20: mol_type = other RNA
gacgcagaagggactgccgt

SEQ ID NO: 7142 - RNA, 20 nt, synthetic construct
  source 1..20: mol_type = other RNA
gactgttaccccggttccaa

SEQ ID NO: 7143 - RNA, 20 nt, synthetic construct
  source 1..20: mol_type = other RNA
aggcttggaaccggggtaac

SEQ ID NO: 7144 - RNA, 20 nt, synthetic construct
  source 1..20: mol_type = other RNA
ttaccttgttcggaaggagc

SEQ ID NO: 7145 - RNA, 20 nt, synthetic construct
  source 1..20: mol_type = other RNA
ttccgaacaaggtaaggagt

SEQ ID NO: 7146 - RNA, 20 nt, synthetic construct
  source 1..20: mol_type = other RNA
agcatccgtttaccattgaa

SEQ ID NO: 7147 - RNA, 20 nt, synthetic construct
  source 1..20: mol_type = other RNA
ggcaacactcgagcatccgt

SEQ ID NO: 7148 - RNA, 20 nt, synthetic construct
  source 1..20: mol_type = other RNA
agtgttgcctgagttctacc

SEQ ID NO: 7149 - RNA, 20 nt, synthetic construct
  source 1..20: mol_type = other RNA
tacatggtagaactcaggca

SEQ ID NO: 7150 - RNA, 20 nt, synthetic construct
  source 1..20: mol_type = other RNA
cccagagagtgcacggaggc

SEQ ID NO: 7151 - RNA, 20 nt, synthetic construct
  source 1..20: mol_type = other RNA
gtgcactctctgggggagcc

SEQ ID NO: 7152 - RNA, 20 nt, synthetic construct
  source 1..20: mol_type = other RNA
gctggctcccccagagagtg

SEQ ID NO: 7153 - RNA, 20 nt, synthetic construct
  source 1..20: mol_type = other RNA
ctgggggagccagcggagtg

SEQ ID NO: 7154 - RNA, 20 nt, synthetic construct
  source 1..20: mol_type = other RNA
gggggagccagcggagtgat

SEQ ID NO: 7155 - RNA, 20 nt, synthetic construct
  source 1..20: mol_type = other RNA
agggggatcgacttcaaaat

SEQ ID NO: 7156 - RNA, 20 nt, synthetic construct
  source 1..20: mol_type = other RNA
gtgtcccagccaaaattttt

SEQ ID NO: 7157 - RNA, 20 nt, synthetic construct
  source 1..20: mol_type = other RNA
ttccaagccagtaagctttt

SEQ ID NO: 7158 - RNA, 20 nt, synthetic construct
  source 1..20: mol_type = other RNA
gaatgctggctacttgaaga

SEQ ID NO: 7159 - RNA, 20 nt, synthetic construct
  source 1..20: mol_type = other RNA
gaatctgcaatgctgaagat

SEQ ID NO: 7160 - RNA, 20 nt, synthetic construct
  source 1..20: mol_type = other RNA
agagccacatttctcagaat

SEQ ID NO: 7161 - RNA, 20 nt, synthetic construct
  source 1..20: mol_type = other RNA
agggtgacaggctccagagc

SEQ ID NO: 7162 - RNA, 20 nt, synthetic construct
  source 1..20: mol_type = other RNA
ggagcctgtcaccctcgaga

SEQ ID NO: 7163 - RNA, 20 nt, synthetic construct
  source 1..20: mol_type = other RNA
taggtttctcgagggtgaca

SEQ ID NO: 7164 - RNA, 20 nt, synthetic construct
  source 1..20: mol_type = other RNA
agaaacctaagagggctgca

SEQ ID NO: 7165 - RNA, 20 nt, synthetic construct
  source 1..20: mol_type = other RNA
atagacccagggccacatgg

SEQ ID NO: 7166 - RNA, 20 nt, synthetic construct
  source 1..20: mol_type = other RNA
tgtactgctccatagaccca

SEQ ID NO: 7167 - RNA, 20 nt, synthetic construct
  source 1..20: mol_type = other RNA
cagtgctctaaggctcttca

SEQ ID NO: 7168 - RNA, 20 nt, synthetic construct
  source 1..20: mol_type = other RNA
aaggctcttcagccctaggc

SEQ ID NO: 7169 - RNA, 20 nt, synthetic construct
  source 1..20: mol_type = other RNA
cttcaaagcctagggctgaa

SEQ ID NO: 7170 - RNA, 20 nt, synthetic construct
  source 1..20: mol_type = other RNA
tcagccctaggctttgaagg

SEQ ID NO: 7171 - RNA, 20 nt, synthetic construct
  source 1..20: mol_type = other RNA
gtattcttaaacctctttct

SEQ ID NO: 7172 - RNA, 20 nt, synthetic construct
  source 1..20: mol_type = other RNA
ttctgatgacacttgtacct

SEQ ID NO: 7173 - RNA, 20 nt, synthetic construct
  source 1..20: mol_type = other RNA
caggtacaagtgtcatcaga

SEQ ID NO: 7174 - RNA, 20 nt, synthetic construct
  source 1..20: mol_type = other RNA
agacccctcacaggtacaag

SEQ ID NO: 7175 - RNA, 20 nt, synthetic construct
  source 1..20: mol_type = other RNA
ctagacccctcacaggtaca

SEQ ID NO: 7176 - RNA, 20 nt, synthetic construct
  source 1..20: mol_type = other RNA
ttctctctagacccctcaca

SEQ ID NO: 7177 - RNA, 20 nt, synthetic construct
  source 1..20: mol_type = other RNA
tactttactacaattcagga

SEQ ID NO: 7178 - RNA, 20 nt, synthetic construct
  source 1..20: mol_type = other RNA
tgccctgcatcctgaattgt

SEQ ID NO: 7179 - RNA, 20 nt, synthetic construct
  source 1..20: mol_type = other RNA
catgccctgcatcctgaatt

SEQ ID NO: 7180 - RNA, 20 nt, synthetic construct
  source 1..20: mol_type = other RNA
ctcctccaagggaagaagct

SEQ ID NO: 7181 - RNA, 20 nt, synthetic construct
  source 1..20: mol_type = other RNA
cctccaagggaagaagcttt

SEQ ID NO: 7182 - RNA, 20 nt, synthetic construct
  source 1..20: mol_type = other RNA
tccaagggaagaagcttttg

SEQ ID NO: 7183 - RNA, 20 nt, synthetic construct
  source 1..20: mol_type = other RNA
aagggaagaagcttttggcg

SEQ ID NO: 7184 - RNA, 20 nt, synthetic construct
  source 1..20: mol_type = other RNA
gggatgtgtgcacgccaaaa

SEQ ID NO: 7185 - RNA, 20 nt, synthetic construct
  source 1..20: mol_type = other RNA
gcccccgacagccaattacc

SEQ ID NO: 7186 - RNA, 20 nt, synthetic construct
  source 1..20: mol_type = other RNA
actgaatcttcatgcaaacg

SEQ ID NO: 7187 - RNA, 20 nt, synthetic construct
  source 1..20: mol_type = other RNA
cgaggtagcacctttctagg

SEQ ID NO: 7188 - RNA, 20 nt, synthetic construct
  source 1..20: mol_type = other RNA
ttggaaagtgagctcacgag

SEQ ID NO: 7189 - RNA, 20 nt, synthetic construct
  source 1..20: mol_type = other RNA
tgagctcactttccaatgag

SEQ ID NO: 7190 - RNA, 20 nt, synthetic construct
  source 1..20: mol_type = other RNA
ctttccaatgaggaatctga

SEQ ID NO: 7191 - RNA, 20 nt, synthetic construct
  source 1..20: mol_type = other RNA
aaggtgtcaggtgaaatatt

SEQ ID NO: 7192 - RNA, 20 nt, synthetic construct
  source 1..20: mol_type = other RNA
cattctagaactgtagtaag

SEQ ID NO: 7193 - RNA, 20 nt, synthetic construct
  source 1..20: mol_type = other RNA
catccatctgcctatggata

SEQ ID NO: 7194 - RNA, 20 nt, synthetic construct
  source 1..20: mol_type = other RNA
tttccttatccataggcaga

SEQ ID NO: 7195 - RNA, 20 nt, synthetic construct
  source 1..20: mol_type = other RNA
tagactcctttctggttgtg

SEQ ID NO: 7196 - RNA, 20 nt, synthetic construct
  source 1..20: mol_type = other RNA
tttctggttgtgtcacaaat

SEQ ID NO: 7197 - RNA, 20 nt, synthetic construct
  source 1..20: mol_type = other RNA
gagcatagagaaacatgtga

SEQ ID NO: 7198 - RNA, 20 nt, synthetic construct
  source 1..20: mol_type = other RNA
atgctcagagatactcagct

SEQ ID NO: 7199 - RNA, 20 nt, synthetic construct
  source 1..20: mol_type = other RNA
gagatactcagcttgatttc

SEQ ID NO: 7200 - RNA, 20 nt, synthetic construct
  source 1..20: mol_type = other RNA
gcttgatttcccgtgttttc

SEQ ID NO: 7201 - RNA, 20 nt, synthetic construct
  source 1..20: mol_type = other RNA
gtcggtgctgaaatgaaaac

SEQ ID NO: 7202 - RNA, 20 nt, synthetic construct
  source 1..20: mol_type = other RNA
tgcaccccaggcctttgctc

SEQ ID NO: 7203 - RNA, 20 nt, synthetic construct
  source 1..20: mol_type = other RNA
gtccattaccatggtagcac

SEQ ID NO: 7204 - RNA, 20 nt, synthetic construct
  source 1..20: mol_type = other RNA
ataactctgtccattaccat

SEQ ID NO: 7205 - RNA, 20 nt, synthetic construct
  source 1..20: mol_type = other RNA
accactgtcacaggaagaac

SEQ ID NO: 7206 - RNA, 20 nt, synthetic construct
  source 1..20: mol_type = other RNA
catagtcggaccccagaata

SEQ ID NO: 7207 - RNA, 20 nt, synthetic construct
  source 1..20: mol_type = other RNA
tatggtaaagaacaaagaca

SEQ ID NO: 7208 - RNA, 20 nt, synthetic construct
  source 1..20: mol_type = other RNA
tgtaacagaaacttcacttg

SEQ ID NO: 7209 - RNA, 20 nt, synthetic construct
  source 1..20: mol_type = other RNA
gcttgagacacatctcttgt

SEQ ID NO: 7210 - RNA, 20 nt, synthetic construct
  source 1..20: mol_type = other RNA
agctgagttctccgaactca

SEQ ID NO: 7211 - RNA, 20 nt, synthetic construct
  source 1..20: mol_type = other RNA
gaactcaacttgtgacagat

SEQ ID NO: 7212 - RNA, 20 nt, synthetic construct
  source 1..20: mol_type = other RNA
acttgtgacagatgcagatg

SEQ ID NO: 7213 - RNA, 20 nt, synthetic construct
  source 1..20: mol_type = other RNA
aaggcaatcatcctgagaca

SEQ ID NO: 7214 - RNA, 20 nt, synthetic construct
  source 1..20: mol_type = other RNA
ggatgattgccttggagcta

SEQ ID NO: 7215 - RNA, 20 nt, synthetic construct
  source 1..20: mol_type = other RNA
gacccttagctccaaggcaa

SEQ ID NO: 7216 - RNA, 20 nt, synthetic construct
  source 1..20: mol_type = other RNA
cagacccttagctccaaggc

SEQ ID NO: 7217 - RNA, 20 nt, synthetic construct
  source 1..20: mol_type = other RNA
ctctccttcctcctagttct

SEQ ID NO: 7218 - RNA, 20 nt, synthetic construct
  source 1..20: mol_type = other RNA
atagaactaggaggaaggag

SEQ ID NO: 7219 - RNA, 20 nt, synthetic construct
  source 1..20: mol_type = other RNA
ccttcctcctagttctattg

SEQ ID NO: 7220 - RNA, 20 nt, synthetic construct
  source 1..20: mol_type = other RNA
ttcctcctagttctattgag

SEQ ID NO: 7221 - RNA, 20 nt, synthetic construct
  source 1..20: mol_type = other RNA
tagttctattgagcagaagg

SEQ ID NO: 7222 - RNA, 20 nt, synthetic construct
  source 1..20: mol_type = other RNA
agatttcccttctgctcaat

SEQ ID NO: 7223 - RNA, 20 nt, synthetic construct
  source 1..20: mol_type = other RNA
cctccagatttcccttctgc

SEQ ID NO: 7224 - RNA, 20 nt, synthetic construct
  source 1..20: mol_type = other RNA
tcacctccagatttcccttc

SEQ ID NO: 7225 - RNA, 20 nt, synthetic construct
  source 1..20: mol_type = other RNA
attgacgtttagttggtgtt

SEQ ID NO: 7226 - RNA, 20 nt, synthetic construct
  source 1..20: mol_type = other RNA
tgaacccagagagaaaaggc

SEQ ID NO: 7227 - RNA, 20 nt, synthetic construct
  source 1..20: mol_type = other RNA
ctgggttcaagaggaaagaa

SEQ ID NO: 7228 - RNA, 20 nt, synthetic construct
  source 1..20: mol_type = other RNA
gggttcaagaggaaagaata

SEQ ID NO: 7229 - RNA, 20 nt, synthetic construct
  source 1..20: mol_type = other RNA
ttcctaagtaccagtggcct

SEQ ID NO: 7230 - RNA, 20 nt, synthetic construct
  source 1..20: mol_type = other RNA
tgctgggaacctgtatccct

SEQ ID NO: 7231 - RNA, 20 nt, synthetic construct
  source 1..20: mol_type = other RNA
tctgccttccttccttggat

SEQ ID NO: 7232 - RNA, 20 nt, synthetic construct
  source 1..20: mol_type = other RNA
catctgccttccttccttgg

SEQ ID NO: 7233 - RNA, 20 nt, synthetic construct
  source 1..20: mol_type = other RNA
gtgctgactctcatctgcct

SEQ ID NO: 7234 - RNA, 20 nt, synthetic construct
  source 1..20: mol_type = other RNA
ctgtgctgactctcatctgc

SEQ ID NO: 7235 - RNA, 20 nt, synthetic construct
  source 1..20: mol_type = other RNA
atccacccatcccttttact

SEQ ID NO: 7236 - RNA, 20 nt, synthetic construct
  source 1..20: mol_type = other RNA
ccatccacccatccctttta

SEQ ID NO: 7237 - RNA, 20 nt, synthetic construct
  source 1..20: mol_type = other RNA
ggtagtcgcttgtggccaaa

SEQ ID NO: 7238 - RNA, 20 nt, synthetic construct
  source 1..20: mol_type = other RNA
accatctgttgtcccacatg

SEQ ID NO: 7239 - RNA, 20 nt, synthetic construct
  source 1..20: mol_type = other RNA
aggtcctctaccatctgttg

SEQ ID NO: 7240 - RNA, 20 nt, synthetic construct
  source 1..20: mol_type = other RNA
attctctaggtcctctacca

SEQ ID NO: 7241 - RNA, 20 nt, synthetic construct
  source 1..20: mol_type = other RNA
caattctctaggtcctctac

SEQ ID NO: 7242 - RNA, 20 nt, synthetic construct
  source 1..20: mol_type = other RNA
ctcaattctctaggtcctct

SEQ ID NO: 7243 - RNA, 20 nt, synthetic construct
  source 1..20: mol_type = other RNA
actccgcagatgccttggct

SEQ ID NO: 7244 - RNA, 20 nt, synthetic construct
  source 1..20: mol_type = other RNA
gcagatgccttggctttctt

SEQ ID NO: 7245 - RNA, 20 nt, synthetic construct
  source 1..20: mol_type = other RNA
ttgctattcagtgcaggaag

SEQ ID NO: 7246 - RNA, 20 nt, synthetic construct
  source 1..20: mol_type = other RNA
atctccttgctattcagtgc

SEQ ID NO: 7247 - RNA, 20 nt, synthetic construct
  source 1..20: mol_type = other RNA
attcagcaagatggctacag

SEQ ID NO: 7248 - RNA, 20 nt, synthetic construct
  source 1..20: mol_type = other RNA
tccattcagcaagatggcta

SEQ ID NO: 7249 - RNA, 20 nt, synthetic construct
  source 1..20: mol_type = other RNA
cctccattcagcaagatggc

SEQ ID NO: 7250 - RNA, 20 nt, synthetic construct
  source 1..20: mol_type = other RNA
aatccctctcctccattcag

SEQ ID NO: 7251 - RNA, 20 nt, synthetic construct
  source 1..20: mol_type = other RNA
acacaaaccagttcttattt

SEQ ID NO: 7252 - RNA, 20 nt, synthetic construct
  source 1..20: mol_type = other RNA
tttcctccacacaaaccagt

SEQ ID NO: 7253 - RNA, 20 nt, synthetic construct
  source 1..20: mol_type = other RNA
acaaatacgcatagaagtct

SEQ ID NO: 7254 - RNA, 20 nt, synthetic construct
  source 1..20: mol_type = other RNA
tccagtcgttggcctgacat

SEQ ID NO: 7255 - RNA, 20 nt, synthetic construct
  source 1..20: mol_type = other RNA
agtcgttggcctgacatgac

SEQ ID NO: 7256 - RNA, 20 nt, synthetic construct
  source 1..20: mol_type = other RNA
tggaaccatttcctgtgcac

SEQ ID NO: 7257 - RNA, 20 nt, synthetic construct
  source 1..20: mol_type = other RNA
gtaaatgttctttgccacac

SEQ ID NO: 7258 - RNA, 20 nt, synthetic construct
  source 1..20: mol_type = other RNA
tgtacttgctgtttctcagt

SEQ ID NO: 7259 - RNA, 20 nt, synthetic construct
  source 1..20: mol_type = other RNA
tctttattgagcttcctgtg

SEQ ID NO: 7260 - RNA, 20 nt, synthetic construct
  source 1..20: mol_type = other RNA
cttctttattgagcttcctg

SEQ ID NO: 7261 - RNA, 20 nt, synthetic construct
  source 1..20: mol_type = other RNA
ctcttctttattgagcttcc

SEQ ID NO: 7262 - RNA, 20 nt, synthetic construct
  source 1..20: mol_type = other RNA
ataaagaagagagagatcac

SEQ ID NO: 7263 - RNA, 20 nt, synthetic construct
  source 1..20: mol_type = other RNA
agtatcccagagtgctatgt

SEQ ID NO: 7264 - RNA, 20 nt, synthetic construct
  source 1..20: mol_type = other RNA
gggatactggagttcttccc

SEQ ID NO: 7265 - RNA, 20 nt, synthetic construct
  source 1..20: mol_type = other RNA
ggtctagctgggaagaactc

SEQ ID NO: 7266 - RNA, 20 nt, synthetic construct
  source 1..20: mol_type = other RNA
ctggtctagctgggaagaac

SEQ ID NO: 7267 - RNA, 20 nt, synthetic construct
  source 1..20: mol_type = other RNA
gtgaggactctctggtctag

SEQ ID NO: 7268 - RNA, 20 nt, synthetic construct
  source 1..20: mol_type = other RNA
cggagcacattgccaattca

SEQ ID NO: 7269 - RNA, 20 nt, synthetic construct
  source 1..20: mol_type = other RNA
actgaattggcaatgtgctc

SEQ ID NO: 7270 - RNA, 20 nt, synthetic construct
  source 1..20: mol_type = other RNA
caggcacttcattgattgga

SEQ ID NO: 7271 - RNA, 20 nt, synthetic construct
  source 1..20: mol_type = other RNA
cacaggcacttcattgattg

SEQ ID NO: 7272 - RNA, 20 nt, synthetic construct
  source 1..20: mol_type = other RNA
actctctttagaagtaaaca

SEQ ID NO: 7273 - RNA, 20 nt, synthetic construct
  source 1..20: mol_type = other RNA
ctttagaagtaaacaacaaa

SEQ ID NO: 7274 - RNA, 20 nt, synthetic construct
  source 1..20: mol_type = other RNA
ttagaagtaaacaacaaagt

SEQ ID NO: 7275 - RNA, 20 nt, synthetic construct
  source 1..20: mol_type = other RNA
gcggataccgcatagctgag

SEQ ID NO: 7276 - RNA, 20 nt, synthetic construct
  source 1..20: mol_type = other RNA
ctctgcggataccgcatagc

SEQ ID NO: 7277 - RNA, 20 nt, synthetic construct
  source 1..20: mol_type = other RNA
gctatgcggtatccgcagag

SEQ ID NO: 7278 - RNA, 20 nt, synthetic construct
  source 1..20: mol_type = other RNA
ttcctgagcctgtttgtatt

SEQ ID NO: 7279 - RNA, 20 nt, synthetic construct
  source 1..20: mol_type = other RNA
cattcctgagcctgtttgta

SEQ ID NO: 7280 - RNA, 20 nt, synthetic construct
  source 1..20: mol_type = other RNA
ggaatgagagaaatgattag

SEQ ID NO: 7281 - RNA, 20 nt, synthetic construct
  source 1..20: mol_type = other RNA
tgatatgatatctgctttct

SEQ ID NO: 7282 - RNA, 20 nt, synthetic construct
  source 1..20: mol_type = other RNA
ttaatttaatttggctattc

SEQ ID NO: 7283 - RNA, 20 nt, synthetic construct
  source 1..20: mol_type = other RNA
gaaacgtctaatttgatcag

SEQ ID NO: 7284 - RNA, 20 nt, synthetic construct
  source 1..20: mol_type = other RNA
aaaattgtgtgttgggtaat

SEQ ID NO: 7285 - RNA, 20 nt, synthetic construct
  source 1..20: mol_type = other RNA
ttctgtaggttctctaaaat

SEQ ID NO: 7286 - RNA, 20 nt, synthetic construct
  source 1..20: mol_type = other RNA
cacacacgcagaaactcaca

SEQ ID NO: 7287 - RNA, 20 nt, synthetic construct
  source 1..20: mol_type = other RNA
caagttctaacacacacaga

SEQ ID NO: 7288 - RNA, 20 nt, synthetic construct
  source 1..20: mol_type = other RNA
cttaattttatatttcactg

SEQ ID NO: 7289 - RNA, 20 nt, synthetic construct
  source 1..20: mol_type = other RNA
cagacatgtaggaaaatatg

SEQ ID NO: 7290 - RNA, 20 nt, synthetic construct
  source 1..20: mol_type = other RNA
ttactgtgacttgcttccca

SEQ ID NO: 7291 - RNA, 20 nt, synthetic construct
  source 1..20: mol_type = other RNA
cttgctctttactgtgactt

SEQ ID NO: 7292 - RNA, 20 nt, synthetic construct
  source 1..20: mol_type = other RNA
agggatcatatagggaattt

SEQ ID NO: 7293 - RNA, 20 nt, synthetic construct
  source 1..20: mol_type = other RNA
tgacaggtttcttcttatta

SEQ ID NO: 7294 - RNA, 20 nt, synthetic construct
  source 1..20: mol_type = other RNA
agtttctcgtgacaggtttc

SEQ ID NO: 7295 - RNA, 20 nt, synthetic construct
  source 1..20: mol_type = other RNA
ttttcctccagtttctcgtg

SEQ ID NO: 7296 - RNA, 20 nt, synthetic construct
  source 1..20: mol_type = other RNA
gaaacactggaagccagata

SEQ ID NO: 7297 - RNA, 20 nt, synthetic construct
  source 1..20: mol_type = other RNA
ttttgttcctgattatcatt

SEQ ID NO: 7298 - RNA, 20 nt, synthetic construct
  source 1..20: mol_type = other RNA
tgttacataagcctgctgat

SEQ ID NO: 7299 - RNA, 20 nt, synthetic construct
  source 1..20: mol_type = other RNA
cttgttacataagcctgctg

SEQ ID NO: 7300 - RNA, 20 nt, synthetic construct
  source 1..20: mol_type = other RNA
tttacaaagatatagaaatt

SEQ ID NO: 7301 - RNA, 20 nt, synthetic construct
  source 1..20: mol_type = other RNA
catttacaaagatatagaaa

SEQ ID NO: 7302 - RNA, 20 nt, synthetic construct
  source 1..20: mol_type = other RNA
acatatgctgaagttaaata

SEQ ID NO: 7303 - RNA, 20 nt, synthetic construct
  source 1..20: mol_type = other RNA
tgcacgatggtgtgtcatat

SEQ ID NO: 7304 - RNA, 20 nt, synthetic construct
  source 1..20: mol_type = other RNA
aggatttgcaatatcccttc

SEQ ID NO: 7305 - RNA, 20 nt, synthetic construct
  source 1..20: mol_type = other RNA
gagttcaaacctttgtgatt

SEQ ID NO: 7306 - RNA, 20 nt, synthetic construct
  source 1..20: mol_type = other RNA
gaggtttttggtataataag

SEQ ID NO: 7307 - RNA, 20 nt, synthetic construct
  source 1..20: mol_type = other RNA
tttgaatgcatggactattc

SEQ ID NO: 7308 - RNA, 20 nt, synthetic construct
  source 1..20: mol_type = other RNA
tgaaagacttctagttcttc

SEQ ID NO: 7309 - RNA, 20 nt, synthetic construct
  source 1..20: mol_type = other RNA
ggctcttatacatccagttg

SEQ ID NO: 7310 - RNA, 20 nt, synthetic construct
  source 1..20: mol_type = other RNA
tatacatccagttgctcatt

SEQ ID NO: 7311 - RNA, 20 nt, synthetic construct
  source 1..20: mol_type = other RNA
attccaggaagctggttcaa

SEQ ID NO: 7312 - RNA, 20 nt, synthetic construct
  source 1..20: mol_type = other RNA
ttgaaccagcttcctggaat

SEQ ID NO: 7313 - RNA, 20 nt, synthetic construct
  source 1..20: mol_type = other RNA
accccagaccctccattcca

SEQ ID NO: 7314 - RNA, 20 nt, synthetic construct
  source 1..20: mol_type = other RNA
agacttgtggcctagtctca

SEQ ID NO: 7315 - RNA, 20 nt, synthetic construct
  source 1..20: mol_type = other RNA
agagactctagacttgtggc

SEQ ID NO: 7316 - RNA, 20 nt, synthetic construct
  source 1..20: mol_type = other RNA
ctagagactctagacttgtg

SEQ ID NO: 7317 - RNA, 20 nt, synthetic construct
  source 1..20: mol_type = other RNA
agagagacagtgttggaacc

SEQ ID NO: 7318 - RNA, 20 nt, synthetic construct
  source 1..20: mol_type = other RNA
ggctgcctgagaaaatggga

SEQ ID NO: 7319 - RNA, 20 nt, synthetic construct
  source 1..20: mol_type = other RNA
ggcagccagaggtcatgaat

SEQ ID NO: 7320 - RNA, 20 nt, synthetic construct
  source 1..20: mol_type = other RNA
cattcatgacctctggctgc

SEQ ID NO: 7321 - RNA, 20 nt, synthetic construct
  source 1..20: mol_type = other RNA
cagtatcctcacattcatga

SEQ ID NO: 7322 - RNA, 20 nt, synthetic construct
  source 1..20: mol_type = other RNA
aacctcccagtatcctcaca

SEQ ID NO: 7323 - RNA, 20 nt, synthetic construct
  source 1..20: mol_type = other RNA
caagaacgttgctccaacct

SEQ ID NO: 7324 - RNA, 20 nt, synthetic construct
  source 1..20: mol_type = other RNA
tccttatgcctcccaagaac

SEQ ID NO: 7325 - RNA, 20 nt, synthetic construct
  source 1..20: mol_type = other RNA
cctgctttgccccctaatgc

SEQ ID NO: 7326 - RNA, 20 nt, synthetic construct
  source 1..20: mol_type = other RNA
gctgctccgtagctgtccga

SEQ ID NO: 7327 - RNA, 20 nt, synthetic construct
  source 1..20: mol_type = other RNA
gtagctgtccgacctcttca

SEQ ID NO: 7328 - RNA, 20 nt, synthetic construct
  source 1..20: mol_type = other RNA
tcagatctcttagtccaccc

SEQ ID NO: 7329 - RNA, 20 nt, synthetic construct
  source 1..20: mol_type = other RNA
tagtccaccctgccgtcttc

SEQ ID NO: 7330 - RNA, 20 nt, synthetic construct
  source 1..20: mol_type = other RNA
gggactgagggaaaggggga

SEQ ID NO: 7331 - RNA, 20 nt, synthetic construct
  source 1..20: mol_type = other RNA
tccccctttccctcagtccc

SEQ ID NO: 7332 - RNA, 20 nt, synthetic construct
  source 1..20: mol_type = other RNA
gtcccggagtagctgcggcc

SEQ ID NO: 7333 - RNA, 20 nt, synthetic construct
  source 1..20: mol_type = other RNA
gctggccgcagctactccgg

SEQ ID NO: 7334 - RNA, 20 nt, synthetic construct
  source 1..20: mol_type = other RNA
gtctaccctctgctggccgc

SEQ ID NO: 7335 - RNA, 20 nt, synthetic construct
  source 1..20: mol_type = other RNA
cagtctaccctctgctggcc

SEQ ID NO: 7336 - RNA, 20 nt, synthetic construct
  source 1..20: mol_type = other RNA
tgctctcagtctaccctctg

SEQ ID NO: 7337 - RNA, 20 nt, synthetic construct
  source 1..20: mol_type = other RNA
cctgctctcagtctaccctc

SEQ ID NO: 7338 - RNA, 20 nt, synthetic construct
  source 1..20: mol_type = other RNA
agaaggggttcctaggcagg

SEQ ID NO: 7339 - RNA, 20 nt, synthetic construct
  source 1..20: mol_type = other RNA
caggcaggatgcagtatctc

SEQ ID NO: 7340 - RNA, 20 nt, synthetic construct
  source 1..20: mol_type = other RNA
aagctgccctggaaaacttg

SEQ ID NO: 7341 - RNA, 20 nt, synthetic construct
  source 1..20: mol_type = other RNA
aagacttctcaaagctgccc

SEQ ID NO: 7342 - RNA, 20 nt, synthetic construct
  source 1..20: mol_type = other RNA
acctttcccacagaaaagca

SEQ ID NO: 7343 - RNA, 20 nt, synthetic construct
  source 1..20: mol_type = other RNA
atacgtagtgaaaaggctct

SEQ ID NO: 7344 - RNA, 20 nt, synthetic construct
  source 1..20: mol_type = other RNA
atgtactcaatacgtagtga

SEQ ID NO: 7345 - RNA, 20 nt, synthetic construct
  source 1..20: mol_type = other RNA
cactctatgtactcaatacg

SEQ ID NO: 7346 - RNA, 20 nt, synthetic construct
  source 1..20: mol_type = other RNA
tggatgacgtgcgttttctg

SEQ ID NO: 7347 - RNA, 20 nt, synthetic construct
  source 1..20: mol_type = other RNA
cacattagaatatgaagtcc

SEQ ID NO: 7348 - RNA, 20 nt, synthetic construct
  source 1..20: mol_type = other RNA
gtaggacttcatattctaat

SEQ ID NO: 7349 - RNA, 20 nt, synthetic construct
  source 1..20: mol_type = other RNA
cggtaggacttcatattcta

SEQ ID NO: 7350 - RNA, 20 nt, synthetic construct
  source 1..20: mol_type = other RNA
ctcggtaggacttcatattc

SEQ ID NO: 7351 - RNA, 20 nt, synthetic construct
  source 1..20: mol_type = other RNA
gtatctctctcggtaggact

SEQ ID NO: 7352 - RNA, 20 nt, synthetic construct
  source 1..20: mol_type = other RNA
ggaataactggtatgggttt

SEQ ID NO: 7353 - RNA, 20 nt, synthetic construct
  source 1..20: mol_type = other RNA
ctggaataactggtatgggt

SEQ ID NO: 7354 - RNA, 20 nt, synthetic construct
  source 1..20: mol_type = other RNA
ttctgccttctgcccaatcc

SEQ ID NO: 7355 - RNA, 20 nt, synthetic construct
  source 1..20: mol_type = other RNA
gatcgtttttcggccacgtg

SEQ ID NO: 7356 - RNA, 20 nt, synthetic construct
  source 1..20: mol_type = other RNA
gtgtttctaagaagcgtttg

SEQ ID NO: 7357 - RNA, 20 nt, synthetic construct
  source 1..20: mol_type = other RNA
tacttaatagattattacta

SEQ ID NO: 7358 - RNA, 20 nt, synthetic construct
  source 1..20: mol_type = other RNA
catacttaatagattattac

SEQ ID NO: 7359 - RNA, 20 nt, synthetic construct
  source 1..20: mol_type = other RNA
gcacatctctcatacttaat

SEQ ID NO: 7360 - RNA, 20 nt, synthetic construct
  source 1..20: mol_type = other RNA
atcactaatcgtctctgcac

SEQ ID NO: 7361 - RNA, 20 nt, synthetic construct
  source 1..20: mol_type = other RNA
cgatcactaatcgtctctgc

SEQ ID NO: 7362 - RNA, 20 nt, synthetic construct
  source 1..20: mol_type = other RNA
tttgtgctgcaacaaggtca

SEQ ID NO: 7363 - RNA, 20 nt, synthetic construct
  source 1..20: mol_type = other RNA
cctttgtgctgcaacaaggt

SEQ ID NO: 7364 - RNA, 20 nt, synthetic construct
  source 1..20: mol_type = other RNA
ctcctttgtgctgcaacaag

SEQ ID NO: 7365 - RNA, 20 nt, synthetic construct
  source 1..20: mol_type = other RNA
tgtgacgtgtatcgttttgg

SEQ ID NO: 7366 - RNA, 20 nt, synthetic construct
  source 1..20: mol_type = other RNA
tataacaataaggagctgcc

SEQ ID NO: 7367 - RNA, 20 nt, synthetic construct
  source 1..20: mol_type = other RNA
ttattgttatacgagggatc

SEQ ID NO: 7368 - RNA, 20 nt, synthetic construct
  source 1..20: mol_type = other RNA
cacctgacaccgggatccct

SEQ ID NO: 7369 - RNA, 20 nt, synthetic construct
  source 1..20: mol_type = other RNA
gacgcagaagggactgccgt

SEQ ID NO: 7370 - RNA, 20 nt, synthetic construct
  source 1..20: mol_type = other RNA
gactgttaccccggttccaa

SEQ ID NO: 7371 - RNA, 20 nt, synthetic construct
  source 1..20: mol_type = other RNA
aggcttggaaccggggtaac

SEQ ID NO: 7372 - RNA, 20 nt, synthetic construct
  source 1..20: mol_type = other RNA
ttaccttgttcggaaggagc

SEQ ID NO: 7373 - RNA, 20 nt, synthetic construct
  source 1..20: mol_type = other RNA
ttccgaacaaggtaaggagt

SEQ ID NO: 7374 - RNA, 20 nt, synthetic construct
  source 1..20: mol_type = other RNA
agcatccgtttaccattgaa

SEQ ID NO: 7375 - RNA, 20 nt, synthetic construct
  source 1..20: mol_type = other RNA
ggcaacactcgagcatccgt

SEQ ID NO: 7376 - RNA, 20 nt, synthetic construct
  source 1..20: mol_type = other RNA
agtgttgcctgagttctacc

SEQ ID NO: 7377 - RNA, 20 nt, synthetic construct
  source 1..20: mol_type = other RNA
tacatggtagaactcaggca

SEQ ID NO: 7378 - RNA, 20 nt, synthetic construct
  source 1..20: mol_type = other RNA
cccagagagtgcacggaggc

SEQ ID NO: 7379 - RNA, 20 nt, synthetic construct
  source 1..20: mol_type = other RNA
gtgcactctctgggggagcc

SEQ ID NO: 7380 - RNA, 20 nt, synthetic construct
  source 1..20: mol_type = other RNA
gctggctcccccagagagtg

SEQ ID NO: 7381 - RNA, 20 nt, synthetic construct
  source 1..20: mol_type = other RNA
ctgggggagccagcggagtg

SEQ ID NO: 7382 - RNA, 20 nt, synthetic construct
  source 1..20: mol_type = other RNA
gggggagccagcggagtgat

SEQ ID NO: 7383 - RNA, 20 nt, synthetic construct
  source 1..20: mol_type = other RNA
agggggatcgacttcaaaat

SEQ ID NO: 7384 - RNA, 20 nt, synthetic construct
  source 1..20: mol_type = other RNA
gtgtcccagccaaaattttt

SEQ ID NO: 7385 - RNA, 20 nt, synthetic construct
  source 1..20: mol_type = other RNA
ttccaagccagtaagctttt

SEQ ID NO: 7386 - RNA, 20 nt, synthetic construct
  source 1..20: mol_type = other RNA
gaatgctggctacttgaaga

SEQ ID NO: 7387 - RNA, 20 nt, synthetic construct
  source 1..20: mol_type = other RNA
gaatctgcaatgctgaagat

SEQ ID NO: 7388 - RNA, 20 nt, synthetic construct
  source 1..20: mol_type = other RNA
agagccacatttctcagaat

SEQ ID NO: 7389 - RNA, 20 nt, synthetic construct
  source 1..20: mol_type = other RNA
aggatgacaggctccagagc

SEQ ID NO: 7390 - RNA, 20 nt, synthetic construct
  source 1..20: mol_type = other RNA
ggagcctgtcatcctcgaga

SEQ ID NO: 7391 - RNA, 20 nt, synthetic construct
  source 1..20: mol_type = other RNA
agaaacctaacagggctgca

SEQ ID NO: 7392 - RNA, 20 nt, synthetic construct
  source 1..20: mol_type = other RNA
atagacccaggaccatatgg

SEQ ID NO: 7393 - RNA, 20 nt, synthetic construct
  source 1..20: mol_type = other RNA
tatactgctccatagaccca

SEQ ID NO: 7394 - RNA, 20 nt, synthetic construct
  source 1..20: mol_type = other RNA
caatgctctaaggctcttca

SEQ ID NO: 7395 - RNA, 20 nt, synthetic construct
  source 1..20: mol_type = other RNA
aaggctcttcagtcctaggc

SEQ ID NO: 7396 - RNA, 20 nt, synthetic construct
  source 1..20: mol_type = other RNA
cttcaaagcctaggactgaa

SEQ ID NO: 7397 - RNA, 20 nt, synthetic construct
  source 1..20: mol_type = other RNA
tcagtcctaggctttgaagg

SEQ ID NO: 7398 - RNA, 20 nt, synthetic construct
  source 1..20: mol_type = other RNA
gtgttcttaaacctctttct

SEQ ID NO: 7399 - RNA, 20 nt, synthetic construct
  source 1..20: mol_type = other RNA
ttctgatggcacttgtacct

SEQ ID NO: 7400 - RNA, 20 nt, synthetic construct
  source 1..20: mol_type = other RNA
caggtacaagtgccatcaga

SEQ ID NO: 7401 - RNA, 20 nt, synthetic construct
  source 1..20: mol_type = other RNA
agacccctcacaggtacaag

SEQ ID NO: 7402 - RNA, 20 nt, synthetic construct
  source 1..20: mol_type = other RNA
ctagacccctcacaggtaca

SEQ ID NO: 7403 - RNA, 20 nt, synthetic construct
  source 1..20: mol_type = other RNA
tttactgcaattcaggatgc

SEQ ID NO: 7404 - RNA, 20 nt, synthetic construct
  source 1..20: mol_type = other RNA
tgccctgcatcctgaattgc

SEQ ID NO: 7405 - RNA, 20 nt, synthetic construct
  source 1..20: mol_type = other RNA
ctcctccaagggaagaaggt

SEQ ID NO: 7406 - RNA, 20 nt, synthetic construct
  source 1..20: mol_type = other RNA
tccaagggaagaaggttttg

SEQ ID NO: 7407 - RNA, 20 nt, synthetic construct
  source 1..20: mol_type = other RNA
aagggaagaaggttttggcg

SEQ ID NO: 7408 - RNA, 20 nt, synthetic construct
  source 1..20: mol_type = other RNA
aggatgtgtgcacgccaaaa

SEQ ID NO: 7409 - RNA, 20 nt, synthetic construct
  source 1..20: mol_type = other RNA
ggcttccaggccatggggca

SEQ ID NO: 7410 - RNA, 20 nt, synthetic construct
  source 1..20: mol_type = other RNA
tctgccctcgacagccaatt

SEQ ID NO: 7411 - RNA, 20 nt, synthetic construct
  source 1..20: mol_type = other RNA
gccctcgacagccaattacc

SEQ ID NO: 7412 - RNA, 20 nt, synthetic construct
  source 1..20: mol_type = other RNA
acagccaattaccacctgca

SEQ ID NO: 7413 - RNA, 20 nt, synthetic construct
  source 1..20: mol_type = other RNA
actgaatgttcatacaaagg

SEQ ID NO: 7414 - RNA, 20 nt, synthetic construct
  source 1..20: mol_type = other RNA
cgaagtagcacctttctatg

SEQ ID NO: 7415 - RNA, 20 nt, synthetic construct
  source 1..20: mol_type = other RNA
ctgcaaagtgcgctcacgaa

SEQ ID NO: 7416 - RNA, 20 nt, synthetic construct
  source 1..20: mol_type = other RNA
ttctcactgcaaagtgcgct

SEQ ID NO: 7417 - RNA, 20 nt, synthetic construct
  source 1..20: mol_type = other RNA
catccatctgcctacaggta

SEQ ID NO: 7418 - RNA, 20 nt, synthetic construct
  source 1..20: mol_type = other RNA
tagactcctttctggttgtg

SEQ ID NO: 7419 - RNA, 20 nt, synthetic construct
  source 1..20: mol_type = other RNA
tttctggttgtgtcataaat

SEQ ID NO: 7420 - RNA, 20 nt, synthetic construct
  source 1..20: mol_type = other RNA
gagaataacgaaatatgtga

SEQ ID NO: 7421 - RNA, 20 nt, synthetic construct
  source 1..20: mol_type = other RNA
gagatactcagtttatttct

SEQ ID NO: 7422 - RNA, 20 nt, synthetic construct
  source 1..20: mol_type = other RNA
gtttatttcttgtgttttca

SEQ ID NO: 7423 - RNA, 20 nt, synthetic construct
  source 1..20: mol_type = other RNA
gtcggtgctgaaatgaaaac

SEQ ID NO: 7424 - RNA, 20 nt, synthetic construct
  source 1..20: mol_type = other RNA
gctcagtcggtgctgaaatg

SEQ ID NO: 7425 - RNA, 20 nt, synthetic construct
  source 1..20: mol_type = other RNA
tgcaccccaggcctctgctc

SEQ ID NO: 7426 - RNA, 20 nt, synthetic construct
  source 1..20: mol_type = other RNA
gtccattaccgtggtagcac

SEQ ID NO: 7427 - RNA, 20 nt, synthetic construct
  source 1..20: mol_type = other RNA
ataactctgtccattaccgt

SEQ ID NO: 7428 - RNA, 20 nt, synthetic construct
  source 1..20: mol_type = other RNA
accactgtcactggaagaac

SEQ ID NO: 7429 - RNA, 20 nt, synthetic construct
  source 1..20: mol_type = other RNA
catagtcggaccccagaata

SEQ ID NO: 7430 - RNA, 20 nt, synthetic construct
  source 1..20: mol_type = other RNA
tatggtaaagaacaaagaca

SEQ ID NO: 7431 - RNA, 20 nt, synthetic construct
  source 1..20: mol_type = other RNA
tgtcacagaaacttcagttg

SEQ ID NO: 7432 - RNA, 20 nt, synthetic construct
  source 1..20: mol_type = other RNA
gcttgaagcatgtctcttgt

SEQ ID NO: 7433 - RNA, 20 nt, synthetic construct
  source 1..20: mol_type = other RNA
gaactcaacttgtgtcagat

SEQ ID NO: 7434 - RNA, 20 nt, synthetic construct
  source 1..20: mol_type = other RNA
acttgtgtcagattcagatg

SEQ ID NO: 7435 - RNA, 20 nt, synthetic construct
  source 1..20: mol_type = other RNA
aaggaaatcatcctgagaca

SEQ ID NO: 7436 - RNA, 20 nt, synthetic construct
  source 1..20: mol_type = other RNA
ggatgatttccttggagcta

SEQ ID NO: 7437 - RNA, 20 nt, synthetic construct
  source 1..20: mol_type = other RNA
gacccttagctccaaggaaa

SEQ ID NO: 7438 - RNA, 20 nt, synthetic construct
  source 1..20: mol_type = other RNA
cagacccttagctccaagga

SEQ ID NO: 7439 - RNA, 20 nt, synthetic construct
  source 1..20: mol_type = other RNA
tctctcagacccttagctcc

SEQ ID NO: 7440 - RNA, 20 nt, synthetic construct
  source 1..20: mol_type = other RNA
acaaaactaggaggaaggtg

SEQ ID NO: 7441 - RNA, 20 nt, synthetic construct
  source 1..20: mol_type = other RNA
ccttcctcctagttttgtgg

SEQ ID NO: 7442 - RNA, 20 nt, synthetic construct
  source 1..20: mol_type = other RNA
tagttttgtggagcagaagg

SEQ ID NO: 7443 - RNA, 20 nt, synthetic construct
  source 1..20: mol_type = other RNA
tttcccttctgctccacaaa

SEQ ID NO: 7444 - RNA, 20 nt, synthetic construct
  source 1..20: mol_type = other RNA
tcatttcccttctgctccac

SEQ ID NO: 7445 - RNA, 20 nt, synthetic construct
  source 1..20: mol_type = other RNA
cctcctcatttcccttctgc

SEQ ID NO: 7446 - RNA, 20 nt, synthetic construct
  source 1..20: mol_type = other RNA
tcgcctcctcatttcccttc

SEQ ID NO: 7447 - RNA, 20 nt, synthetic construct
  source 1..20: mol_type = other RNA
tgagcccagacagaaaaggc

SEQ ID NO: 7448 - RNA, 20 nt, synthetic construct
  source 1..20: mol_type = other RNA
tgaggaaagtttatgtgctt

SEQ ID NO: 7449 - RNA, 20 nt, synthetic construct
  source 1..20: mol_type = other RNA
ctattggaatacaggtagaa

SEQ ID NO: 7450 - RNA, 20 nt, synthetic construct
  source 1..20: mol_type = other RNA
tggtcctaagtaccagtggc

SEQ ID NO: 7451 - RNA, 20 nt, synthetic construct
  source 1..20: mol_type = other RNA
atcctttcaggccactggta

SEQ ID NO: 7452 - RNA, 20 nt, synthetic construct
  source 1..20: mol_type = other RNA
tgctgggaacctctatcctt

SEQ ID NO: 7453 - RNA, 20 nt, synthetic construct
  source 1..20: mol_type = other RNA
tctgccttccttccttggat

SEQ ID NO: 7454 - RNA, 20 nt, synthetic construct
  source 1..20: mol_type = other RNA
catctgccttccttccttgg

SEQ ID NO: 7455 - RNA, 20 nt, synthetic construct
  source 1..20: mol_type = other RNA
gtgctgactctcatctgcct

SEQ ID NO: 7456 - RNA, 20 nt, synthetic construct
  source 1..20: mol_type = other RNA
ctgtgctgactctcatctgc

SEQ ID NO: 7457 - RNA, 20 nt, synthetic construct
  source 1..20: mol_type = other RNA
accatctgttgtcccacatg

SEQ ID NO: 7458 - RNA, 20 nt, synthetic construct
  source 1..20: mol_type = other RNA
aggtcctctaccatctgttg

SEQ ID NO: 7459 - RNA, 20 nt, synthetic construct
  source 1..20: mol_type = other RNA
attctctaggtcctctacca

SEQ ID NO: 7460 - RNA, 20 nt, synthetic construct
  source 1..20: mol_type = other RNA
caattctctaggtcctctac

SEQ ID NO: 7461 - RNA, 20 nt, synthetic construct
  source 1..20: mol_type = other RNA
ctcaattctctaggtcctct

SEQ ID NO: 7462 - RNA, 20 nt, synthetic construct
  source 1..20: mol_type = other RNA
tcattggccctctctcaatt

SEQ ID NO: 7463 - RNA, 20 nt, synthetic construct
  source 1..20: mol_type = other RNA
actccatagatgccttggct

SEQ ID NO: 7464 - RNA, 20 nt, synthetic construct
  source 1..20: mol_type = other RNA
atagatgccttggctttctt

SEQ ID NO: 7465 - RNA, 20 nt, synthetic construct
  source 1..20: mol_type = other RNA
ttgctattcagtgcaggaag

SEQ ID NO: 7466 - RNA, 20 nt, synthetic construct
  source 1..20: mol_type = other RNA
atctccttgctattcagtgc

SEQ ID NO: 7467 - RNA, 20 nt, synthetic construct
  source 1..20: mol_type = other RNA
agcagcctgtagccatctag

SEQ ID NO: 7468 - RNA, 20 nt, synthetic construct
  source 1..20: mol_type = other RNA
gctagatggctacaggctgc

SEQ ID NO: 7469 - RNA, 20 nt, synthetic construct
  source 1..20: mol_type = other RNA
gctcagctagatggctacag

SEQ ID NO: 7470 - RNA, 20 nt, synthetic construct
  source 1..20: mol_type = other RNA
tctgctcagctagatggcta

SEQ ID NO: 7471 - RNA, 20 nt, synthetic construct
  source 1..20: mol_type = other RNA
cctctgctcagctagatggc

SEQ ID NO: 7472 - RNA, 20 nt, synthetic construct
  source 1..20: mol_type = other RNA
aatccctctcctctgctcag

SEQ ID NO: 7473 - RNA, 20 nt, synthetic construct
  source 1..20: mol_type = other RNA
ggtattttctaggtccgcta

SEQ ID NO: 7474 - RNA, 20 nt, synthetic construct
  source 1..20: mol_type = other RNA
acaaaccagttcttatttgt

SEQ ID NO: 7475 - RNA, 20 nt, synthetic construct
  source 1..20: mol_type = other RNA
tttcctccacaaaccagttc

SEQ ID NO: 7476 - RNA, 20 nt, synthetic construct
  source 1..20: mol_type = other RNA
acaaatacgcatagaagtct

SEQ ID NO: 7477 - RNA, 20 nt, synthetic construct
  source 1..20: mol_type = other RNA
tccagtagttggcctcacat

SEQ ID NO: 7478 - RNA, 20 nt, synthetic construct
  source 1..20: mol_type = other RNA
agtagttggcctcacatgac

SEQ ID NO: 7479 - RNA, 20 nt, synthetic construct
  source 1..20: mol_type = other RNA
catgacactgcatgtgcaca

SEQ ID NO: 7480 - RNA, 20 nt, synthetic construct
  source 1..20: mol_type = other RNA
gtaaatgttctttgccacac

SEQ ID NO: 7481 - RNA, 20 nt, synthetic construct
  source 1..20: mol_type = other RNA
tgtagttgctgtttctcagt

SEQ ID NO: 7482 - RNA, 20 nt, synthetic construct
  source 1..20: mol_type = other RNA
atcttcttaattgagcttgc

SEQ ID NO: 7483 - RNA, 20 nt, synthetic construct
  source 1..20: mol_type = other RNA
attaagaagatagagatcac

SEQ ID NO: 7484 - RNA, 20 nt, synthetic construct
  source 1..20: mol_type = other RNA
aataacacagagtgctatgt

SEQ ID NO: 7485 - RNA, 20 nt, synthetic construct
  source 1..20: mol_type = other RNA
gtgttattggagttcttacc

SEQ ID NO: 7486 - RNA, 20 nt, synthetic construct
  source 1..20: mol_type = other RNA
tctagctggtaagaactcca

SEQ ID NO: 7487 - RNA, 20 nt, synthetic construct
  source 1..20: mol_type = other RNA
catctagctggtaagaactc

SEQ ID NO: 7488 - RNA, 20 nt, synthetic construct
  source 1..20: mol_type = other RNA
ctcatctagctggtaagaac

SEQ ID NO: 7489 - RNA, 20 nt, synthetic construct
  source 1..20: mol_type = other RNA
cggaacacattgccaattca

SEQ ID NO: 7490 - RNA, 20 nt, synthetic construct
  source 1..20: mol_type = other RNA
actgaattggcaatgtgttc

SEQ ID NO: 7491 - RNA, 20 nt, synthetic construct
  source 1..20: mol_type = other RNA
caggcacttcattgattgga

SEQ ID NO: 7492 - RNA, 20 nt, synthetic construct
  source 1..20: mol_type = other RNA
cacaggcacttcattgattg

SEQ ID NO: 7493 - RNA, 20 nt, synthetic construct
  source 1..20: mol_type = other RNA
actctcttcagaagtaaaca

SEQ ID NO: 7494 - RNA, 20 nt, synthetic construct
  source 1..20: mol_type = other RNA
cttcagaagtaaacaacaaa

SEQ ID NO: 7495 - RNA, 20 nt, synthetic construct
  source 1..20: mol_type = other RNA
tcagaagtaaacaacaaagt

SEQ ID NO: 7496 - RNA, 20 nt, synthetic construct
  source 1..20: mol_type = other RNA
ggggataccgcatagctgag

SEQ ID NO: 7497 - RNA, 20 nt, synthetic construct
  source 1..20: mol_type = other RNA
ctctggggataccgcatagc

SEQ ID NO: 7498 - RNA, 20 nt, synthetic construct
  source 1..20: mol_type = other RNA
gctatgcggtatccccagag

SEQ ID NO: 7499 - RNA, 20 nt, synthetic construct
  source 1..20: mol_type = other RNA
gaaatgacatcgataattag

SEQ ID NO: 7500 - RNA, 20 nt, synthetic construct
  source 1..20: mol_type = other RNA
ttctgtaggttctgcagaat

SEQ ID NO: 7501 - RNA, 20 nt, synthetic construct
  source 1..20: mol_type = other RNA
caagttctaacacacacaca

SEQ ID NO: 7502 - RNA, 20 nt, synthetic construct
  source 1..20: mol_type = other RNA
gagggtcggttaattttata

SEQ ID NO: 7503 - RNA, 20 nt, synthetic construct
  source 1..20: mol_type = other RNA
gagacatgcaggaaaatata

SEQ ID NO: 7504 - RNA, 20 nt, synthetic construct
  source 1..20: mol_type = other RNA
ttactgtgacttgcttccca

SEQ ID NO: 7505 - RNA, 20 nt, synthetic construct
  source 1..20: mol_type = other RNA
cttgctctttactgtgactt

SEQ ID NO: 7506 - RNA, 20 nt, synthetic construct
  source 1..20: mol_type = other RNA
aaactcccttgctctttact

SEQ ID NO: 7507 - RNA, 20 nt, synthetic construct
  source 1..20: mol_type = other RNA
aaatttcctatttgatccct

SEQ ID NO: 7508 - RNA, 20 nt, synthetic construct
  source 1..20: mol_type = other RNA
acatcacagttcaaaggtaa

SEQ ID NO: 7509 - RNA, 20 nt, synthetic construct
  source 1..20: mol_type = other RNA
tgagatgtttcttcttctta

SEQ ID NO: 7510 - RNA, 20 nt, synthetic construct
  source 1..20: mol_type = other RNA
agtttctcgtgagatgtttc

SEQ ID NO: 7511 - RNA, 20 nt, synthetic construct
  source 1..20: mol_type = other RNA
tttttctccagtttctcgtg

SEQ ID NO: 7512 - RNA, 20 nt, synthetic construct
  source 1..20: mol_type = other RNA
cgagaaactggagaaaaaag

SEQ ID NO: 7513 - RNA, 20 nt, synthetic construct
  source 1..20: mol_type = other RNA
aggaagacacagctcttttt

SEQ ID NO: 7514 - RNA, 20 nt, synthetic construct
  source 1..20: mol_type = other RNA
gaaacactggaagccagata

SEQ ID NO: 7515 - RNA, 20 nt, synthetic construct
  source 1..20: mol_type = other RNA
ttatcattttaataatattc

SEQ ID NO: 7516 - RNA, 20 nt, synthetic construct
  source 1..20: mol_type = other RNA
tcttgttcctcattatcatt

SEQ ID NO: 7517 - RNA, 20 nt, synthetic construct
  source 1..20: mol_type = other RNA
gttgatctcttcttgttcct

SEQ ID NO: 7518 - RNA, 20 nt, synthetic construct
  source 1..20: mol_type = other RNA
gttgctacataagcctgctg

SEQ ID NO: 7519 - RNA, 20 nt, synthetic construct
  source 1..20: mol_type = other RNA
caagttcacacacacacaca

SEQ ID NO: 7520 - RNA, 20 nt, synthetic construct
  source 1..20: mol_type = other RNA
agaaatagtgaaatagaaaa

SEQ ID NO: 7521 - RNA, 20 nt, synthetic construct
  source 1..20: mol_type = other RNA
cagacatgttgcaaaatagg

SEQ ID NO: 7522 - RNA, 20 nt, synthetic construct
  source 1..20: mol_type = other RNA
tttctgtgacttgcttccca

SEQ ID NO: 7523 - RNA, 20 nt, synthetic construct
  source 1..20: mol_type = other RNA
cgttctcttttctgtgactt

SEQ ID NO: 7524 - RNA, 20 nt, synthetic construct
  source 1..20: mol_type = other RNA
taagaagtttcttgttatta

SEQ ID NO: 7525 - RNA, 20 nt, synthetic construct
  source 1..20: mol_type = other RNA
tcaaaaacactggaagccag

SEQ ID NO: 7526 - RNA, 20 nt, synthetic construct
  source 1..20: mol_type = other RNA
tcttgttcctgtttaccaca

SEQ ID NO: 7527 - RNA, 20 nt, synthetic construct
  source 1..20: mol_type = other RNA
tgttacatcagcctgctgat

SEQ ID NO: 7528 - RNA, 20 nt, synthetic construct
  source 1..20: mol_type = other RNA
cttgttacatcagcctgctg

SEQ ID NO: 7529 - RNA, 20 nt, synthetic construct
  source 1..20: mol_type = other RNA
tttaaaaatatatagaaatt

SEQ ID NO: 7530 - RNA, 20 nt, synthetic construct
  source 1..20: mol_type = other RNA
acatatgctaaaattaaata

SEQ ID NO: 7531 - RNA, 20 nt, synthetic construct
  source 1..20: mol_type = other RNA
tgcacaatggtatgtaatat

SEQ ID NO: 7532 - RNA, 20 nt, synthetic construct
  source 1..20: mol_type = other RNA
ttgaacccacacagtaacat

SEQ ID NO: 7533 - RNA, 20 nt, synthetic construct
  source 1..20: mol_type = other RNA
aggatttgcaatatctcctt

SEQ ID NO: 7534 - RNA, 20 nt, synthetic construct
  source 1..20: mol_type = other RNA
gagttcaaaactttgtgatt

SEQ ID NO: 7535 - RNA, 20 nt, synthetic construct
  source 1..20: mol_type = other RNA
gaggtatattgtataataag

SEQ ID NO: 7536 - RNA, 20 nt, synthetic construct
  source 1..20: mol_type = other RNA
tttgaatacatggaatattc

SEQ ID NO: 7537 - RNA, 20 nt, synthetic construct
  source 1..20: mol_type = other RNA
cttttgaatacatggaatat

SEQ ID NO: 7538 - RNA, 20 nt, synthetic construct
  source 1..20: mol_type = other RNA
tgacaaatttctttcttcct

SEQ ID NO: 7539 - RNA, 20 nt, synthetic construct
  source 1..20: mol_type = other RNA
tagtacatcctgtagctcat

SEQ ID NO: 7540 - RNA, 20 nt, synthetic construct
  source 1..20: mol_type = other RNA
attccaggaagctggttcaa

SEQ ID NO: 7541 - RNA, 20 nt, synthetic construct
  source 1..20: mol_type = other RNA
ttgaaccagcttcctggaat

SEQ ID NO: 7542 - RNA, 20 nt, synthetic construct
  source 1..20: mol_type = other RNA
atacatgtggcctagtgtca

SEQ ID NO: 7543 - RNA, 20 nt, synthetic construct
  source 1..20: mol_type = other RNA
agagactctatacatgtggc

SEQ ID NO: 7544 - RNA, 20 nt, synthetic construct
  source 1..20: mol_type = other RNA
ctagagactctatacatgtg

SEQ ID NO: 7545 - RNA, 20 nt, synthetic construct
  source 1..20: mol_type = other RNA
agagagacagtgtttcatcc

SEQ ID NO: 7546 - RNA, 20 nt, synthetic construct
  source 1..20: mol_type = other RNA
ggcagccacaggtcatgaat

SEQ ID NO: 7547 - RNA, 20 nt, synthetic construct
  source 1..20: mol_type = other RNA
cattcatgacctgtggctgc

SEQ ID NO: 7548 - RNA, 20 nt, synthetic construct
  source 1..20: mol_type = other RNA
atcctcacattcatgacctg

SEQ ID NO: 7549 - RNA, 20 nt, synthetic construct
  source 1..20: mol_type = other RNA
ctatcctcacattcatgacc

SEQ ID NO: 7550 - RNA, 20 nt, synthetic construct
  source 1..20: mol_type = other RNA
ctctatcctcacattcatga

SEQ ID NO: 7551 - RNA, 20 nt, synthetic construct
  source 1..20: mol_type = other RNA
aacctctctctatcctcaca

SEQ ID NO: 7552 - RNA, 20 nt, synthetic construct
  source 1..20: mol_type = other RNA
caagaacgttgctccaacct

SEQ ID NO: 7553 - RNA, 20 nt, synthetic construct
  source 1..20: mol_type = other RNA
tccttatgcctcccaagaac

SEQ ID NO: 7554 - RNA, 20 nt, synthetic construct
  source 1..20: mol_type = other RNA
tacctgctttgccccctaat

SEQ ID NO: 7555 - RNA, 20 nt, synthetic construct
  source 1..20: mol_type = other RNA
gtagctgtccgacctcttca

SEQ ID NO: 7556 - RNA, 20 nt, synthetic construct
  source 1..20: mol_type = other RNA
tcagatctcttagtctaccc

SEQ ID NO: 7557 - RNA, 20 nt, synthetic construct
  source 1..20: mol_type = other RNA
tagtctaccctgccatcttc

SEQ ID NO: 7558 - RNA, 20 nt, synthetic construct
  source 1..20: mol_type = other RNA
gcactgagggaaagggggat

SEQ ID NO: 7559 - RNA, 20 nt, synthetic construct
  source 1..20: mol_type = other RNA
tccccctttccctcagtgca

SEQ ID NO: 7560 - RNA, 20 nt, synthetic construct
  source 1..20: mol_type = other RNA
gtgcagagtagctgcggcca

SEQ ID NO: 7561 - RNA, 20 nt, synthetic construct
  source 1..20: mol_type = other RNA
gctggccgcagctactctgc

SEQ ID NO: 7562 - RNA, 20 nt, synthetic construct
  source 1..20: mol_type = other RNA
gtctaccctctgctggccgc

SEQ ID NO: 7563 - RNA, 20 nt, synthetic construct
  source 1..20: mol_type = other RNA
cagtctaccctctgctggcc

SEQ ID NO: 7564 - RNA, 20 nt, synthetic construct
  source 1..20: mol_type = other RNA
tgctctcagtctaccctctg

SEQ ID NO: 7565 - RNA, 20 nt, synthetic construct
  source 1..20: mol_type = other RNA
cctgctctcagtctaccctc

SEQ ID NO: 7566 - RNA, 20 nt, synthetic construct
  source 1..20: mol_type = other RNA
agaatgggttcctgggcagg

SEQ ID NO: 7567 - RNA, 20 nt, synthetic construct
  source 1..20: mol_type = other RNA
caggcagaatgcagcatctc

SEQ ID NO: 7568 - RNA, 20 nt, synthetic construct
  source 1..20: mol_type = other RNA
aagctgccctggaaaacttg

SEQ ID NO: 7569 - RNA, 20 nt, synthetic construct
  source 1..20: mol_type = other RNA
acttttcccatggaaaagca

SEQ ID NO: 7570 - RNA, 20 nt, synthetic construct
  source 1..20: mol_type = other RNA
cgaaaaggctctacttttcc

SEQ ID NO: 7571 - RNA, 20 nt, synthetic construct
  source 1..20: mol_type = other RNA
aaacctcgcgaaaaggctct

SEQ ID NO: 7572 - RNA, 20 nt, synthetic construct
  source 1..20: mol_type = other RNA
atgtactcaaaacctcgcga

SEQ ID NO: 7573 - RNA, 20 nt, synthetic construct
  source 1..20: mol_type = other RNA
ctatgtactcaaaacctcgc

SEQ ID NO: 7574 - RNA, 20 nt, synthetic construct
  source 1..20: mol_type = other RNA
tggatcccatgttttttctg

SEQ ID NO: 7575 - RNA, 20 nt, synthetic construct
  source 1..20: mol_type = other RNA
gtaggacttcatattctaat

SEQ ID NO: 7576 - RNA, 20 nt, synthetic construct
  source 1..20: mol_type = other RNA
cggtaggacttcatattcta

SEQ ID NO: 7577 - RNA, 20 nt, synthetic construct
  source 1..20: mol_type = other RNA
ctcggtaggacttcatattc

SEQ ID NO: 7578 - RNA, 20 nt, synthetic construct
  source 1..20: mol_type = other RNA
gtatctctctcggtaggact

SEQ ID NO: 7579 - RNA, 20 nt, synthetic construct
  source 1..20: mol_type = other RNA
ggaataactggtatggattt

SEQ ID NO: 7580 - RNA, 20 nt, synthetic construct
  source 1..20: mol_type = other RNA
ctggaataactggtatggat

SEQ ID NO: 7581 - RNA, 20 nt, synthetic construct
  source 1..20: mol_type = other RNA
ttctgccttctgcccaatcc

SEQ ID NO: 7582 - RNA, 20 nt, synthetic construct
  source 1..20: mol_type = other RNA
gatcgttttttgcccacgtg

SEQ ID NO: 7583 - RNA, 20 nt, synthetic construct
  source 1..20: mol_type = other RNA
gtgtttctaagaagcgtttg

SEQ ID NO: 7584 - RNA, 20 nt, synthetic construct
  source 1..20: mol_type = other RNA
tacttaaaagattattatta

SEQ ID NO: 7585 - RNA, 20 nt, synthetic construct
  source 1..20: mol_type = other RNA
atcactaatcctgtctgcac

SEQ ID NO: 7586 - RNA, 20 nt, synthetic construct
  source 1..20: mol_type = other RNA
caatcactaatcctgtctgc

SEQ ID NO: 7587 - RNA, 20 nt, synthetic construct
  source 1..20: mol_type = other RNA
tttgtgctgcaacaaggtca

SEQ ID NO: 7588 - RNA, 20 nt, synthetic construct
  source 1..20: mol_type = other RNA
cctttgtgctgcaacaaggt

SEQ ID NO: 7589 - RNA, 20 nt, synthetic construct
  source 1..20: mol_type = other RNA
tgtgacgtgtatcgttttgg

SEQ ID NO: 7590 - RNA, 20 nt, synthetic construct
  source 1..20: mol_type = other RNA
tataacaataaggggctgcc

SEQ ID NO: 7591 - RNA, 20 nt, synthetic construct
  source 1..20: mol_type = other RNA
cacctgacactgggatccct

SEQ ID NO: 7592 - RNA, 20 nt, synthetic construct
  source 1..20: mol_type = other RNA
gacgcagaagggactgccgt

SEQ ID NO: 7593 - RNA, 20 nt, synthetic construct
  source 1..20: mol_type = other RNA
ttaccttgttcagaaggagc

SEQ ID NO: 7594 - RNA, 20 nt, synthetic construct
  source 1..20: mol_type = other RNA
ttctgaacaaggtaaggagc

SEQ ID NO: 7595 - RNA, 20 nt, synthetic construct
  source 1..20: mol_type = other RNA
agcatccgtttaccattgga

SEQ ID NO: 7596 - RNA, 20 nt, synthetic construct
  source 1..20: mol_type = other RNA
aatggtaaacggatgctcga

SEQ ID NO: 7597 - RNA, 20 nt, synthetic construct
  source 1..20: mol_type = other RNA
gtcaacactcgagcatccgt

SEQ ID NO: 7598 - RNA, 20 nt, synthetic construct
  source 1..20: mol_type = other RNA
agtgttgactgagttctgtc

SEQ ID NO: 7599 - RNA, 20 nt, synthetic construct
  source 1..20: mol_type = other RNA
tacatgacagaactcagtca

SEQ ID NO: 7600 - RNA, 20 nt, synthetic construct
  source 1..20: mol_type = other RNA
cccagagagtgcacggaggc

SEQ ID NO: 7601 - RNA, 20 nt, synthetic construct
  source 1..20: mol_type = other RNA
gtgcactctctgggggagcc

SEQ ID NO: 7602 - RNA, 20 nt, synthetic construct
  source 1..20: mol_type = other RNA
ctgggggagccagcggattg

SEQ ID NO: 7603 - RNA, 20 nt, synthetic construct
  source 1..20: mol_type = other RNA
gggggagccagcggattgat

SEQ ID NO: 7604 - RNA, 20 nt, synthetic construct
  source 1..20: mol_type = other RNA
agggtgatcgacttcacaac

SEQ ID NO: 7605 - RNA, 20 nt, synthetic construct
  source 1..20: mol_type = other RNA
cctcgttgaaaaatgggcta

SEQ ID NO: 7606 - RNA, 20 nt, synthetic construct
  source 1..20: mol_type = other RNA
ttgaaaaatgggctatctca

SEQ ID NO: 7607 - RNA, 20 nt, synthetic construct
  source 1..20: mol_type = other RNA
gtgtcttagccaaaattttt

SEQ ID NO: 7608 - RNA, 20 nt, synthetic construct
  source 1..20: mol_type = other RNA
ttccaagccagtaagctttt

SEQ ID NO: 7609 - RNA, 20 nt, synthetic construct
  source 1..20: mol_type = other RNA
gaatctgcaatgctgaagat

SEQ ID NO: 7610 - RNA, 20 nt, synthetic construct
  source 1..20: mol_type = other RNA
agagccacatttctctgaat

SEQ ID NO: 7611 - RNA, 20 nt, synthetic construct
  source 1..20: mol_type = other RNA
agggtgacaggctccagagc

SEQ ID NO: 7612 - RNA, 20 nt, synthetic construct
  source 1..20: mol_type = other RNA
ggagcctgtcacccttgaga

SEQ ID NO: 7613 - RNA, 20 nt, synthetic construct
  source 1..20: mol_type = other RNA
atagaaccagggtgatttgg

SEQ ID NO: 7614 - RNA, 20 nt, synthetic construct
  source 1..20: mol_type = other RNA
caatgatctatgtttcagga

SEQ ID NO: 7615 - RNA, 20 nt, synthetic construct
  source 1..20: mol_type = other RNA
gtcataggtgggctctgcag

SEQ ID NO: 7616 - RNA, 20 nt, synthetic construct
  source 1..20: mol_type = other RNA
cttaaaaacctagggctgca

SEQ ID NO: 7617 - RNA, 20 nt, synthetic construct
  source 1..20: mol_type = other RNA
gcagccctaggtttttaagt

SEQ ID NO: 7618 - RNA, 20 nt, synthetic construct
  source 1..20: mol_type = other RNA
caggtacaactgccaccaga

SEQ ID NO: 7619 - RNA, 20 nt, synthetic construct
  source 1..20: mol_type = other RNA
ttctatccagaccgctcaca

SEQ ID NO: 7620 - RNA, 20 nt, synthetic construct
  source 1..20: mol_type = other RNA
gactctttctatccagaccg

SEQ ID NO: 7621 - RNA, 20 nt, synthetic construct
  source 1..20: mol_type = other RNA
tgacccacatcctgagttgc

SEQ ID NO: 7622 - RNA, 20 nt, synthetic construct
  source 1..20: mol_type = other RNA
catgacccacatcctgagtt

SEQ ID NO: 7623 - RNA, 20 nt, synthetic construct
  source 1..20: mol_type = other RNA
ggatgtgggtcatgagagga

SEQ ID NO: 7624 - RNA, 20 nt, synthetic construct
  source 1..20: mol_type = other RNA
cctgcaggagagatgaaatc

SEQ ID NO: 7625 - RNA, 20 nt, synthetic construct
  source 1..20: mol_type = other RNA
cctgcaggggagtaagctgt

SEQ ID NO: 7626 - RNA, 20 nt, synthetic construct
  source 1..20: mol_type = other RNA
tgcaggggagtaagctgttc

SEQ ID NO: 7627 - RNA, 20 nt, synthetic construct
  source 1..20: mol_type = other RNA
acccatccctgataactgaa

SEQ ID NO: 7628 - RNA, 20 nt, synthetic construct
  source 1..20: mol_type = other RNA
cccatggcccagaagctgaa

SEQ ID NO: 7629 - RNA, 20 nt, synthetic construct
  source 1..20: mol_type = other RNA
catggcccagaagctgaaga

SEQ ID NO: 7630 - RNA, 20 nt, synthetic construct
  source 1..20: mol_type = other RNA
gcccctaacacccaatcacc

SEQ ID NO: 7631 - RNA, 20 nt, synthetic construct
  source 1..20: mol_type = other RNA
tgaacattcagtagaaattc

SEQ ID NO: 7632 - RNA, 20 nt, synthetic construct
  source 1..20: mol_type = other RNA
cgtgcaagcacatttatggg

SEQ ID NO: 7633 - RNA, 20 nt, synthetic construct
  source 1..20: mol_type = other RNA
atggaaactgtgctcacgtg

SEQ ID NO: 7634 - RNA, 20 nt, synthetic construct
  source 1..20: mol_type = other RNA
catttgtcctttttttctaa

SEQ ID NO: 7635 - RNA, 20 nt, synthetic construct
  source 1..20: mol_type = other RNA
tttgtcctttttttctaagc

SEQ ID NO: 7636 - RNA, 20 nt, synthetic construct
  source 1..20: mol_type = other RNA
agtccatctgcctacaaata

SEQ ID NO: 7637 - RNA, 20 nt, synthetic construct
  source 1..20: mol_type = other RNA
ggagaatatgacaagtaaca

SEQ ID NO: 7638 - RNA, 20 nt, synthetic construct
  source 1..20: mol_type = other RNA
gagaattatgacctcaggag

SEQ ID NO: 7639 - RNA, 20 nt, synthetic construct
  source 1..20: mol_type = other RNA
tgaggtcataattctcagag

SEQ ID NO: 7640 - RNA, 20 nt, synthetic construct
  source 1..20: mol_type = other RNA
gagacttttttctggtttgt

SEQ ID NO: 7641 - RNA, 20 nt, synthetic construct
  source 1..20: mol_type = other RNA
tcttggaaacactcagtttg

SEQ ID NO: 7642 - RNA, 20 nt, synthetic construct
  source 1..20: mol_type = other RNA
gtttgatttcttttcttttc

SEQ ID NO: 7643 - RNA, 20 nt, synthetic construct
  source 1..20: mol_type = other RNA
gttggtgctgaaatgaaaag

SEQ ID NO: 7644 - RNA, 20 nt, synthetic construct
  source 1..20: mol_type = other RNA
tgcaccccaggcctttgctc

SEQ ID NO: 7645 - RNA, 20 nt, synthetic construct
  source 1..20: mol_type = other RNA
gtccatttccgtggtagcac

SEQ ID NO: 7646 - RNA, 20 nt, synthetic construct
  source 1..20: mol_type = other RNA
catagtcggaccccagcata

SEQ ID NO: 7647 - RNA, 20 nt, synthetic construct
  source 1..20: mol_type = other RNA
actaacagaaatttccactg

SEQ ID NO: 7648 - RNA, 20 nt, synthetic construct
  source 1..20: mol_type = other RNA
gcttgaagcatgactctact

SEQ ID NO: 7649 - RNA, 20 nt, synthetic construct
  source 1..20: mol_type = other RNA
agttgtctcagatgaacagt

SEQ ID NO: 7650 - RNA, 20 nt, synthetic construct
  source 1..20: mol_type = other RNA
gatgaacagtgcatagcaaa

SEQ ID NO: 7651 - RNA, 20 nt, synthetic construct
  source 1..20: mol_type = other RNA
aagacaatgttcctgagaca

SEQ ID NO: 7652 - RNA, 20 nt, synthetic construct
  source 1..20: mol_type = other RNA
ttgctcaaagacaatgttcc

SEQ ID NO: 7653 - RNA, 20 nt, synthetic construct
  source 1..20: mol_type = other RNA
ggaacattgtctttgagcaa

SEQ ID NO: 7654 - RNA, 20 nt, synthetic construct
  source 1..20: mol_type = other RNA
tagactctttgctcaaagac

SEQ ID NO: 7655 - RNA, 20 nt, synthetic construct
  source 1..20: mol_type = other RNA
attaaactaggaggaaggag

SEQ ID NO: 7656 - RNA, 20 nt, synthetic construct
  source 1..20: mol_type = other RNA
ccttcctcctagtttaatgg

SEQ ID NO: 7657 - RNA, 20 nt, synthetic construct
  source 1..20: mol_type = other RNA
ttcctcctagtttaatggag

SEQ ID NO: 7658 - RNA, 20 nt, synthetic construct
  source 1..20: mol_type = other RNA
tagtttaatggagcagaaag

SEQ ID NO: 7659 - RNA, 20 nt, synthetic construct
  source 1..20: mol_type = other RNA
agatacctttctgctccatt

SEQ ID NO: 7660 - RNA, 20 nt, synthetic construct
  source 1..20: mol_type = other RNA
aagagtttcatcatttgtca

SEQ ID NO: 7661 - RNA, 20 nt, synthetic construct
  source 1..20: mol_type = other RNA
tagagtacccttccacaaca

SEQ ID NO: 7662 - RNA, 20 nt, synthetic construct
  source 1..20: mol_type = other RNA
ttggaattctattaaactaa

SEQ ID NO: 7663 - RNA, 20 nt, synthetic construct
  source 1..20: mol_type = other RNA
aattcctgaagtgaaggttc

SEQ ID NO: 7664 - RNA, 20 nt, synthetic construct
  source 1..20: mol_type = other RNA
atagatatacatatatactt

SEQ ID NO: 7665 - RNA, 20 nt, synthetic construct
  source 1..20: mol_type = other RNA
ccatagatatacatatatac

SEQ ID NO: 7666 - RNA, 20 nt, synthetic construct
  source 1..20: mol_type = other RNA
ttctatatctacgtctattc

SEQ ID NO: 7667 - RNA, 20 nt, synthetic construct
  source 1..20: mol_type = other RNA
aacaaccagtatcccttcag

SEQ ID NO: 7668 - RNA, 20 nt, synthetic construct
  source 1..20: mol_type = other RNA
tctgccttcctgccattttt

SEQ ID NO: 7669 - RNA, 20 nt, synthetic construct
  source 1..20: mol_type = other RNA
catctgccttcctgccattt

SEQ ID NO: 7670 - RNA, 20 nt, synthetic construct
  source 1..20: mol_type = other RNA
ttgctgactctcatctgcct

SEQ ID NO: 7671 - RNA, 20 nt, synthetic construct
  source 1..20: mol_type = other RNA
ctttgctgactctcatctgc

SEQ ID NO: 7672 - RNA, 20 nt, synthetic construct
  source 1..20: mol_type = other RNA
ctctttgctgactctcatct

SEQ ID NO: 7673 - RNA, 20 nt, synthetic construct
  source 1..20: mol_type = other RNA
ttgttccccctgtcactatt

SEQ ID NO: 7674 - RNA, 20 nt, synthetic construct
  source 1..20: mol_type = other RNA
atagataccttggctttctt

SEQ ID NO: 7675 - RNA, 20 nt, synthetic construct
  source 1..20: mol_type = other RNA
aggaagaaagccaaggtatc

SEQ ID NO: 7676 - RNA, 20 nt, synthetic construct
  source 1..20: mol_type = other RNA
tcagtgcaagaagggcctcc

SEQ ID NO: 7677 - RNA, 20 nt, synthetic construct
  source 1..20: mol_type = other RNA
atcaccttgctcttcagtgc

SEQ ID NO: 7678 - RNA, 20 nt, synthetic construct
  source 1..20: mol_type = other RNA
tgcattcaggaagatggcta

SEQ ID NO: 7679 - RNA, 20 nt, synthetic construct
  source 1..20: mol_type = other RNA
cctgcattcaggaagatggc

SEQ ID NO: 7680 - RNA, 20 nt, synthetic construct
  source 1..20: mol_type = other RNA
ctcctgcattcaggaagatg

SEQ ID NO: 7681 - RNA, 20 nt, synthetic construct
  source 1..20: mol_type = other RNA
gcaggcctataaaatcctag

SEQ ID NO: 7682 - RNA, 20 nt, synthetic construct
  source 1..20: mol_type = other RNA
ttctcagcaggcctataaaa

SEQ ID NO: 7683 - RNA, 20 nt, synthetic construct
  source 1..20: mol_type = other RNA
tttcatccacaaatccattc

SEQ ID NO: 7684 - RNA, 20 nt, synthetic construct
  source 1..20: mol_type = other RNA
aggggcacgcatagtagtct

SEQ ID NO: 7685 - RNA, 20 nt, synthetic construct
  source 1..20: mol_type = other RNA
tcgaatctttggctaaacat

SEQ ID NO: 7686 - RNA, 20 nt, synthetic construct
  source 1..20: mol_type = other RNA
aatctttggctaaacatgac

SEQ ID NO: 7687 - RNA, 20 nt, synthetic construct
  source 1..20: mol_type = other RNA
actttcttgtggaacctttt

SEQ ID NO: 7688 - RNA, 20 nt, synthetic construct
  source 1..20: mol_type = other RNA
ggatatattcttttctctac

SEQ ID NO: 7689 - RNA, 20 nt, synthetic construct
  source 1..20: mol_type = other RNA
ctgttcaatcgcagttgcta

SEQ ID NO: 7690 - RNA, 20 nt, synthetic construct
  source 1..20: mol_type = other RNA
ttattgagctcactgttcaa

SEQ ID NO: 7691 - RNA, 20 nt, synthetic construct
  source 1..20: mol_type = other RNA
gtcctctttattgagctcac

SEQ ID NO: 7692 - RNA, 20 nt, synthetic construct
  source 1..20: mol_type = other RNA
ataaagaggacagagccctc

SEQ ID NO: 7693 - RNA, 20 nt, synthetic construct
  source 1..20: mol_type = other RNA
agtatcccagaatgctatga

SEQ ID NO: 7694 - RNA, 20 nt, synthetic construct
  source 1..20: mol_type = other RNA
tagcattctgggatactgga

SEQ ID NO: 7695 - RNA, 20 nt, synthetic construct
  source 1..20: mol_type = other RNA
agctggtcagaactccagta

SEQ ID NO: 7696 - RNA, 20 nt, synthetic construct
  source 1..20: mol_type = other RNA
tccagctggtcagaactcca

SEQ ID NO: 7697 - RNA, 20 nt, synthetic construct
  source 1..20: mol_type = other RNA
cctccagctggtcagaactc

SEQ ID NO: 7698 - RNA, 20 nt, synthetic construct
  source 1..20: mol_type = other RNA
ctgaacctcttgggaataca

SEQ ID NO: 7699 - RNA, 20 nt, synthetic construct
  source 1..20: mol_type = other RNA
actgtattcccaagaggttc

SEQ ID NO: 7700 - RNA, 20 nt, synthetic construct
  source 1..20: mol_type = other RNA
tgggaatacagtagagactc

SEQ ID NO: 7701 - RNA, 20 nt, synthetic construct
  source 1..20: mol_type = other RNA
taaagtatgacttttctgga

SEQ ID NO: 7702 - RNA, 20 nt, synthetic construct
  source 1..20: mol_type = other RNA
agaaaagtcatactttagga

SEQ ID NO: 7703 - RNA, 20 nt, synthetic construct
  source 1..20: mol_type = other RNA
agacaaaccctggcaaaact

SEQ ID NO: 7704 - RNA, 20 nt, synthetic construct
  source 1..20: mol_type = other RNA
aagcattaaaatcatttcca

SEQ ID NO: 7705 - RNA, 20 nt, synthetic construct
  source 1..20: mol_type = other RNA
caggcagttaattgacttgg

SEQ ID NO: 7706 - RNA, 20 nt, synthetic construct
  source 1..20: mol_type = other RNA
cccaggcagttaattgactt

SEQ ID NO: 7707 - RNA, 20 nt, synthetic construct
  source 1..20: mol_type = other RNA
aaagagggttttcctctccc

SEQ ID NO: 7708 - RNA, 20 nt, synthetic construct
  source 1..20: mol_type = other RNA
ttagaggtaaacaacaaagt

SEQ ID NO: 7709 - RNA, 20 nt, synthetic construct
  source 1..20: mol_type = other RNA
cactgtgaacaccacatagc

SEQ ID NO: 7710 - RNA, 20 nt, synthetic construct
  source 1..20: mol_type = other RNA
gctatgtggtgttcacagtg

SEQ ID NO: 7711 - RNA, 20 nt, synthetic construct
  source 1..20: mol_type = other RNA
atgtgtagtcaagttttaaa

SEQ ID NO: 7712 - RNA, 20 nt, synthetic construct
  source 1..20: mol_type = other RNA
gttgacatattgatatgtca

SEQ ID NO: 7713 - RNA, 20 nt, synthetic construct
  source 1..20: mol_type = other RNA
tgatatggtatctgcttcat

SEQ ID NO: 7714 - RNA, 20 nt, synthetic construct
  source 1..20: mol_type = other RNA
tctatactgttactgtctct

SEQ ID NO: 7715 - RNA, 20 nt, synthetic construct
  source 1..20: mol_type = other RNA
attgggaatacatccagtaa

SEQ ID NO: 7716 - RNA, 20 nt, synthetic construct
  source 1..20: mol_type = other RNA
ctccattgggaatacatcca

SEQ ID NO: 7717 - RNA, 20 nt, synthetic construct
  source 1..20: mol_type = other RNA
cacatgcacaggcttagaaa

SEQ ID NO: 7718 - RNA, 20 nt, synthetic construct
  source 1..20: mol_type = other RNA
acaaatactaaaaaatgaaa

SEQ ID NO: 7719 - RNA, 20 nt, synthetic construct
  source 1..20: mol_type = other RNA
cagacaggcgggaaaatata

SEQ ID NO: 7720 - RNA, 20 nt, synthetic construct
  source 1..20: mol_type = other RNA
ttctgtgacttcctacccac

SEQ ID NO: 7721 - RNA, 20 nt, synthetic construct
  source 1..20: mol_type = other RNA
ccttctgtgacttcctaccc

SEQ ID NO: 7722 - RNA, 20 nt, synthetic construct
  source 1..20: mol_type = other RNA
ttcctctccttctgtgactt

SEQ ID NO: 7723 - RNA, 20 nt, synthetic construct
  source 1..20: mol_type = other RNA
ccttcctctccttctgtgac

SEQ ID NO: 7724 - RNA, 20 nt, synthetic construct
  source 1..20: mol_type = other RNA
tgagatgtttcttgttatta

SEQ ID NO: 7725 - RNA, 20 nt, synthetic construct
  source 1..20: mol_type = other RNA
agtttctcatgagatgtttc

SEQ ID NO: 7726 - RNA, 20 nt, synthetic construct
  source 1..20: mol_type = other RNA
ttttcctccagtttctcatg

SEQ ID NO: 7727 - RNA, 20 nt, synthetic construct
  source 1..20: mol_type = other RNA
tgagaaactggaggaaaaag

SEQ ID NO: 7728 - RNA, 20 nt, synthetic construct
  source 1..20: mol_type = other RNA
tcagaaacactggaacccag

SEQ ID NO: 7729 - RNA, 20 nt, synthetic construct
  source 1..20: mol_type = other RNA
tttttttctagtttatcatt

SEQ ID NO: 7730 - RNA, 20 nt, synthetic construct
  source 1..20: mol_type = other RNA
tttgatctcttttttttcta

SEQ ID NO: 7731 - RNA, 20 nt, synthetic construct
  source 1..20: mol_type = other RNA
tgttacacaagcctgctgat

SEQ ID NO: 7732 - RNA, 20 nt, synthetic construct
  source 1..20: mol_type = other RNA
tgaactattcttcttctagc

SEQ ID NO: 7733 - RNA, 20 nt, synthetic construct
  source 1..20: mol_type = other RNA
tcttgaactattcttcttct

SEQ ID NO: 7734 - RNA, 20 nt, synthetic construct
  source 1..20: mol_type = other RNA
tttaaaaagatatagaaatt

SEQ ID NO: 7735 - RNA, 20 nt, synthetic construct
  source 1..20: mol_type = other RNA
catttaaaaagatatagaaa

SEQ ID NO: 7736 - RNA, 20 nt, synthetic construct
  source 1..20: mol_type = other RNA
acatatgctaaagttaaata

SEQ ID NO: 7737 - RNA, 20 nt, synthetic construct
  source 1..20: mol_type = other RNA
gaattcaaaattttatgatt

SEQ ID NO: 7738 - RNA, 20 nt, synthetic construct
  source 1..20: mol_type = other RNA
tttggatacatggaaaattc

SEQ ID NO: 7739 - RNA, 20 nt, synthetic construct
  source 1..20: mol_type = other RNA
gagcttgagtacttgaaaga

SEQ ID NO: 7740 - RNA, 20 nt, synthetic construct
  source 1..20: mol_type = other RNA
agctctgagcacatccagtt

SEQ ID NO: 7741 - RNA, 20 nt, synthetic construct
  source 1..20: mol_type = other RNA
gagcacatccagttgctcat

SEQ ID NO: 7742 - RNA, 20 nt, synthetic construct
  source 1..20: mol_type = other RNA
attccaggaagctggttcaa

SEQ ID NO: 7743 - RNA, 20 nt, synthetic construct
  source 1..20: mol_type = other RNA
ttgaaccagcttcctggaat

SEQ ID NO: 7744 - RNA, 20 nt, synthetic construct
  source 1..20: mol_type = other RNA
agcccagaccctccattcca

SEQ ID NO: 7745 - RNA, 20 nt, synthetic construct
  source 1..20: mol_type = other RNA
acacatgtgacctagtctca

SEQ ID NO: 7746 - RNA, 20 nt, synthetic construct
  source 1..20: mol_type = other RNA
agagactctacacatgtgac

SEQ ID NO: 7747 - RNA, 20 nt, synthetic construct
  source 1..20: mol_type = other RNA
ctagagactctacacatgtg

SEQ ID NO: 7748 - RNA, 20 nt, synthetic construct
  source 1..20: mol_type = other RNA
agagagacagtgttggatcc

SEQ ID NO: 7749 - RNA, 20 nt, synthetic construct
  source 1..20: mol_type = other RNA
cattcgtgacctgtggctgc

SEQ ID NO: 7750 - RNA, 20 nt, synthetic construct
  source 1..20: mol_type = other RNA
gaatcctcccattcgtgacc

SEQ ID NO: 7751 - RNA, 20 nt, synthetic construct
  source 1..20: mol_type = other RNA
cagaatcctcccattcgtga

SEQ ID NO: 7752 - RNA, 20 nt, synthetic construct
  source 1..20: mol_type = other RNA
aacctctcagaatcctccca

SEQ ID NO: 7753 - RNA, 20 nt, synthetic construct
  source 1..20: mol_type = other RNA
taagaacattgctccaacct

SEQ ID NO: 7754 - RNA, 20 nt, synthetic construct
  source 1..20: mol_type = other RNA
ttatgcctcctaagaacatt

SEQ ID NO: 7755 - RNA, 20 nt, synthetic construct
  source 1..20: mol_type = other RNA
tccttatgcctcctaagaac

SEQ ID NO: 7756 - RNA, 20 nt, synthetic construct
  source 1..20: mol_type = other RNA
gagcattcactcctccttat

SEQ ID NO: 7757 - RNA, 20 nt, synthetic construct
  source 1..20: mol_type = other RNA
ggctggggaaatctcagagc

SEQ ID NO: 7758 - RNA, 20 nt, synthetic construct
  source 1..20: mol_type = other RNA
gagatttccccagcctgagg

SEQ ID NO: 7759 - RNA, 20 nt, synthetic construct
  source 1..20: mol_type = other RNA
atagctgcccgacctcttca

SEQ ID NO: 7760 - RNA, 20 nt, synthetic construct
  source 1..20: mol_type = other RNA
tcagacctcatagtctgccc

SEQ ID NO: 7761 - RNA, 20 nt, synthetic construct
  source 1..20: mol_type = other RNA
tagtctgcccagctgtctcc

SEQ ID NO: 7762 - RNA, 20 nt, synthetic construct
  source 1..20: mol_type = other RNA
tggcataaagggagacagct

SEQ ID NO: 7763 - RNA, 20 nt, synthetic construct
  source 1..20: mol_type = other RNA
ctttatgccatgagtgccac

SEQ ID NO: 7764 - RNA, 20 nt, synthetic construct
  source 1..20: mol_type = other RNA
tcccccattccctcagtccc

SEQ ID NO: 7765 - RNA, 20 nt, synthetic construct
  source 1..20: mol_type = other RNA
gtcccggaattgctgtggcc

SEQ ID NO: 7766 - RNA, 20 nt, synthetic construct
  source 1..20: mol_type = other RNA
gctggccacagcaattccgg

SEQ ID NO: 7767 - RNA, 20 nt, synthetic construct
  source 1..20: mol_type = other RNA
gtccatcctctgctggccac

SEQ ID NO: 7768 - RNA, 20 nt, synthetic construct
  source 1..20: mol_type = other RNA
cagtccatcctctgctggcc

SEQ ID NO: 7769 - RNA, 20 nt, synthetic construct
  source 1..20: mol_type = other RNA
tgctctcagtccatcctctg

SEQ ID NO: 7770 - RNA, 20 nt, synthetic construct
  source 1..20: mol_type = other RNA
cctgctctcagtccatcctc

SEQ ID NO: 7771 - RNA, 20 nt, synthetic construct
  source 1..20: mol_type = other RNA
aggatgggttcctggtcagg

SEQ ID NO: 7772 - RNA, 20 nt, synthetic construct
  source 1..20: mol_type = other RNA
aagctgccctggaaacctag

SEQ ID NO: 7773 - RNA, 20 nt, synthetic construct
  source 1..20: mol_type = other RNA
atgttcagcatgtaaaacca

SEQ ID NO: 7774 - RNA, 20 nt, synthetic construct
  source 1..20: mol_type = other RNA
aaatgtagccaaaaggctct

SEQ ID NO: 7775 - RNA, 20 nt, synthetic construct
  source 1..20: mol_type = other RNA
ttcaatgtactcaaaatgta

SEQ ID NO: 7776 - RNA, 20 nt, synthetic construct
  source 1..20: mol_type = other RNA
agagaaaaaaatggcatcca

SEQ ID NO: 7777 - RNA, 20 nt, synthetic construct
  source 1..20: mol_type = other RNA
ggagaactatgtgttagttc

SEQ ID NO: 7778 - RNA, 20 nt, synthetic construct
  source 1..20: mol_type = other RNA
cacattactatatgaagtcc

SEQ ID NO: 7779 - RNA, 20 nt, synthetic construct
  source 1..20: mol_type = other RNA
gtgtaggacttcatatagta

SEQ ID NO: 7780 - RNA, 20 nt, synthetic construct
  source 1..20: mol_type = other RNA
ctgtgtaggacttcatatag

SEQ ID NO: 7781 - RNA, 20 nt, synthetic construct
  source 1..20: mol_type = other RNA
gtatctctctgtgtaggact

SEQ ID NO: 7782 - RNA, 20 nt, synthetic construct
  source 1..20: mol_type = other RNA
ccgtatctctctgtgtagga

SEQ ID NO: 7783 - RNA, 20 nt, synthetic construct
  source 1..20: mol_type = other RNA
atctgtctagctctccgtat

SEQ ID NO: 7784 - RNA, 20 nt, synthetic construct
  source 1..20: mol_type = other RNA
ggaataactggtatggattt

SEQ ID NO: 7785 - RNA, 20 nt, synthetic construct
  source 1..20: mol_type = other RNA
ctggaataactggtatggat

SEQ ID NO: 7786 - RNA, 20 nt, synthetic construct
  source 1..20: mol_type = other RNA
ttctgccttctgcccaatcc

SEQ ID NO: 7787 - RNA, 20 nt, synthetic construct
  source 1..20: mol_type = other RNA
gtgtttctaggaagtgtgtg

SEQ ID NO: 7788 - RNA, 20 nt, synthetic construct
  source 1..20: mol_type = other RNA
tacttaatatattatcactt

SEQ ID NO: 7789 - RNA, 20 nt, synthetic construct
  source 1..20: mol_type = other RNA
gcacatttctcatacttaat

SEQ ID NO: 7790 - RNA, 20 nt, synthetic construct
  source 1..20: mol_type = other RNA
ctgcacatttctcatactta

SEQ ID NO: 7791 - RNA, 20 nt, synthetic construct
  source 1..20: mol_type = other RNA
aatcctctctgcacatttct

SEQ ID NO: 7792 - RNA, 20 nt, synthetic construct
  source 1..20: mol_type = other RNA
atctctaatcctctctgcac

SEQ ID NO: 7793 - RNA, 20 nt, synthetic construct
  source 1..20: mol_type = other RNA
caatctctaatcctctctgc

SEQ ID NO: 7794 - RNA, 20 nt, synthetic construct
  source 1..20: mol_type = other RNA
tttgggaatatttcaaaggc

SEQ ID NO: 7795 - RNA, 20 nt, synthetic construct
  source 1..20: mol_type = other RNA
aagcctagaggctttttttg

SEQ ID NO: 7796 - RNA, 20 nt, synthetic construct
  source 1..20: mol_type = other RNA
tgtgttggttctgggtctgc

SEQ ID NO: 7797 - RNA, 20 nt, synthetic construct
  source 1..20: mol_type = other RNA
cacatggcagacccagaacc

SEQ ID NO: 7798 - RNA, 20 nt, synthetic construct
  source 1..20: mol_type = other RNA
cccagagagtgcgctaaggc

SEQ ID NO: 7799 - RNA, 20 nt, synthetic construct
  source 1..20: mol_type = other RNA
ggctcccccagagagtgcgc

SEQ ID NO: 7800 - RNA, 20 nt, synthetic construct
  source 1..20: mol_type = other RNA
ctgggggagccagaggtgtg

SEQ ID NO: 7801 - RNA, 20 nt, synthetic construct
  source 1..20: mol_type = other RNA
gggggagccagaggtgtgat

SEQ ID NO: 7802 - RNA, 20 nt, synthetic construct
  source 1..20: mol_type = other RNA
cacaggttgcaccaaaaatc

SEQ ID NO: 7803 - RNA, 20 nt, synthetic construct
  source 1..20: mol_type = other RNA
acttcaccactcccctcatt

SEQ ID NO: 7804 - RNA, 20 nt, synthetic construct
  source 1..20: mol_type = other RNA
cctcattgtaaaaggggcta

SEQ ID NO: 7805 - RNA, 20 nt, synthetic construct
  source 1..20: mol_type = other RNA
ttgtaaaaggggctatctca

SEQ ID NO: 7806 - RNA, 20 nt, synthetic construct
  source 1..20: mol_type = other RNA
ttgtcctagacaaaattctt

SEQ ID NO: 7807 - RNA, 20 nt, synthetic construct
  source 1..20: mol_type = other RNA
gaatctgcaatgctgaagat

SEQ ID NO: 7808 - RNA, 20 nt, synthetic construct
  source 1..20: mol_type = other RNA
aggataacaggatctagagc

SEQ ID NO: 7809 - RNA, 20 nt, synthetic construct
  source 1..20: mol_type = other RNA
agatcctgttatccttgaga

SEQ ID NO: 7810 - RNA, 20 nt, synthetic construct
  source 1..20: mol_type = other RNA
acagacccagggagatatgg

SEQ ID NO: 7811 - RNA, 20 nt, synthetic construct
  source 1..20: mol_type = other RNA
ctgggtctgtggagtagtac

SEQ ID NO: 7812 - RNA, 20 nt, synthetic construct
  source 1..20: mol_type = other RNA
tgtactactccacagaccca

SEQ ID NO: 7813 - RNA, 20 nt, synthetic construct
  source 1..20: mol_type = other RNA
cgaagctctatctctcaggt

SEQ ID NO: 7814 - RNA, 20 nt, synthetic construct
  source 1..20: mol_type = other RNA
atctctcaggtctttttcag

SEQ ID NO: 7815 - RNA, 20 nt, synthetic construct
  source 1..20: mol_type = other RNA
gactgaaaaagacctgagag

SEQ ID NO: 7816 - RNA, 20 nt, synthetic construct
  source 1..20: mol_type = other RNA
caggtctttttcagtccgag

SEQ ID NO: 7817 - RNA, 20 nt, synthetic construct
  source 1..20: mol_type = other RNA
ggtctttttcagtccgaggc

SEQ ID NO: 7818 - RNA, 20 nt, synthetic construct
  source 1..20: mol_type = other RNA
cttcaaagctaagaactgca

SEQ ID NO: 7819 - RNA, 20 nt, synthetic construct
  source 1..20: mol_type = other RNA
ttctgatggaacttgtacct

SEQ ID NO: 7820 - RNA, 20 nt, synthetic construct
  source 1..20: mol_type = other RNA
agaccccccgcaggtacaag

SEQ ID NO: 7821 - RNA, 20 nt, synthetic construct
  source 1..20: mol_type = other RNA
ttttctccagaccccccgca

SEQ ID NO: 7822 - RNA, 20 nt, synthetic construct
  source 1..20: mol_type = other RNA
tgcccagcataatgcattgc

SEQ ID NO: 7823 - RNA, 20 nt, synthetic construct
  source 1..20: mol_type = other RNA
cgtgcccagcataatgcatt

SEQ ID NO: 7824 - RNA, 20 nt, synthetic construct
  source 1..20: mol_type = other RNA
gggatgagtggaggccaaaa

SEQ ID NO: 7825 - RNA, 20 nt, synthetic construct
  source 1..20: mol_type = other RNA
actcatccctgagaagtgaa

SEQ ID NO: 7826 - RNA, 20 nt, synthetic construct
  source 1..20: mol_type = other RNA
tccctgagaagtgaagtgtt

SEQ ID NO: 7827 - RNA, 20 nt, synthetic construct
  source 1..20: mol_type = other RNA
tggtgatggggcagacaaca

SEQ ID NO: 7828 - RNA, 20 nt, synthetic construct
  source 1..20: mol_type = other RNA
aaaaagaaagcattaaactc

SEQ ID NO: 7829 - RNA, 20 nt, synthetic construct
  source 1..20: mol_type = other RNA
tccccaaaaaaccattttaa

SEQ ID NO: 7830 - RNA, 20 nt, synthetic construct
  source 1..20: mol_type = other RNA
ccaaaaaaccattttaatgc

SEQ ID NO: 7831 - RNA, 20 nt, synthetic construct
  source 1..20: mol_type = other RNA
aagcattaaaatggtttttt

SEQ ID NO: 7832 - RNA, 20 nt, synthetic construct
  source 1..20: mol_type = other RNA
acagagtgttcatgacgaca

SEQ ID NO: 7833 - RNA, 20 nt, synthetic construct
  source 1..20: mol_type = other RNA
tttctaggaatctctacaga

SEQ ID NO: 7834 - RNA, 20 nt, synthetic construct
  source 1..20: mol_type = other RNA
gtagagattcctagaaatga

SEQ ID NO: 7835 - RNA, 20 nt, synthetic construct
  source 1..20: mol_type = other RNA
actaacatggaagctcattt

SEQ ID NO: 7836 - RNA, 20 nt, synthetic construct
  source 1..20: mol_type = other RNA
tcggaaactccactaacatg

SEQ ID NO: 7837 - RNA, 20 nt, synthetic construct
  source 1..20: mol_type = other RNA
tactttcgtgtttgtttgtg

SEQ ID NO: 7838 - RNA, 20 nt, synthetic construct
  source 1..20: mol_type = other RNA
tgtccatttgcctattaata

SEQ ID NO: 7839 - RNA, 20 nt, synthetic construct
  source 1..20: mol_type = other RNA
attctttattaataggcaaa

SEQ ID NO: 7840 - RNA, 20 nt, synthetic construct
  source 1..20: mol_type = other RNA
gtgactcttttttggtttat

SEQ ID NO: 7841 - RNA, 20 nt, synthetic construct
  source 1..20: mol_type = other RNA
tttttggtttatgtcataaa

SEQ ID NO: 7842 - RNA, 20 nt, synthetic construct
  source 1..20: mol_type = other RNA
gtcagtgctgaaattaaaac

SEQ ID NO: 7843 - RNA, 20 nt, synthetic construct
  source 1..20: mol_type = other RNA
accactgtcacaggaagaac

SEQ ID NO: 7844 - RNA, 20 nt, synthetic construct
  source 1..20: mol_type = other RNA
tctaacagaaacttccattg

SEQ ID NO: 7845 - RNA, 20 nt, synthetic construct
  source 1..20: mol_type = other RNA
ggactcaacttggctcagat

SEQ ID NO: 7846 - RNA, 20 nt, synthetic construct
  source 1..20: mol_type = other RNA
gcatctgagccaagttgagt

SEQ ID NO: 7847 - RNA, 20 nt, synthetic construct
  source 1..20: mol_type = other RNA
acttggctcagatgcagagg

SEQ ID NO: 7848 - RNA, 20 nt, synthetic construct
  source 1..20: mol_type = other RNA
gatgcagaggaacatttcct

SEQ ID NO: 7849 - RNA, 20 nt, synthetic construct
  source 1..20: mol_type = other RNA
caggaaatgttcctctgcat

SEQ ID NO: 7850 - RNA, 20 nt, synthetic construct
  source 1..20: mol_type = other RNA
aagaacttttgctcacagga

SEQ ID NO: 7851 - RNA, 20 nt, synthetic construct
  source 1..20: mol_type = other RNA
aaaaaacaaagtcttctcta

SEQ ID NO: 7852 - RNA, 20 nt, synthetic construct
  source 1..20: mol_type = other RNA
gtctcaaaaaaacaaagtct

SEQ ID NO: 7853 - RNA, 20 nt, synthetic construct
  source 1..20: mol_type = other RNA
agcctgggcaacaaagcaag

SEQ ID NO: 7854 - RNA, 20 nt, synthetic construct
  source 1..20: mol_type = other RNA
gctcactgcaagctccgcct

SEQ ID NO: 7855 - RNA, 20 nt, synthetic construct
  source 1..20: mol_type = other RNA
ctgcaagctccgcctcccgg

SEQ ID NO: 7856 - RNA, 20 nt, synthetic construct
  source 1..20: mol_type = other RNA
gcctcccgggttcacaccat

SEQ ID NO: 7857 - RNA, 20 nt, synthetic construct
  source 1..20: mol_type = other RNA
cgggttcacaccattctcct

SEQ ID NO: 7858 - RNA, 20 nt, synthetic construct
  source 1..20: mol_type = other RNA
tgcttcagcctctctagcag

SEQ ID NO: 7859 - RNA, 20 nt, synthetic construct
  source 1..20: mol_type = other RNA
ctagcagctgggactacagg

SEQ ID NO: 7860 - RNA, 20 nt, synthetic construct
  source 1..20: mol_type = other RNA
agcagctgggactacaggca

SEQ ID NO: 7861 - RNA, 20 nt, synthetic construct
  source 1..20: mol_type = other RNA
actaaaaatacaaaaaatta

SEQ ID NO: 7862 - RNA, 20 nt, synthetic construct
  source 1..20: mol_type = other RNA
tgacctcgtgatccgcctgc

SEQ ID NO: 7863 - RNA, 20 nt, synthetic construct
  source 1..20: mol_type = other RNA
tgatccgcctgcctcagcct

SEQ ID NO: 7864 - RNA, 20 nt, synthetic construct
  source 1..20: mol_type = other RNA
gcctcccaaagtgctgggat

SEQ ID NO: 7865 - RNA, 20 nt, synthetic construct
  source 1..20: mol_type = other RNA
caaagtgctgggattacagg

SEQ ID NO: 7866 - RNA, 20 nt, synthetic construct
  source 1..20: mol_type = other RNA
cgcctgtaatcccagcactt

SEQ ID NO: 7867 - RNA, 20 nt, synthetic construct
  source 1..20: mol_type = other RNA
gccaggcacggtggctcacg

SEQ ID NO: 7868 - RNA, 20 nt, synthetic construct
  source 1..20: mol_type = other RNA
ccttcctcctagttttatgg

SEQ ID NO: 7869 - RNA, 20 nt, synthetic construct
  source 1..20: mol_type = other RNA
ttcctcctagttttatggaa

SEQ ID NO: 7870 - RNA, 20 nt, synthetic construct
  source 1..20: mol_type = other RNA
tagttttatggaagcagaag

SEQ ID NO: 7871 - RNA, 20 nt, synthetic construct
  source 1..20: mol_type = other RNA
atatatccttctgcttccat

SEQ ID NO: 7872 - RNA, 20 nt, synthetic construct
  source 1..20: mol_type = other RNA
actccatatatccttctgct

SEQ ID NO: 7873 - RNA, 20 nt, synthetic construct
  source 1..20: mol_type = other RNA
ttggtcatttgtcatcccgg

SEQ ID NO: 7874 - RNA, 20 nt, synthetic construct
  source 1..20: mol_type = other RNA
aactctttggtcatttgtca

SEQ ID NO: 7875 - RNA, 20 nt, synthetic construct
  source 1..20: mol_type = other RNA
gccgatgttgtagaaggata

SEQ ID NO: 7876 - RNA, 20 nt, synthetic construct
  source 1..20: mol_type = other RNA
agtccctgaagtgaatgttg

SEQ ID NO: 7877 - RNA, 20 nt, synthetic construct
  source 1..20: mol_type = other RNA
atagatgtgcaagtatcaat

SEQ ID NO: 7878 - RNA, 20 nt, synthetic construct
  source 1..20: mol_type = other RNA
ccatagatgtgcaagtatca

SEQ ID NO: 7879 - RNA, 20 nt, synthetic construct
  source 1..20: mol_type = other RNA
ggaccaagtgtgtttgtacc

SEQ ID NO: 7880 - RNA, 20 nt, synthetic construct
  source 1..20: mol_type = other RNA
tcagaccactggtgctcagg

SEQ ID NO: 7881 - RNA, 20 nt, synthetic construct
  source 1..20: mol_type = other RNA
gggcagaccgtatctcttca

SEQ ID NO: 7882 - RNA, 20 nt, synthetic construct
  source 1..20: mol_type = other RNA
tctgggcagaccgtatctct

SEQ ID NO: 7883 - RNA, 20 nt, synthetic construct
  source 1..20: mol_type = other RNA
tctgctttcctgcctttgtt

SEQ ID NO: 7884 - RNA, 20 nt, synthetic construct
  source 1..20: mol_type = other RNA
catctgctttcctgcctttg

SEQ ID NO: 7885 - RNA, 20 nt, synthetic construct
  source 1..20: mol_type = other RNA
agcatctgttgttcaacatg

SEQ ID NO: 7886 - RNA, 20 nt, synthetic construct
  source 1..20: mol_type = other RNA
tggtcctctagcatctgttg

SEQ ID NO: 7887 - RNA, 20 nt, synthetic construct
  source 1..20: mol_type = other RNA
tgcaatactcttggtcctct

SEQ ID NO: 7888 - RNA, 20 nt, synthetic construct
  source 1..20: mol_type = other RNA
ctcttgcaatactcttggtc

SEQ ID NO: 7889 - RNA, 20 nt, synthetic construct
  source 1..20: mol_type = other RNA
ttttctccctcttgcaatac

SEQ ID NO: 7890 - RNA, 20 nt, synthetic construct
  source 1..20: mol_type = other RNA
ttgaagaaagccaaggcatt

SEQ ID NO: 7891 - RNA, 20 nt, synthetic construct
  source 1..20: mol_type = other RNA
tcagtgcaggaagggtctcc

SEQ ID NO: 7892 - RNA, 20 nt, synthetic construct
  source 1..20: mol_type = other RNA
ttgctcttcagtgcaggaag

SEQ ID NO: 7893 - RNA, 20 nt, synthetic construct
  source 1..20: mol_type = other RNA
atctccttgctcttcagtgc

SEQ ID NO: 7894 - RNA, 20 nt, synthetic construct
  source 1..20: mol_type = other RNA
gttcagcaacatggctacag

SEQ ID NO: 7895 - RNA, 20 nt, synthetic construct
  source 1..20: mol_type = other RNA
tctgttcagcaacatggcta

SEQ ID NO: 7896 - RNA, 20 nt, synthetic construct
  source 1..20: mol_type = other RNA
cctctgttcagcaacatggc

SEQ ID NO: 7897 - RNA, 20 nt, synthetic construct
  source 1..20: mol_type = other RNA
ggtagttaggattttctagc

SEQ ID NO: 7898 - RNA, 20 nt, synthetic construct
  source 1..20: mol_type = other RNA
tagcatggctagaaaatcct

SEQ ID NO: 7899 - RNA, 20 nt, synthetic construct
  source 1..20: mol_type = other RNA
acaagtccattcttactctt

SEQ ID NO: 7900 - RNA, 20 nt, synthetic construct
  source 1..20: mol_type = other RNA
tatcctccacaagtccattc

SEQ ID NO: 7901 - RNA, 20 nt, synthetic construct
  source 1..20: mol_type = other RNA
aggcatagaagtctcctcaa

SEQ ID NO: 7902 - RNA, 20 nt, synthetic construct
  source 1..20: mol_type = other RNA
tcaagtgttagtctaaacat

SEQ ID NO: 7903 - RNA, 20 nt, synthetic construct
  source 1..20: mol_type = other RNA
agtgttagtctaaacataaa

SEQ ID NO: 7904 - RNA, 20 nt, synthetic construct
  source 1..20: mol_type = other RNA
atatatggtgtttttttgcc

SEQ ID NO: 7905 - RNA, 20 nt, synthetic construct
  source 1..20: mol_type = other RNA
ctgttcccttgtagttgttg

SEQ ID NO: 7906 - RNA, 20 nt, synthetic construct
  source 1..20: mol_type = other RNA
gtcacctttattaagctcac

SEQ ID NO: 7907 - RNA, 20 nt, synthetic construct
  source 1..20: mol_type = other RNA
aatattccagagcactatgt

SEQ ID NO: 7908 - RNA, 20 nt, synthetic construct
  source 1..20: mol_type = other RNA
catagtgctctggaatattg

SEQ ID NO: 7909 - RNA, 20 nt, synthetic construct
  source 1..20: mol_type = other RNA
ggaatattggagttttgacc

SEQ ID NO: 7910 - RNA, 20 nt, synthetic construct
  source 1..20: mol_type = other RNA
agctggtcaaaactccaata

SEQ ID NO: 7911 - RNA, 20 nt, synthetic construct
  source 1..20: mol_type = other RNA
ctagctggtcaaaactccaa

SEQ ID NO: 7912 - RNA, 20 nt, synthetic construct
  source 1..20: mol_type = other RNA
tctctctagctggtcaaaac

SEQ ID NO: 7913 - RNA, 20 nt, synthetic construct
  source 1..20: mol_type = other RNA
ttgaaaatcttgggcattca

SEQ ID NO: 7914 - RNA, 20 nt, synthetic construct
  source 1..20: mol_type = other RNA
actgaatgcccaagattttc

SEQ ID NO: 7915 - RNA, 20 nt, synthetic construct
  source 1..20: mol_type = other RNA
taaagtctgacttttctgag

SEQ ID NO: 7916 - RNA, 20 nt, synthetic construct
  source 1..20: mol_type = other RNA
gaaaagtcagactttatgag

SEQ ID NO: 7917 - RNA, 20 nt, synthetic construct
  source 1..20: mol_type = other RNA
agaaaaaacctagcaaagct

SEQ ID NO: 7918 - RNA, 20 nt, synthetic construct
  source 1..20: mol_type = other RNA
aagcattaaaatggtgtcct

SEQ ID NO: 7919 - RNA, 20 nt, synthetic construct
  source 1..20: mol_type = other RNA
acactctttacaggtgaaca

SEQ ID NO: 7920 - RNA, 20 nt, synthetic construct
  source 1..20: mol_type = other RNA
ttacaggtgaacaacaaagt

SEQ ID NO: 7921 - RNA, 20 nt, synthetic construct
  source 1..20: mol_type = other RNA
gcaacttaactttgttgttc

SEQ ID NO: 7922 - RNA, 20 nt, synthetic construct
  source 1..20: mol_type = other RNA
cactgtggatattgcatagc

SEQ ID NO: 7923 - RNA, 20 nt, synthetic construct
  source 1..20: mol_type = other RNA
tgccatttaaatcatttcta

SEQ ID NO: 7924 - RNA, 20 nt, synthetic construct
  source 1..20: mol_type = other RNA
tttatccttttactttccct

SEQ ID NO: 7925 - RNA, 20 nt, synthetic construct
  source 1..20: mol_type = other RNA
caatcaggttagttgtttcc

SEQ ID NO: 7926 - RNA, 20 nt, synthetic construct
  source 1..20: mol_type = other RNA
aggattcacacctgtgtggg

SEQ ID NO: 7927 - RNA, 20 nt, synthetic construct
  source 1..20: mol_type = other RNA
tgtggctctaggattcacac

SEQ ID NO: 7928 - RNA, 20 nt, synthetic construct
  source 1..20: mol_type = other RNA
atgtttcaatgctcgtgtgg

SEQ ID NO: 7929 - RNA, 20 nt, synthetic construct
  source 1..20: mol_type = other RNA
atgaacaatttttacttctc

SEQ ID NO: 7930 - RNA, 20 nt, synthetic construct
  source 1..20: mol_type = other RNA
tattagggtaaaacacattg

SEQ ID NO: 7931 - RNA, 20 nt, synthetic construct
  source 1..20: mol_type = other RNA
atgtgttttaccctaataag

SEQ ID NO: 7932 - RNA, 20 nt, synthetic construct
  source 1..20: mol_type = other RNA
tcagttgtgtcagtttttca

SEQ ID NO: 7933 - RNA, 20 nt, synthetic construct
  source 1..20: mol_type = other RNA
cttcagttgtgtcagttttt

SEQ ID NO: 7934 - RNA, 20 nt, synthetic construct
  source 1..20: mol_type = other RNA
gagtgtgggcttatctattt

SEQ ID NO: 7935 - RNA, 20 nt, synthetic construct
  source 1..20: mol_type = other RNA
aactcagagtgtgggcttat

SEQ ID NO: 7936 - RNA, 20 nt, synthetic construct
  source 1..20: mol_type = other RNA
gagttagagatttccttgat

SEQ ID NO: 7937 - RNA, 20 nt, synthetic construct
  source 1..20: mol_type = other RNA
cactatggttataaatcttt

SEQ ID NO: 7938 - RNA, 20 nt, synthetic construct
  source 1..20: mol_type = other RNA
ctatggttataaatctttcc

SEQ ID NO: 7939 - RNA, 20 nt, synthetic construct
  source 1..20: mol_type = other RNA
ataaaaacgtcgacctattt

SEQ ID NO: 7940 - RNA, 20 nt, synthetic construct
  source 1..20: mol_type = other RNA
gtagttcggtataatgttaa

SEQ ID NO: 7941 - RNA, 20 nt, synthetic construct
  source 1..20: mol_type = other RNA
atgcacactttaatgtgtac

SEQ ID NO: 7942 - RNA, 20 nt, synthetic construct
  source 1..20: mol_type = other RNA
gtgaatgctccatgcacact

SEQ ID NO: 7943 - RNA, 20 nt, synthetic construct
  source 1..20: mol_type = other RNA
acacatgaccttccagcaag

SEQ ID NO: 7944 - RNA, 20 nt, synthetic construct
  source 1..20: mol_type = other RNA
atagatttaaaagaattaaa

SEQ ID NO: 7945 - RNA, 20 nt, synthetic construct
  source 1..20: mol_type = other RNA
gtatgactttaattctttta

SEQ ID NO: 7946 - RNA, 20 nt, synthetic construct
  source 1..20: mol_type = other RNA
ctttattctgggagaataaa

SEQ ID NO: 7947 - RNA, 20 nt, synthetic construct
  source 1..20: mol_type = other RNA
cagaataaagtgagatatga

SEQ ID NO: 7948 - RNA, 20 nt, synthetic construct
  source 1..20: mol_type = other RNA
ttattcatatctcactttat

SEQ ID NO: 7949 - RNA, 20 nt, synthetic construct
  source 1..20: mol_type = other RNA
caaatatttgagaagctggc

SEQ ID NO: 7950 - RNA, 20 nt, synthetic construct
  source 1..20: mol_type = other RNA
aatatttgggagtcatacgg

SEQ ID NO: 7951 - RNA, 20 nt, synthetic construct
  source 1..20: mol_type = other RNA
ttgggacaaagaaaacatca

SEQ ID NO: 7952 - RNA, 20 nt, synthetic construct
  source 1..20: mol_type = other RNA
gttcaaaacttttctaaatt

SEQ ID NO: 7953 - RNA, 20 nt, synthetic construct
  source 1..20: mol_type = other RNA
taagtttggataaattgtgt

SEQ ID NO: 7954 - RNA, 20 nt, synthetic construct
  source 1..20: mol_type = other RNA
tagggaaaaacagaagcatg

SEQ ID NO: 7955 - RNA, 20 nt, synthetic construct
  source 1..20: mol_type = other RNA
agactacactttgagaattg

SEQ ID NO: 7956 - RNA, 20 nt, synthetic construct
  source 1..20: mol_type = other RNA
ggtttctctagactacactt

SEQ ID NO: 7957 - RNA, 20 nt, synthetic construct
  source 1..20: mol_type = other RNA
aagtgtagtctagagaaacc

SEQ ID NO: 7958 - RNA, 20 nt, synthetic construct
  source 1..20: mol_type = other RNA
aaggtcctcaggtttctcta

SEQ ID NO: 7959 - RNA, 20 nt, synthetic construct
  source 1..20: mol_type = other RNA
gaaggtactcaaaggtcctc

SEQ ID NO: 7960 - RNA, 20 nt, synthetic construct
  source 1..20: mol_type = other RNA
tggactgtctctgaaggtac

SEQ ID NO: 7961 - RNA, 20 nt, synthetic construct
  source 1..20: mol_type = other RNA
tgttggaaaatgaaagtaaa

SEQ ID NO: 7962 - RNA, 20 nt, synthetic construct
  source 1..20: mol_type = other RNA
tctcttgttggaaaatgaaa

SEQ ID NO: 7963 - RNA, 20 nt, synthetic construct
  source 1..20: mol_type = other RNA
cctcttctcttgttggaaaa

SEQ ID NO: 7964 - RNA, 20 nt, synthetic construct
  source 1..20: mol_type = other RNA
gatggctaagaaaatgggca

SEQ ID NO: 7965 - RNA, 20 nt, synthetic construct
  source 1..20: mol_type = other RNA
gtgttggtttcttatactat

SEQ ID NO: 7966 - RNA, 20 nt, synthetic construct
  source 1..20: mol_type = other RNA
ttggaatcccctatgaacaa

SEQ ID NO: 7967 - RNA, 20 nt, synthetic construct
  source 1..20: mol_type = other RNA
tatttgcttttttttttttt

SEQ ID NO: 7968 - RNA, 20 nt, synthetic construct
  source 1..20: mol_type = other RNA
tttcttgttcactgaatgtc

SEQ ID NO: 7969 - RNA, 20 nt, synthetic construct
  source 1..20: mol_type = other RNA
cttgttggtctcttttcttg

SEQ ID NO: 7970 - RNA, 20 nt, synthetic construct
  source 1..20: mol_type = other RNA
tgaaacagaaagttgattct

SEQ ID NO: 7971 - RNA, 20 nt, synthetic construct
  source 1..20: mol_type = other RNA
ttggtctgtcatttgtttag

SEQ ID NO: 7972 - RNA, 20 nt, synthetic construct
  source 1..20: mol_type = other RNA
agatggtgatggttgtgcac

SEQ ID NO: 7973 - RNA, 20 nt, synthetic construct
  source 1..20: mol_type = other RNA
gttactccagatggtgatgg

SEQ ID NO: 7974 - RNA, 20 nt, synthetic construct
  source 1..20: mol_type = other RNA
tctgttactccagatggtga

SEQ ID NO: 7975 - RNA, 20 nt, synthetic construct
  source 1..20: mol_type = other RNA
cctctgttactccagatggt

SEQ ID NO: 7976 - RNA, 20 nt, synthetic construct
  source 1..20: mol_type = other RNA
aaatcttcttttcagctttc

SEQ ID NO: 7977 - RNA, 20 nt, synthetic construct
  source 1..20: mol_type = other RNA
ggaattggcccacatgatta

SEQ ID NO: 7978 - RNA, 20 nt, synthetic construct
  source 1..20: mol_type = other RNA
acaggactacactaactatt

SEQ ID NO: 7979 - RNA, 20 nt, synthetic construct
  source 1..20: mol_type = other RNA
ctacaggactacactaacta

SEQ ID NO: 7980 - RNA, 20 nt, synthetic construct
  source 1..20: mol_type = other RNA
gtatgtctctctacaggact

SEQ ID NO: 7981 - RNA, 20 nt, synthetic construct
  source 1..20: mol_type = other RNA
ctgtatgtctctctacagga

SEQ ID NO: 7982 - RNA, 20 nt, synthetic construct
  source 1..20: mol_type = other RNA
gtcagcctctctgtatgtct

SEQ ID NO: 7983 - RNA, 20 nt, synthetic construct
  source 1..20: mol_type = other RNA
agattaactgagattgattt

SEQ ID NO: 7984 - RNA, 20 nt, synthetic construct
  source 1..20: mol_type = other RNA
gttaatctggaggaacatat

SEQ ID NO: 7985 - RNA, 20 nt, synthetic construct
  source 1..20: mol_type = other RNA
ttccaccttctgtgaaatat

SEQ ID NO: 7986 - RNA, 20 nt, synthetic construct
  source 1..20: mol_type = other RNA
tgtacattgtacaacattgt

SEQ ID NO: 7987 - RNA, 20 nt, synthetic construct
  source 1..20: mol_type = other RNA
gtacattgtacaatgttgta

SEQ ID NO: 7988 - RNA, 20 nt, synthetic construct
  source 1..20: mol_type = other RNA
gtacattgtgcaagttgcac

SEQ ID NO: 7989 - RNA, 20 nt, synthetic construct
  source 1..20: mol_type = other RNA
ataagaaaattgagagtaaa

SEQ ID NO: 7990 - RNA, 20 nt, synthetic construct
  source 1..20: mol_type = other RNA
caattttcttatggagcaca

SEQ ID NO: 7991 - RNA, 20 nt, synthetic construct
  source 1..20: mol_type = other RNA
attttcttatggagcacaga

SEQ ID NO: 7992 - RNA, 20 nt, synthetic construct
  source 1..20: mol_type = other RNA
aagacaaattatcattcata

SEQ ID NO: 7993 - RNA, 20 nt, synthetic construct
  source 1..20: mol_type = other RNA
acttctaaacaactgcgaac

SEQ ID NO: 7994 - RNA, 20 nt, synthetic construct
  source 1..20: mol_type = other RNA
ttttacactttgttacagca

SEQ ID NO: 7995 - RNA, 20 nt, synthetic construct
  source 1..20: mol_type = other RNA
acattttgctgtaacaaagt

SEQ ID NO: 7996 - RNA, 20 nt, synthetic construct
  source 1..20: mol_type = other RNA
catctctggtgacctgtgtt

SEQ ID NO: 7997 - RNA, 20 nt, synthetic construct
  source 1..20: mol_type = other RNA
ggtgacctgtgttgttttga

SEQ ID NO: 7998 - RNA, 20 nt, synthetic construct
  source 1..20: mol_type = other RNA
gcatctggattcctgcagta

SEQ ID NO: 7999 - RNA, 20 nt, synthetic construct
  source 1..20: mol_type = other RNA
cacctgacactgggatccat

SEQ ID NO: 8000 - RNA, 20 nt, synthetic construct
  source 1..20: mol_type = other RNA
cacggtggtcccagatccaa

SEQ ID NO: 8001 - RNA, 20 nt, synthetic construct
  source 1..20: mol_type = other RNA
gtgcttggatctgggaccac

SEQ ID NO: 8002 - RNA, 20 nt, synthetic construct
  source 1..20: mol_type = other RNA
tttcatcccaacgtcctagg

SEQ ID NO: 8003 - RNA, 20 nt, synthetic construct
  source 1..20: mol_type = other RNA
cacaattccaagtagaatgt

SEQ ID NO: 8004 - RNA, 20 nt, synthetic construct
  source 1..20: mol_type = other RNA
gggtcagccactgggaagga

SEQ ID NO: 8005 - RNA, 20 nt, synthetic construct
  source 1..20: mol_type = other RNA
cagagaaggcgctgagtgtt

SEQ ID NO: 8006 - RNA, 20 nt, synthetic construct
  source 1..20: mol_type = other RNA
ggttctcccagagaaggcgc

SEQ ID NO: 8007 - RNA, 20 nt, synthetic construct
  source 1..20: mol_type = other RNA
gcgccttctctgggagaacc

SEQ ID NO: 8008 - RNA, 20 nt, synthetic construct
  source 1..20: mol_type = other RNA
gggagaaccagagctgtgat

SEQ ID NO: 8009 - RNA, 20 nt, synthetic construct
  source 1..20: mol_type = other RNA
agggcactggacttaccact

SEQ ID NO: 8010 - RNA, 20 nt, synthetic construct
  source 1..20: mol_type = other RNA
cctggttattcaaaggatca

SEQ ID NO: 8011 - RNA, 20 nt, synthetic construct
  source 1..20: mol_type = other RNA
tgataagcctttcatggtat

SEQ ID NO: 8012 - RNA, 20 nt, synthetic construct
  source 1..20: mol_type = other RNA
gaaaccgcaaagccaaagat

SEQ ID NO: 8013 - RNA, 20 nt, synthetic construct
  source 1..20: mol_type = other RNA
aaaaccgcattcctccgaaa

SEQ ID NO: 8014 - RNA, 20 nt, synthetic construct
  source 1..20: mol_type = other RNA
aggatgacagactcaaaaac

SEQ ID NO: 8015 - RNA, 20 nt, synthetic construct
  source 1..20: mol_type = other RNA
atcgttctggcctatctcca

SEQ ID NO: 8016 - RNA, 20 nt, synthetic construct
  source 1..20: mol_type = other RNA
atcttaagccagtcctgcac

SEQ ID NO: 8017 - RNA, 20 nt, synthetic construct
  source 1..20: mol_type = other RNA
catcaaagcctagttgtgca

SEQ ID NO: 8018 - RNA, 20 nt, synthetic construct
  source 1..20: mol_type = other RNA
cagtgttcttgcccctcctt

SEQ ID NO: 8019 - RNA, 20 nt, synthetic construct
  source 1..20: mol_type = other RNA
gtgttcttgcccctccttct

SEQ ID NO: 8020 - RNA, 20 nt, synthetic construct
  source 1..20: mol_type = other RNA
ttctcatggaacatatatct

SEQ ID NO: 8021 - RNA, 20 nt, synthetic construct
  source 1..20: mol_type = other RNA
tggaacatatatctgtgttg

SEQ ID NO: 8022 - RNA, 20 nt, synthetic construct
  source 1..20: mol_type = other RNA
gagaccaacacagatatatg

SEQ ID NO: 8023 - RNA, 20 nt, synthetic construct
  source 1..20: mol_type = other RNA
tcttctcagagaccaacaca

SEQ ID NO: 8024 - RNA, 20 nt, synthetic construct
  source 1..20: mol_type = other RNA
gagaagaagagtagtggata

SEQ ID NO: 8025 - RNA, 20 nt, synthetic construct
  source 1..20: mol_type = other RNA
aagggaataaaattttggcc

SEQ ID NO: 8026 - RNA, 20 nt, synthetic construct
  source 1..20: mol_type = other RNA
gagagggctactggccaaaa

SEQ ID NO: 8027 - RNA, 20 nt, synthetic construct
  source 1..20: mol_type = other RNA
cagagagggctactggccaa

SEQ ID NO: 8028 - RNA, 20 nt, synthetic construct
  source 1..20: mol_type = other RNA
ctgagagacaatttgtcttt

SEQ ID NO: 8029 - RNA, 20 nt, synthetic construct
  source 1..20: mol_type = other RNA
gagagacaatttgtctttgc

SEQ ID NO: 8030 - RNA, 20 nt, synthetic construct
  source 1..20: mol_type = other RNA
taggcaaagacaaattgtct

SEQ ID NO: 8031 - RNA, 20 nt, synthetic construct
  source 1..20: mol_type = other RNA
aaagccaaagccttcagctt

SEQ ID NO: 8032 - RNA, 20 nt, synthetic construct
  source 1..20: mol_type = other RNA
ggaacacccagaagatgtct

SEQ ID NO: 8033 - RNA, 20 nt, synthetic construct
  source 1..20: mol_type = other RNA
ttaatatagacatcttctgg

SEQ ID NO: 8034 - RNA, 20 nt, synthetic construct
  source 1..20: mol_type = other RNA
tgtgcatgctctttaatata

SEQ ID NO: 8035 - RNA, 20 nt, synthetic construct
  source 1..20: mol_type = other RNA
gatctttcctttggtgcctg

SEQ ID NO: 8036 - RNA, 20 nt, synthetic construct
  source 1..20: mol_type = other RNA
ttaaagttctagaatgctat

SEQ ID NO: 8037 - RNA, 20 nt, synthetic construct
  source 1..20: mol_type = other RNA
gttctgtactagcaggcaga

SEQ ID NO: 8038 - RNA, 20 nt, synthetic construct
  source 1..20: mol_type = other RNA
gagaaagactaccatgctct

SEQ ID NO: 8039 - RNA, 20 nt, synthetic construct
  source 1..20: mol_type = other RNA
gagacaatgatcctgtttca

SEQ ID NO: 8040 - RNA, 20 nt, synthetic construct
  source 1..20: mol_type = other RNA
gcttgatttctcctctttga

SEQ ID NO: 8041 - RNA, 20 nt, synthetic construct
  source 1..20: mol_type = other RNA
tctttgaatttcagcaccaa

SEQ ID NO: 8042 - RNA, 20 nt, synthetic construct
  source 1..20: mol_type = other RNA
gttggtgctgaaattcaaag

SEQ ID NO: 8043 - RNA, 20 nt, synthetic construct
  source 1..20: mol_type = other RNA
ttgaatttcagcaccaacgg

SEQ ID NO: 8044 - RNA, 20 nt, synthetic construct
  source 1..20: mol_type = other RNA
gtccatcaccatggtagcaa

SEQ ID NO: 8045 - RNA, 20 nt, synthetic construct
  source 1..20: mol_type = other RNA
ataactctgtccatcaccat

SEQ ID NO: 8046 - RNA, 20 nt, synthetic construct
  source 1..20: mol_type = other RNA
ttctctaccactgtcacagg

SEQ ID NO: 8047 - RNA, 20 nt, synthetic construct
  source 1..20: mol_type = other RNA
accactgtcacaggaaggac

SEQ ID NO: 8048 - RNA, 20 nt, synthetic construct
  source 1..20: mol_type = other RNA
gatgccagtgtggtgtcata

SEQ ID NO: 8049 - RNA, 20 nt, synthetic construct
  source 1..20: mol_type = other RNA
atgacaccacactggcatca

SEQ ID NO: 8050 - RNA, 20 nt, synthetic construct
  source 1..20: mol_type = other RNA
tggaagggccatgcttccaa

SEQ ID NO: 8051 - RNA, 20 nt, synthetic construct
  source 1..20: mol_type = other RNA
gatctggaatgttgggtaga

SEQ ID NO: 8052 - RNA, 20 nt, synthetic construct
  source 1..20: mol_type = other RNA
ggcttctttcttcaggcaca

SEQ ID NO: 8053 - RNA, 20 nt, synthetic construct
  source 1..20: mol_type = other RNA
tttcagacactgtgcctgaa

SEQ ID NO: 8054 - RNA, 20 nt, synthetic construct
  source 1..20: mol_type = other RNA
cctttcagacactgtgcctg

SEQ ID NO: 8055 - RNA, 20 nt, synthetic construct
  source 1..20: mol_type = other RNA
cttttctcatagttgacaga

SEQ ID NO: 8056 - RNA, 20 nt, synthetic construct
  source 1..20: mol_type = other RNA
tttctcatagttgacagaag

SEQ ID NO: 8057 - RNA, 20 nt, synthetic construct
  source 1..20: mol_type = other RNA
tgcttctgtcaactatgaga

SEQ ID NO: 8058 - RNA, 20 nt, synthetic construct
  source 1..20: mol_type = other RNA
tagttgacagaagcaggagg

SEQ ID NO: 8059 - RNA, 20 nt, synthetic construct
  source 1..20: mol_type = other RNA
ccaccttcaaatatcctcct

SEQ ID NO: 8060 - RNA, 20 nt, synthetic construct
  source 1..20: mol_type = other RNA
tgaatagaaagctcaggaca

SEQ ID NO: 8061 - RNA, 20 nt, synthetic construct
  source 1..20: mol_type = other RNA
ggacacatggccacgtgctt

SEQ ID NO: 8062 - RNA, 20 nt, synthetic construct
  source 1..20: mol_type = other RNA
aagtcctgaagtgaaggttg

SEQ ID NO: 8063 - RNA, 20 nt, synthetic construct
  source 1..20: mol_type = other RNA
gaacccaggtacaggttaga

SEQ ID NO: 8064 - RNA, 20 nt, synthetic construct
  source 1..20: mol_type = other RNA
tctaacctgtacctgggttc

SEQ ID NO: 8065 - RNA, 20 nt, synthetic construct
  source 1..20: mol_type = other RNA
aacctgtacctgggttctga

SEQ ID NO: 8066 - RNA, 20 nt, synthetic construct
  source 1..20: mol_type = other RNA
tcagataccttgttctcaga

SEQ ID NO: 8067 - RNA, 20 nt, synthetic construct
  source 1..20: mol_type = other RNA
tgtgctggcaacacatagct

SEQ ID NO: 8068 - RNA, 20 nt, synthetic construct
  source 1..20: mol_type = other RNA
gctgccttcctacttttgcc

SEQ ID NO: 8069 - RNA, 20 nt, synthetic construct
  source 1..20: mol_type = other RNA
cagctgccttcctacttttg

SEQ ID NO: 8070 - RNA, 20 nt, synthetic construct
  source 1..20: mol_type = other RNA
tcagaatctttatacttcct

SEQ ID NO: 8071 - RNA, 20 nt, synthetic construct
  source 1..20: mol_type = other RNA
ggcctgtcatgtctgttgtc

SEQ ID NO: 8072 - RNA, 20 nt, synthetic construct
  source 1..20: mol_type = other RNA
tttgattccctttctgaatt

SEQ ID NO: 8073 - RNA, 20 nt, synthetic construct
  source 1..20: mol_type = other RNA
aggaaggatgccagggacat

SEQ ID NO: 8074 - RNA, 20 nt, synthetic construct
  source 1..20: mol_type = other RNA
atctgcttgcccttcaaggg

SEQ ID NO: 8075 - RNA, 20 nt, synthetic construct
  source 1..20: mol_type = other RNA
gttaagcaagactgctgtgg

SEQ ID NO: 8076 - RNA, 20 nt, synthetic construct
  source 1..20: mol_type = other RNA
tcagttaagcaagactgctg

SEQ ID NO: 8077 - RNA, 20 nt, synthetic construct
  source 1..20: mol_type = other RNA
cctcagttaagcaagactgc

SEQ ID NO: 8078 - RNA, 20 nt, synthetic construct
  source 1..20: mol_type = other RNA
ctcctcagttaagcaagact

SEQ ID NO: 8079 - RNA, 20 nt, synthetic construct
  source 1..20: mol_type = other RNA
agtctctctcctcagttaag

SEQ ID NO: 8080 - RNA, 20 nt, synthetic construct
  source 1..20: mol_type = other RNA
ggcatctgacgtattctagg

SEQ ID NO: 8081 - RNA, 20 nt, synthetic construct
  source 1..20: mol_type = other RNA
ttcttagccagcctagaata

SEQ ID NO: 8082 - RNA, 20 nt, synthetic construct
  source 1..20: mol_type = other RNA
cattcttagccagcctagaa

SEQ ID NO: 8083 - RNA, 20 nt, synthetic construct
  source 1..20: mol_type = other RNA
acaaatcccctctcattctt

SEQ ID NO: 8084 - RNA, 20 nt, synthetic construct
  source 1..20: mol_type = other RNA
tttcctccacaaatcccctc

SEQ ID NO: 8085 - RNA, 20 nt, synthetic construct
  source 1..20: mol_type = other RNA
aagaatacacaccgaagtct

SEQ ID NO: 8086 - RNA, 20 nt, synthetic construct
  source 1..20: mol_type = other RNA
aggctttggctaaatacaaa

SEQ ID NO: 8087 - RNA, 20 nt, synthetic construct
  source 1..20: mol_type = other RNA
ttgtgcatacgcagctttgt

SEQ ID NO: 8088 - RNA, 20 nt, synthetic construct
  source 1..20: mol_type = other RNA
ccttgtgcatacgcagcttt

SEQ ID NO: 8089 - RNA, 20 nt, synthetic construct
  source 1..20: mol_type = other RNA
ctgttcccttgcagttgttc

SEQ ID NO: 8090 - RNA, 20 nt, synthetic construct
  source 1..20: mol_type = other RNA
attgagctcactgttccctt

SEQ ID NO: 8091 - RNA, 20 nt, synthetic construct
  source 1..20: mol_type = other RNA
agcatctccattgagctcac

SEQ ID NO: 8092 - RNA, 20 nt, synthetic construct
  source 1..20: mol_type = other RNA
atggagatgctagagctcac

SEQ ID NO: 8093 - RNA, 20 nt, synthetic construct
  source 1..20: mol_type = other RNA
aatatcccccagtgctatgt

SEQ ID NO: 8094 - RNA, 20 nt, synthetic construct
  source 1..20: mol_type = other RNA
catagcactgggggatattt

SEQ ID NO: 8095 - RNA, 20 nt, synthetic construct
  source 1..20: mol_type = other RNA
gagtggtcagaactcaaata

SEQ ID NO: 8096 - RNA, 20 nt, synthetic construct
  source 1..20: mol_type = other RNA
tctgagtggtcagaactcaa

SEQ ID NO: 8097 - RNA, 20 nt, synthetic construct
  source 1..20: mol_type = other RNA
cctctgagtggtcagaactc

SEQ ID NO: 8098 - RNA, 20 nt, synthetic construct
  source 1..20: mol_type = other RNA
gaggagagacacctcactga

SEQ ID NO: 8099 - RNA, 20 nt, synthetic construct
  source 1..20: mol_type = other RNA
ctgaacatcttgggcattca

SEQ ID NO: 8100 - RNA, 20 nt, synthetic construct
  source 1..20: mol_type = other RNA
actgaatgcccaagatgttc

SEQ ID NO: 8101 - RNA, 20 nt, synthetic construct
  source 1..20: mol_type = other RNA
caaattatggctttctttga

SEQ ID NO: 8102 - RNA, 20 nt, synthetic construct
  source 1..20: mol_type = other RNA
agaaacactccagcaaccct

SEQ ID NO: 8103 - RNA, 20 nt, synthetic construct
  source 1..20: mol_type = other RNA
agcaacccttcttccaagcc

SEQ ID NO: 8104 - RNA, 20 nt, synthetic construct
  source 1..20: mol_type = other RNA
aaggagggttgagtttactt

SEQ ID NO: 8105 - RNA, 20 nt, synthetic construct
  source 1..20: mol_type = other RNA
accctccttagaggtaagga

SEQ ID NO: 8106 - RNA, 20 nt, synthetic construct
  source 1..20: mol_type = other RNA
ttagaggtaaggaacgaata

SEQ ID NO: 8107 - RNA, 20 nt, synthetic construct
  source 1..20: mol_type = other RNA
ggggatgtcatataactgag

SEQ ID NO: 8108 - RNA, 20 nt, synthetic construct
  source 1..20: mol_type = other RNA
gttatatgacatccccagag

SEQ ID NO: 8109 - RNA, 20 nt, synthetic construct
  source 1..20: mol_type = other RNA
cagttatggatcacagtgaa

SEQ ID NO: 8110 - RNA, 20 nt, synthetic construct
  source 1..20: mol_type = other RNA
acacaaataggcccagaaat

SEQ ID NO: 8111 - RNA, 20 nt, synthetic construct
  source 1..20: mol_type = other RNA
gaggtgcattttaaatgttc

SEQ ID NO: 8112 - RNA, 20 nt, synthetic construct
  source 1..20: mol_type = other RNA
gagaactgtgtttcaggaaa

SEQ ID NO: 8113 - RNA, 20 nt, synthetic construct
  source 1..20: mol_type = other RNA
tggtcagcttttgctgacat

SEQ ID NO: 8114 - RNA, 20 nt, synthetic construct
  source 1..20: mol_type = other RNA
catggtcagcttttgctgac

SEQ ID NO: 8115 - RNA, 20 nt, synthetic construct
  source 1..20: mol_type = other RNA
tcaattcttttcttttctga

SEQ ID NO: 8116 - RNA, 20 nt, synthetic construct
  source 1..20: mol_type = other RNA
gtttttaaatttccatttgg

SEQ ID NO: 8117 - RNA, 20 nt, synthetic construct
  source 1..20: mol_type = other RNA
ttacagatataacttttctc

SEQ ID NO: 8118 - RNA, 20 nt, synthetic construct
  source 1..20: mol_type = other RNA
ttcaccttttcctaccataa

SEQ ID NO: 8119 - RNA, 20 nt, synthetic construct
  source 1..20: mol_type = other RNA
gttgattaattggttcagtc

SEQ ID NO: 8120 - RNA, 20 nt, synthetic construct
  source 1..20: mol_type = other RNA
aggacatctaggaaaacatc

SEQ ID NO: 8121 - RNA, 20 nt, synthetic construct
  source 1..20: mol_type = other RNA
ttctgtgacttgcctaacac

SEQ ID NO: 8122 - RNA, 20 nt, synthetic construct
  source 1..20: mol_type = other RNA
ctttctgtgacttgcctaac

SEQ ID NO: 8123 - RNA, 20 nt, synthetic construct
  source 1..20: mol_type = other RNA
ttttctgtatgtttggaaat

SEQ ID NO: 8124 - RNA, 20 nt, synthetic construct
  source 1..20: mol_type = other RNA
atgactcaggtatagatttt

SEQ ID NO: 8125 - RNA, 20 nt, synthetic construct
  source 1..20: mol_type = other RNA
ttaaaaatctatacctgagt

SEQ ID NO: 8126 - RNA, 20 nt, synthetic construct
  source 1..20: mol_type = other RNA
ggtatagatttttaaagagc

SEQ ID NO: 8127 - RNA, 20 nt, synthetic construct
  source 1..20: mol_type = other RNA
gatttactggggtacatcat

SEQ ID NO: 8128 - RNA, 20 nt, synthetic construct
  source 1..20: mol_type = other RNA
tttgttggtctattttcttg

SEQ ID NO: 8129 - RNA, 20 nt, synthetic construct
  source 1..20: mol_type = other RNA
ttggtctgtcatctgttcag

SEQ ID NO: 8130 - RNA, 20 nt, synthetic construct
  source 1..20: mol_type = other RNA
ctccttggtctgtcatctgt

SEQ ID NO: 8131 - RNA, 20 nt, synthetic construct
  source 1..20: mol_type = other RNA
cctgttacttcaaatggtga

SEQ ID NO: 8132 - RNA, 20 nt, synthetic construct
  source 1..20: mol_type = other RNA
cccctgttacttcaaatggt

SEQ ID NO: 8133 - RNA, 20 nt, synthetic construct
  source 1..20: mol_type = other RNA
tctcccctgttacttcaaat

SEQ ID NO: 8134 - RNA, 20 nt, synthetic construct
  source 1..20: mol_type = other RNA
aggtctgaaagctgacaaga

SEQ ID NO: 8135 - RNA, 20 nt, synthetic construct
  source 1..20: mol_type = other RNA
tatagaaagacatacagata

SEQ ID NO: 8136 - RNA, 20 nt, synthetic construct
  source 1..20: mol_type = other RNA
gtctggctatctgtatgtct

SEQ ID NO: 8137 - RNA, 20 nt, synthetic construct
  source 1..20: mol_type = other RNA
cttcaaaatctctcagttaa

SEQ ID NO: 8138 - RNA, 20 nt, synthetic construct
  source 1..20: mol_type = other RNA
cagttaatccaaagtaacat

SEQ ID NO: 8139 - RNA, 20 nt, synthetic construct
  source 1..20: mol_type = other RNA
gttaatccaaagtaacatat

SEQ ID NO: 8140 - RNA, 20 nt, synthetic construct
  source 1..20: mol_type = other RNA
ttccaccttctgccaaatat

SEQ ID NO: 8141 - RNA, 20 nt, synthetic construct
  source 1..20: mol_type = other RNA
ataagaaaaccgagagaaaa

SEQ ID NO: 8142 - RNA, 20 nt, synthetic construct
  source 1..20: mol_type = other RNA
cggttttcttatggagtata

SEQ ID NO: 8143 - RNA, 20 nt, synthetic construct
  source 1..20: mol_type = other RNA
tctatactccataagaaaac

SEQ ID NO: 8144 - RNA, 20 nt, synthetic construct
  source 1..20: mol_type = other RNA
gttttcttatggagtataga

SEQ ID NO: 8145 - RNA, 20 nt, synthetic construct
  source 1..20: mol_type = other RNA
acttctaaacaactgtgaac

SEQ ID NO: 8146 - RNA, 20 nt, synthetic construct
  source 1..20: mol_type = other RNA
ctaaaggtcctgtaacaatc

SEQ ID NO: 8147 - RNA, 20 nt, synthetic construct
  source 1..20: mol_type = other RNA
acattttgttgtaacaaagt

SEQ ID NO: 8148 - RNA, 20 nt, synthetic construct
  source 1..20: mol_type = other RNA
catctctggtgaactgtatt

SEQ ID NO: 8149 - RNA, 20 nt, synthetic construct
  source 1..20: mol_type = other RNA
ggtgaactgtattgttttgt

SEQ ID NO: 8150 - RNA, 20 nt, synthetic construct
  source 1..20: mol_type = other RNA
gcatctggattcctgcagta

SEQ ID NO: 8151 - RNA, 20 nt, synthetic construct
  source 1..20: mol_type = other RNA
catctgacattgggatccat

SEQ ID NO: 8152 - RNA, 20 nt, synthetic construct
  source 1..20: mol_type = other RNA
ggccagacaaccacaccctt

SEQ ID NO: 8153 - RNA, 20 nt, synthetic construct
  source 1..20: mol_type = other RNA
ttttatcccaacgtccaagg

SEQ ID NO: 8154 - RNA, 20 nt, synthetic construct
  source 1..20: mol_type = other RNA
gggtcagccaatgggaagga

SEQ ID NO: 8155 - RNA, 20 nt, synthetic construct
  source 1..20: mol_type = other RNA
gcgccttctctgggggaacc

SEQ ID NO: 8156 - RNA, 20 nt, synthetic construct
  source 1..20: mol_type = other RNA
gccctggttcccccagagaa

SEQ ID NO: 8157 - RNA, 20 nt, synthetic construct
  source 1..20: mol_type = other RNA
gggggaaccagggctgagat

SEQ ID NO: 8158 - RNA, 20 nt, synthetic construct
  source 1..20: mol_type = other RNA
cctggttattcaatagatta

SEQ ID NO: 8159 - RNA, 20 nt, synthetic construct
  source 1..20: mol_type = other RNA
tgatgagcttggtaaatcat

SEQ ID NO: 8160 - RNA, 20 nt, synthetic construct
  source 1..20: mol_type = other RNA
tcatgagcctttcctggtat

SEQ ID NO: 8161 - RNA, 20 nt, synthetic construct
  source 1..20: mol_type = other RNA
ttgcaaacttcagctttaca

SEQ ID NO: 8162 - RNA, 20 nt, synthetic construct
  source 1..20: mol_type = other RNA
gaaactgtaaagctgaagtt

SEQ ID NO: 8163 - RNA, 20 nt, synthetic construct
  source 1..20: mol_type = other RNA
aaaaccacattcctctgaaa

SEQ ID NO: 8164 - RNA, 20 nt, synthetic construct
  source 1..20: mol_type = other RNA
aggatgacagactcaaaaac

SEQ ID NO: 8165 - RNA, 20 nt, synthetic construct
  source 1..20: mol_type = other RNA
tgggtctaggtaacagtaca

SEQ ID NO: 8166 - RNA, 20 nt, synthetic construct
  source 1..20: mol_type = other RNA
atctccctgtctaccttaat

SEQ ID NO: 8167 - RNA, 20 nt, synthetic construct
  source 1..20: mol_type = other RNA
ctgtctaccttaatcttagg

SEQ ID NO: 8168 - RNA, 20 nt, synthetic construct
  source 1..20: mol_type = other RNA
ttctcatggaacacgtatct

SEQ ID NO: 8169 - RNA, 20 nt, synthetic construct
  source 1..20: mol_type = other RNA
tggaacacgtatctgtgttg

SEQ ID NO: 8170 - RNA, 20 nt, synthetic construct
  source 1..20: mol_type = other RNA
tcttcacaaacagcaacaca

SEQ ID NO: 8171 - RNA, 20 nt, synthetic construct
  source 1..20: mol_type = other RNA
aagggaataaaattttggcc

SEQ ID NO: 8172 - RNA, 20 nt, synthetic construct
  source 1..20: mol_type = other RNA
gagaggggtactggccaaaa

SEQ ID NO: 8173 - RNA, 20 nt, synthetic construct
  source 1..20: mol_type = other RNA
cagagaggggtactggccaa

SEQ ID NO: 8174 - RNA, 20 nt, synthetic construct
  source 1..20: mol_type = other RNA
ctgagagacaatgtgtcttt

SEQ ID NO: 8175 - RNA, 20 nt, synthetic construct
  source 1..20: mol_type = other RNA
gagagacaatgtgtctttgc

SEQ ID NO: 8176 - RNA, 20 nt, synthetic construct
  source 1..20: mol_type = other RNA
atctaggacttccaggcaaa

SEQ ID NO: 8177 - RNA, 20 nt, synthetic construct
  source 1..20: mol_type = other RNA
aaagccaaagccttaagttt

SEQ ID NO: 8178 - RNA, 20 nt, synthetic construct
  source 1..20: mol_type = other RNA
agagcactgatcctccaaag

SEQ ID NO: 8179 - RNA, 20 nt, synthetic construct
  source 1..20: mol_type = other RNA
ggagaaatgtgtgacggttt

SEQ ID NO: 8180 - RNA, 20 nt, synthetic construct
  source 1..20: mol_type = other RNA
ggtctcctgccttgttctca

SEQ ID NO: 8181 - RNA, 20 nt, synthetic construct
  source 1..20: mol_type = other RNA
tgccttgttctcaggaacac

SEQ ID NO: 8182 - RNA, 20 nt, synthetic construct
  source 1..20: mol_type = other RNA
tttgggtgttcctgagaaca

SEQ ID NO: 8183 - RNA, 20 nt, synthetic construct
  source 1..20: mol_type = other RNA
ggaacacccaaaagagatct

SEQ ID NO: 8184 - RNA, 20 nt, synthetic construct
  source 1..20: mol_type = other RNA
tgtgcctgttctttggcaaa

SEQ ID NO: 8185 - RNA, 20 nt, synthetic construct
  source 1..20: mol_type = other RNA
gatctgtcctttggtgccca

SEQ ID NO: 8186 - RNA, 20 nt, synthetic construct
  source 1..20: mol_type = other RNA
ttgaagttccagaatgctat

SEQ ID NO: 8187 - RNA, 20 nt, synthetic construct
  source 1..20: mol_type = other RNA
aagattcatagcattctgga

SEQ ID NO: 8188 - RNA, 20 nt, synthetic construct
  source 1..20: mol_type = other RNA
gttctacattagtaggcaga

SEQ ID NO: 8189 - RNA, 20 nt, synthetic construct
  source 1..20: mol_type = other RNA
gaaaatgacgaccatgctct

SEQ ID NO: 8190 - RNA, 20 nt, synthetic construct
  source 1..20: mol_type = other RNA
tgcttctgtgttctggaaat

SEQ ID NO: 8191 - RNA, 20 nt, synthetic construct
  source 1..20: mol_type = other RNA
gtttgttttctcctctttga

SEQ ID NO: 8192 - RNA, 20 nt, synthetic construct
  source 1..20: mol_type = other RNA
tctttgaatttcagcaccaa

SEQ ID NO: 8193 - RNA, 20 nt, synthetic construct
  source 1..20: mol_type = other RNA
gttggtgctgaaattcaaag

SEQ ID NO: 8194 - RNA, 20 nt, synthetic construct
  source 1..20: mol_type = other RNA
ttgaatttcagcaccaacgg

SEQ ID NO: 8195 - RNA, 20 nt, synthetic construct
  source 1..20: mol_type = other RNA
gtccatcaccatggtagcag

SEQ ID NO: 8196 - RNA, 20 nt, synthetic construct
  source 1..20: mol_type = other RNA
ataactctgtccatcaccat

SEQ ID NO: 8197 - RNA, 20 nt, synthetic construct
  source 1..20: mol_type = other RNA
ttctccaccactgttacagg

SEQ ID NO: 8198 - RNA, 20 nt, synthetic construct
  source 1..20: mol_type = other RNA
accactgttacaggaaggac

SEQ ID NO: 8199 - RNA, 20 nt, synthetic construct
  source 1..20: mol_type = other RNA
gatgccagtgtggtgtcata

SEQ ID NO: 8200 - RNA, 20 nt, synthetic construct
  source 1..20: mol_type = other RNA
atgacaccacactggcatca

SEQ ID NO: 8201 - RNA, 20 nt, synthetic construct
  source 1..20: mol_type = other RNA
aagacatacccatttgggta

SEQ ID NO: 8202 - RNA, 20 nt, synthetic construct
  source 1..20: mol_type = other RNA
caagagaaacagccacccac

SEQ ID NO: 8203 - RNA, 20 nt, synthetic construct
  source 1..20: mol_type = other RNA
tccaggagaaatttaagtgg

SEQ ID NO: 8204 - RNA, 20 nt, synthetic construct
  source 1..20: mol_type = other RNA
tggaagagccatgcttccag

SEQ ID NO: 8205 - RNA, 20 nt, synthetic construct
  source 1..20: mol_type = other RNA
cagacccagaatgttggaca

SEQ ID NO: 8206 - RNA, 20 nt, synthetic construct
  source 1..20: mol_type = other RNA
gacccagaatgttggacaga

SEQ ID NO: 8207 - RNA, 20 nt, synthetic construct
  source 1..20: mol_type = other RNA
ggcttcttgctttgggcaca

SEQ ID NO: 8208 - RNA, 20 nt, synthetic construct
  source 1..20: mol_type = other RNA
gaccctgtgcccaaagcaag

SEQ ID NO: 8209 - RNA, 20 nt, synthetic construct
  source 1..20: mol_type = other RNA
cagaccctgtgcccaaagca

SEQ ID NO: 8210 - RNA, 20 nt, synthetic construct
  source 1..20: mol_type = other RNA
tctcagaccctgtgcccaaa

SEQ ID NO: 8211 - RNA, 20 nt, synthetic construct
  source 1..20: mol_type = other RNA
cctctcagaccctgtgccca

SEQ ID NO: 8212 - RNA, 20 nt, synthetic construct
  source 1..20: mol_type = other RNA
cttttctcatagttgataga

SEQ ID NO: 8213 - RNA, 20 nt, synthetic construct
  source 1..20: mol_type = other RNA
tttctcatagttgatagaag

SEQ ID NO: 8214 - RNA, 20 nt, synthetic construct
  source 1..20: mol_type = other RNA
tacttctatcaactatgaga

SEQ ID NO: 8215 - RNA, 20 nt, synthetic construct
  source 1..20: mol_type = other RNA
tagttgatagaagtaggagg

SEQ ID NO: 8216 - RNA, 20 nt, synthetic construct
  source 1..20: mol_type = other RNA
aagtatcctcctacttctat

SEQ ID NO: 8217 - RNA, 20 nt, synthetic construct
  source 1..20: mol_type = other RNA
ccacctccaagtatcctcct

SEQ ID NO: 8218 - RNA, 20 nt, synthetic construct
  source 1..20: mol_type = other RNA
tgaatagaaagctcagaaga

SEQ ID NO: 8219 - RNA, 20 nt, synthetic construct
  source 1..20: mol_type = other RNA
gaagaacatatgaccatgtg

SEQ ID NO: 8220 - RNA, 20 nt, synthetic construct
  source 1..20: mol_type = other RNA
agggcttggagattagaatg

SEQ ID NO: 8221 - RNA, 20 nt, synthetic construct
  source 1..20: mol_type = other RNA
aagccctggagtgaaggttg

SEQ ID NO: 8222 - RNA, 20 nt, synthetic construct
  source 1..20: mol_type = other RNA
aagtcaatatagatatcctt

SEQ ID NO: 8223 - RNA, 20 nt, synthetic construct
  source 1..20: mol_type = other RNA
tctaacctgtataaacacat

SEQ ID NO: 8224 - RNA, 20 nt, synthetic construct
  source 1..20: mol_type = other RNA
aacctgtataaacacattgg

SEQ ID NO: 8225 - RNA, 20 nt, synthetic construct
  source 1..20: mol_type = other RNA
gaacccaatgtgtttataca

SEQ ID NO: 8226 - RNA, 20 nt, synthetic construct
  source 1..20: mol_type = other RNA
tgggctggcaacacatagct

SEQ ID NO: 8227 - RNA, 20 nt, synthetic construct
  source 1..20: mol_type = other RNA
ttttgcccctcatgggctgg

SEQ ID NO: 8228 - RNA, 20 nt, synthetic construct
  source 1..20: mol_type = other RNA
gctgccttcctccttttgcc

SEQ ID NO: 8229 - RNA, 20 nt, synthetic construct
  source 1..20: mol_type = other RNA
cagctgccttcctccttttg

SEQ ID NO: 8230 - RNA, 20 nt, synthetic construct
  source 1..20: mol_type = other RNA
atacttcctgactctcagct

SEQ ID NO: 8231 - RNA, 20 nt, synthetic construct
  source 1..20: mol_type = other RNA
tcagcatctctatacttcct

SEQ ID NO: 8232 - RNA, 20 nt, synthetic construct
  source 1..20: mol_type = other RNA
tgtatttgatagtccttcat

SEQ ID NO: 8233 - RNA, 20 nt, synthetic construct
  source 1..20: mol_type = other RNA
agcctaccatatctgttgtc

SEQ ID NO: 8234 - RNA, 20 nt, synthetic construct
  source 1..20: mol_type = other RNA
caagcctaccatatctgttg

SEQ ID NO: 8235 - RNA, 20 nt, synthetic construct
  source 1..20: mol_type = other RNA
gttctctcaagcctaccata

SEQ ID NO: 8236 - RNA, 20 nt, synthetic construct
  source 1..20: mol_type = other RNA
tttgattccctttctcagtt

SEQ ID NO: 8237 - RNA, 20 nt, synthetic construct
  source 1..20: mol_type = other RNA
atctgcttgtccttcaatcc

SEQ ID NO: 8238 - RNA, 20 nt, synthetic construct
  source 1..20: mol_type = other RNA
gttaagcaagactgctgtgg

SEQ ID NO: 8239 - RNA, 20 nt, synthetic construct
  source 1..20: mol_type = other RNA
tcagttaagcaagactgctg

SEQ ID NO: 8240 - RNA, 20 nt, synthetic construct
  source 1..20: mol_type = other RNA
cctcagttaagcaagactgc

SEQ ID NO: 8241 - RNA, 20 nt, synthetic construct
  source 1..20: mol_type = other RNA
ctcctcagttaagcaagact

SEQ ID NO: 8242 - RNA, 20 nt, synthetic construct
  source 1..20: mol_type = other RNA
agtctctctcctcagttaag

SEQ ID NO: 8243 - RNA, 20 nt, synthetic construct
  source 1..20: mol_type = other RNA
ggcagctgatgtgttctagg

SEQ ID NO: 8244 - RNA, 20 nt, synthetic construct
  source 1..20: mol_type = other RNA
ttcttagccagcctagaaca

SEQ ID NO: 8245 - RNA, 20 nt, synthetic construct
  source 1..20: mol_type = other RNA
tttcttccacaaatcccttc

SEQ ID NO: 8246 - RNA, 20 nt, synthetic construct
  source 1..20: mol_type = other RNA
aggaatacacacagaagtct

SEQ ID NO: 8247 - RNA, 20 nt, synthetic construct
  source 1..20: mol_type = other RNA
tcaaggctttggctaaatac

SEQ ID NO: 8248 - RNA, 20 nt, synthetic construct
  source 1..20: mol_type = other RNA
aggctttggctaaatacaaa

SEQ ID NO: 8249 - RNA, 20 nt, synthetic construct
  source 1..20: mol_type = other RNA
ctgtgcatacgcagctttgt

SEQ ID NO: 8250 - RNA, 20 nt, synthetic construct
  source 1..20: mol_type = other RNA
ccctgtgcatacgcagcttt

SEQ ID NO: 8251 - RNA, 20 nt, synthetic construct
  source 1..20: mol_type = other RNA
attgagcttactgttcccct

SEQ ID NO: 8252 - RNA, 20 nt, synthetic construct
  source 1..20: mol_type = other RNA
ggcatctccattgagcttac

SEQ ID NO: 8253 - RNA, 20 nt, synthetic construct
  source 1..20: mol_type = other RNA
atggagatgccagagctcac

SEQ ID NO: 8254 - RNA, 20 nt, synthetic construct
  source 1..20: mol_type = other RNA
catagcactgggggatattt

SEQ ID NO: 8255 - RNA, 20 nt, synthetic construct
  source 1..20: mol_type = other RNA
gagtggtcagaattcaaata

SEQ ID NO: 8256 - RNA, 20 nt, synthetic construct
  source 1..20: mol_type = other RNA
tctgagtggtcagaattcaa

SEQ ID NO: 8257 - RNA, 20 nt, synthetic construct
  source 1..20: mol_type = other RNA
gaggagaaacacctcactac

SEQ ID NO: 8258 - RNA, 20 nt, synthetic construct
  source 1..20: mol_type = other RNA
actgaatgcccaaaatgtag

SEQ ID NO: 8259 - RNA, 20 nt, synthetic construct
  source 1..20: mol_type = other RNA
ctacattttgggcattcagt

SEQ ID NO: 8260 - RNA, 20 nt, synthetic construct
  source 1..20: mol_type = other RNA
agaaaaactccaacaaccct

SEQ ID NO: 8261 - RNA, 20 nt, synthetic construct
  source 1..20: mol_type = other RNA
aacaacccttcttccaagcc

SEQ ID NO: 8262 - RNA, 20 nt, synthetic construct
  source 1..20: mol_type = other RNA
aagtaaattaactgcattcc

SEQ ID NO: 8263 - RNA, 20 nt, synthetic construct
  source 1..20: mol_type = other RNA
aaggggggttgagttttttt

SEQ ID NO: 8264 - RNA, 20 nt, synthetic construct
  source 1..20: mol_type = other RNA
accccccttagaggcaaggg

SEQ ID NO: 8265 - RNA, 20 nt, synthetic construct
  source 1..20: mol_type = other RNA
gttatatggcattcctattg

SEQ ID NO: 8266 - RNA, 20 nt, synthetic construct
  source 1..20: mol_type = other RNA
attaaatttttaaatagaag

SEQ ID NO: 8267 - RNA, 20 nt, synthetic construct
  source 1..20: mol_type = other RNA
cagttatgtatcacagtgaa

SEQ ID NO: 8268 - RNA, 20 nt, synthetic construct
  source 1..20: mol_type = other RNA
acacaaacaggcccagaaat

SEQ ID NO: 8269 - RNA, 20 nt, synthetic construct
  source 1..20: mol_type = other RNA
ccaatgtcatcaattctata

SEQ ID NO: 8270 - RNA, 20 nt, synthetic construct
  source 1..20: mol_type = other RNA
gaggtgcattttaaatgttc

SEQ ID NO: 8271 - RNA, 20 nt, synthetic construct
  source 1..20: mol_type = other RNA
gagaactgtgtttcaggaaa

SEQ ID NO: 8272 - RNA, 20 nt, synthetic construct
  source 1..20: mol_type = other RNA
tggtcagcttttgctgacat

SEQ ID NO: 8273 - RNA, 20 nt, synthetic construct
  source 1..20: mol_type = other RNA
catggtcagcttttgctgac

SEQ ID NO: 8274 - RNA, 20 nt, synthetic construct
  source 1..20: mol_type = other RNA
tgctattctgcttttgtttc

SEQ ID NO: 8275 - RNA, 20 nt, synthetic construct
  source 1..20: mol_type = other RNA
ggttcttttcttttctcttg

SEQ ID NO: 8276 - RNA, 20 nt, synthetic construct
  source 1..20: mol_type = other RNA
ccggttcttttcttttctct

SEQ ID NO: 8277 - RNA, 20 nt, synthetic construct
  source 1..20: mol_type = other RNA
gttctttaattttcatttgg

SEQ ID NO: 8278 - RNA, 20 nt, synthetic construct
  source 1..20: mol_type = other RNA
aatgaagaactcactggatg

SEQ ID NO: 8279 - RNA, 20 nt, synthetic construct
  source 1..20: mol_type = other RNA
ctggatggccttatcatcac

SEQ ID NO: 8280 - RNA, 20 nt, synthetic construct
  source 1..20: mol_type = other RNA
tattgaattattttctaggt

SEQ ID NO: 8281 - RNA, 20 nt, synthetic construct
  source 1..20: mol_type = other RNA
gttgattaataggttcagtc

SEQ ID NO: 8282 - RNA, 20 nt, synthetic construct
  source 1..20: mol_type = other RNA
agggcatctaggaaaaatcc

SEQ ID NO: 8283 - RNA, 20 nt, synthetic construct
  source 1..20: mol_type = other RNA
ttctgtgacttgcctaacac

SEQ ID NO: 8284 - RNA, 20 nt, synthetic construct
  source 1..20: mol_type = other RNA
caacacgccaaatatacaga

SEQ ID NO: 8285 - RNA, 20 nt, synthetic construct
  source 1..20: mol_type = other RNA
tagtcaagaagctaaatgac

SEQ ID NO: 8286 - RNA, 20 nt, synthetic construct
  source 1..20: mol_type = other RNA
ttaaaattctatacctgagt

SEQ ID NO: 8287 - RNA, 20 nt, synthetic construct
  source 1..20: mol_type = other RNA
ggtatagaattttaaagagc

SEQ ID NO: 8288 - RNA, 20 nt, synthetic construct
  source 1..20: mol_type = other RNA
atgatttactgggatatatc

SEQ ID NO: 8289 - RNA, 20 nt, synthetic construct
  source 1..20: mol_type = other RNA
attcaaagctaaaaagaaaa

SEQ ID NO: 8290 - RNA, 20 nt, synthetic construct
  source 1..20: mol_type = other RNA
ttccttgtgccttatttgct

SEQ ID NO: 8291 - RNA, 20 nt, synthetic construct
  source 1..20: mol_type = other RNA
tttgttggtctattttcttt

SEQ ID NO: 8292 - RNA, 20 nt, synthetic construct
  source 1..20: mol_type = other RNA
ttggtctgtcatctgtttag

SEQ ID NO: 8293 - RNA, 20 nt, synthetic construct
  source 1..20: mol_type = other RNA
ctccttggtctgtcatctgt

SEQ ID NO: 8294 - RNA, 20 nt, synthetic construct
  source 1..20: mol_type = other RNA
tgatggtgatggatatgctc

SEQ ID NO: 8295 - RNA, 20 nt, synthetic construct
  source 1..20: mol_type = other RNA
tgttactcatgatggtgatg

SEQ ID NO: 8296 - RNA, 20 nt, synthetic construct
  source 1..20: mol_type = other RNA
cctgttactcatgatggtga

SEQ ID NO: 8297 - RNA, 20 nt, synthetic construct
  source 1..20: mol_type = other RNA
ctcctgttactcatgatggt

SEQ ID NO: 8298 - RNA, 20 nt, synthetic construct
  source 1..20: mol_type = other RNA
gctttcacacctggaggatg

SEQ ID NO: 8299 - RNA, 20 nt, synthetic construct
  source 1..20: mol_type = other RNA
aggtgtgaaagctgagaagt

SEQ ID NO: 8300 - RNA, 20 nt, synthetic construct
  source 1..20: mol_type = other RNA
atatctacttctcagctttc

SEQ ID NO: 8301 - RNA, 20 nt, synthetic construct
  source 1..20: mol_type = other RNA
ataaaactgcatgatctatt

SEQ ID NO: 8302 - RNA, 20 nt, synthetic construct
  source 1..20: mol_type = other RNA
aagacacacttcaaaatccc

SEQ ID NO: 8303 - RNA, 20 nt, synthetic construct
  source 1..20: mol_type = other RNA
cggttaatccaaaggaatgt

SEQ ID NO: 8304 - RNA, 20 nt, synthetic construct
  source 1..20: mol_type = other RNA
gttaatccaaaggaatgtat

SEQ ID NO: 8305 - RNA, 20 nt, synthetic construct
  source 1..20: mol_type = other RNA
ttctaccttctgccaaatac

SEQ ID NO: 8306 - RNA, 20 nt, synthetic construct
  source 1..20: mol_type = other RNA
cagttttcttataaagcata

SEQ ID NO: 8307 - RNA, 20 nt, synthetic construct
  source 1..20: mol_type = other RNA
gttttcttataaagcataga

SEQ ID NO: 8308 - RNA, 20 nt, synthetic construct
  source 1..20: mol_type = other RNA
acttctaaacaactgtcaac

SEQ ID NO: 8309 - RNA, 20 nt, synthetic construct
  source 1..20: mol_type = other RNA
caaatggtcctcaacttcta

SEQ ID NO: 8310 - RNA, 20 nt, synthetic construct
  source 1..20: mol_type = other RNA
ctaaagtcccataacactca

SEQ ID NO: 8311 - RNA, 20 nt, synthetic construct
  source 1..20: mol_type = other RNA
atgttttcttgtaacaaagt

SEQ ID NO: 8312 - RNA, 20 nt, synthetic construct
  source 1..20: mol_type = other RNA
aatctctggtgacctgtatt

SEQ ID NO: 8313 - RNA, 20 nt, synthetic construct
  source 1..20: mol_type = other RNA
ggtgacctgtattgttttgg

SEQ ID NO: 8314 - RNA, 20 nt, synthetic construct
  source 1..20: mol_type = other RNA
gcatctggattcctgcagta

SEQ ID NO: 8315 - RNA, 20 nt, synthetic construct
  source 1..20: mol_type = other RNA
catctgacactgggatccat

SEQ ID NO: 8316 - RNA, 20 nt, synthetic construct
  source 1..20: mol_type = other RNA
cacggtggtcccagttccaa

SEQ ID NO: 8317 - RNA, 20 nt, synthetic construct
  source 1..20: mol_type = other RNA
gtgcttggaactgggaccac

SEQ ID NO: 8318 - RNA, 20 nt, synthetic construct
  source 1..20: mol_type = other RNA
gacattgggataaaaagatt

SEQ ID NO: 8319 - RNA, 20 nt, synthetic construct
  source 1..20: mol_type = other RNA
ggtccccccagagaaggcac

SEQ ID NO: 8320 - RNA, 20 nt, synthetic construct
  source 1..20: mol_type = other RNA
ggggggaccagagctgggat

SEQ ID NO: 8321 - RNA, 20 nt, synthetic construct
  source 1..20: mol_type = other RNA
acatcccagctctggtcccc

SEQ ID NO: 8322 - RNA, 20 nt, synthetic construct
  source 1..20: mol_type = other RNA
caaggcactcaacatcccag

SEQ ID NO: 8323 - RNA, 20 nt, synthetic construct
  source 1..20: mol_type = other RNA
aggacactggatttatcact

SEQ ID NO: 8324 - RNA, 20 nt, synthetic construct
  source 1..20: mol_type = other RNA
taagcctgtccagccctttc

SEQ ID NO: 8325 - RNA, 20 nt, synthetic construct
  source 1..20: mol_type = other RNA
aaaatggcattccttcaaaa

SEQ ID NO: 8326 - RNA, 20 nt, synthetic construct
  source 1..20: mol_type = other RNA
agaacaacagcctcaaaaat

SEQ ID NO: 8327 - RNA, 20 nt, synthetic construct
  source 1..20: mol_type = other RNA
ggacaatacggatctaatga

SEQ ID NO: 8328 - RNA, 20 nt, synthetic construct
  source 1..20: mol_type = other RNA
ccagcctaccttcatcttgg

SEQ ID NO: 8329 - RNA, 20 nt, synthetic construct
  source 1..20: mol_type = other RNA
aatcctaggtgtggaaggca

SEQ ID NO: 8330 - RNA, 20 nt, synthetic construct
  source 1..20: mol_type = other RNA
gtgttctcatccctgcttct

SEQ ID NO: 8331 - RNA, 20 nt, synthetic construct
  source 1..20: mol_type = other RNA
tccctgcttctcatggaaca

SEQ ID NO: 8332 - RNA, 20 nt, synthetic construct
  source 1..20: mol_type = other RNA
tggaacatttatctccgttg

SEQ ID NO: 8333 - RNA, 20 nt, synthetic construct
  source 1..20: mol_type = other RNA
aaaaacaacggagataaatg

SEQ ID NO: 8334 - RNA, 20 nt, synthetic construct
  source 1..20: mol_type = other RNA
tcttctcaaaaaacaacgga

SEQ ID NO: 8335 - RNA, 20 nt, synthetic construct
  source 1..20: mol_type = other RNA
gttgttttttgagaagaaga

SEQ ID NO: 8336 - RNA, 20 nt, synthetic construct
  source 1..20: mol_type = other RNA
ttacaagaaagctgacatcc

SEQ ID NO: 8337 - RNA, 20 nt, synthetic construct
  source 1..20: mol_type = other RNA
cctcctaggctataaaattt

SEQ ID NO: 8338 - RNA, 20 nt, synthetic construct
  source 1..20: mol_type = other RNA
taggctataaaattttggcc

SEQ ID NO: 8339 - RNA, 20 nt, synthetic construct
  source 1..20: mol_type = other RNA
gggagaaggagtacaggcca

SEQ ID NO: 8340 - RNA, 20 nt, synthetic construct
  source 1..20: mol_type = other RNA
cagggagaaggagtacaggc

SEQ ID NO: 8341 - RNA, 20 nt, synthetic construct
  source 1..20: mol_type = other RNA
ttctccctgagaggcaatgt

SEQ ID NO: 8342 - RNA, 20 nt, synthetic construct
  source 1..20: mol_type = other RNA
ctgagaggcaatgtgtcttt

SEQ ID NO: 8343 - RNA, 20 nt, synthetic construct
  source 1..20: mol_type = other RNA
aaagcaaaagccttcagatt

SEQ ID NO: 8344 - RNA, 20 nt, synthetic construct
  source 1..20: mol_type = other RNA
tccaaagcaaaagccttcag

SEQ ID NO: 8345 - RNA, 20 nt, synthetic construct
  source 1..20: mol_type = other RNA
tgccttgttctcatgaacac

SEQ ID NO: 8346 - RNA, 20 nt, synthetic construct
  source 1..20: mol_type = other RNA
tctgggtgttcatgagaaca

SEQ ID NO: 8347 - RNA, 20 nt, synthetic construct
  source 1..20: mol_type = other RNA
tgaacacccagaagaggtgt

SEQ ID NO: 8348 - RNA, 20 nt, synthetic construct
  source 1..20: mol_type = other RNA
tgtgaatggtcttttgctta

SEQ ID NO: 8349 - RNA, 20 nt, synthetic construct
  source 1..20: mol_type = other RNA
gatctgttttttgtttgttt

SEQ ID NO: 8350 - RNA, 20 nt, synthetic construct
  source 1..20: mol_type = other RNA
tctatattagcatgcaaatt

SEQ ID NO: 8351 - RNA, 20 nt, synthetic construct
  source 1..20: mol_type = other RNA
gattattccactttgtgtgt

SEQ ID NO: 8352 - RNA, 20 nt, synthetic construct
  source 1..20: mol_type = other RNA
gtattgcctagaaaagggaa

SEQ ID NO: 8353 - RNA, 20 nt, synthetic construct
  source 1..20: mol_type = other RNA
tttaatttcagcaccaactg

SEQ ID NO: 8354 - RNA, 20 nt, synthetic construct
  source 1..20: mol_type = other RNA
accactatcacaggaagaac

SEQ ID NO: 8355 - RNA, 20 nt, synthetic construct
  source 1..20: mol_type = other RNA
gatgccaatgtggtgtcata

SEQ ID NO: 8356 - RNA, 20 nt, synthetic construct
  source 1..20: mol_type = other RNA
tagctggcccatgctacaag

SEQ ID NO: 8357 - RNA, 20 nt, synthetic construct
  source 1..20: mol_type = other RNA
cttcctaggtccaaatttct

SEQ ID NO: 8358 - RNA, 20 nt, synthetic construct
  source 1..20: mol_type = other RNA
gagtctatgagaaatttgga

SEQ ID NO: 8359 - RNA, 20 nt, synthetic construct
  source 1..20: mol_type = other RNA
tagactcagagtttgtagca

SEQ ID NO: 8360 - RNA, 20 nt, synthetic construct
  source 1..20: mol_type = other RNA
gagtttgtagcaaaatgtct

SEQ ID NO: 8361 - RNA, 20 nt, synthetic construct
  source 1..20: mol_type = other RNA
aaagtaagtttcctgagaca

SEQ ID NO: 8362 - RNA, 20 nt, synthetic construct
  source 1..20: mol_type = other RNA
ggaaacttacttttgagcaa

SEQ ID NO: 8363 - RNA, 20 nt, synthetic construct
  source 1..20: mol_type = other RNA
tcattcagaccttttgctca

SEQ ID NO: 8364 - RNA, 20 nt, synthetic construct
  source 1..20: mol_type = other RNA
atatatcctgctgcttccat

SEQ ID NO: 8365 - RNA, 20 nt, synthetic construct
  source 1..20: mol_type = other RNA
ttagctttacattaatgaga

SEQ ID NO: 8366 - RNA, 20 nt, synthetic construct
  source 1..20: mol_type = other RNA
ttaatgtaaagctaaggaga

SEQ ID NO: 8367 - RNA, 20 nt, synthetic construct
  source 1..20: mol_type = other RNA
gcatttggtcatttgatctc

SEQ ID NO: 8368 - RNA, 20 nt, synthetic construct
  source 1..20: mol_type = other RNA
attccctgaagtgaaatttg

SEQ ID NO: 8369 - RNA, 20 nt, synthetic construct
  source 1..20: mol_type = other RNA
ggcctgtgatcccaacactt

SEQ ID NO: 8370 - RNA, 20 nt, synthetic construct
  source 1..20: mol_type = other RNA
caaagtgttgggatcacagg

SEQ ID NO: 8371 - RNA, 20 nt, synthetic construct
  source 1..20: mol_type = other RNA
ggtgatctgcccgtcttgtc

SEQ ID NO: 8372 - RNA, 20 nt, synthetic construct
  source 1..20: mol_type = other RNA
tgacctctggtgatctgccc

SEQ ID NO: 8373 - RNA, 20 nt, synthetic construct
  source 1..20: mol_type = other RNA
acgaaaaattaaaaaattag

SEQ ID NO: 8374 - RNA, 20 nt, synthetic construct
  source 1..20: mol_type = other RNA
caagtagttggaattacagg

SEQ ID NO: 8375 - RNA, 20 nt, synthetic construct
  source 1..20: mol_type = other RNA
gcctcccaagtagttggaat

SEQ ID NO: 8376 - RNA, 20 nt, synthetic construct
  source 1..20: mol_type = other RNA
tgcctcagcctcccaagtag

SEQ ID NO: 8377 - RNA, 20 nt, synthetic construct
  source 1..20: mol_type = other RNA
agtgtttctcctgcctcagc

SEQ ID NO: 8378 - RNA, 20 nt, synthetic construct
  source 1..20: mol_type = other RNA
gaatcccaggctcaagtgtt

SEQ ID NO: 8379 - RNA, 20 nt, synthetic construct
  source 1..20: mol_type = other RNA
cagcaaactctgaatcccag

SEQ ID NO: 8380 - RNA, 20 nt, synthetic construct
  source 1..20: mol_type = other RNA
gctcacagcaaactctgaat

SEQ ID NO: 8381 - RNA, 20 nt, synthetic construct
  source 1..20: mol_type = other RNA
gtcacccaggctggagtgca

SEQ ID NO: 8382 - RNA, 20 nt, synthetic construct
  source 1..20: mol_type = other RNA
agcctgggtgacagagcaag

SEQ ID NO: 8383 - RNA, 20 nt, synthetic construct
  source 1..20: mol_type = other RNA
atctcaaaaaaaaaaaaaaa

SEQ ID NO: 8384 - RNA, 20 nt, synthetic construct
  source 1..20: mol_type = other RNA
aaaaaaaaaaaaaagaagaa

SEQ ID NO: 8385 - RNA, 20 nt, synthetic construct
  source 1..20: mol_type = other RNA
tcttcttttcttcttcttct

SEQ ID NO: 8386 - RNA, 20 nt, synthetic construct
  source 1..20: mol_type = other RNA
tcttcttcttcctcttcttc

SEQ ID NO: 8387 - RNA, 20 nt, synthetic construct
  source 1..20: mol_type = other RNA
tcttcttcttcttcttcttc

SEQ ID NO: 8388 - RNA, 20 nt, synthetic construct
  source 1..20: mol_type = other RNA
tcctcttcttcttcttcttc

SEQ ID NO: 8389 - RNA, 20 nt, synthetic construct
  source 1..20: mol_type = other RNA
tcctcttcctcttcttcttc

SEQ ID NO: 8390 - RNA, 20 nt, synthetic construct
  source 1..20: mol_type = other RNA
tcttcctcttcctcttcttc

SEQ ID NO: 8391 - RNA, 20 nt, synthetic construct
  source 1..20: mol_type = other RNA
tcctcttcctcttcctcttc

SEQ ID NO: 8392 - RNA, 20 nt, synthetic construct
  source 1..20: mol_type = other RNA
tcctcctcttcctcttcctc

SEQ ID NO: 8393 - RNA, 20 nt, synthetic construct
  source 1..20: mol_type = other RNA
tcctcctcctcttcctcttc

SEQ ID NO: 8394 - RNA, 20 nt, synthetic construct
  source 1..20: mol_type = other RNA
tcctcctcctcctcttcctc

SEQ ID NO: 8395 - RNA, 20 nt, synthetic construct
  source 1..20: mol_type = other RNA
tcctcctcctcctcctcttc

SEQ ID NO: 8396 - RNA, 20 nt, synthetic construct
  source 1..20: mol_type = other RNA
tttctattttcttcttcttc

SEQ ID NO: 8397 - RNA, 20 nt, synthetic construct
  source 1..20: mol_type = other RNA
tatataaatatatgcactca

SEQ ID NO: 8398 - RNA, 20 nt, synthetic construct
  source 1..20: mol_type = other RNA
gcctgacaacccatatccct

SEQ ID NO: 8399 - RNA, 20 nt, synthetic construct
  source 1..20: mol_type = other RNA
tctgcattcctgcttttact

SEQ ID NO: 8400 - RNA, 20 nt, synthetic construct
  source 1..20: mol_type = other RNA
catctgcattcctgctttta

SEQ ID NO: 8401 - RNA, 20 nt, synthetic construct
  source 1..20: mol_type = other RNA
cttatggcaagaggccagtt

SEQ ID NO: 8402 - RNA, 20 nt, synthetic construct
  source 1..20: mol_type = other RNA
tgccataagtgagtatgaat

SEQ ID NO: 8403 - RNA, 20 nt, synthetic construct
  source 1..20: mol_type = other RNA
ggttgtactgtctgctgttc

SEQ ID NO: 8404 - RNA, 20 nt, synthetic construct
  source 1..20: mol_type = other RNA
ttgcccttaagtctaggaag

SEQ ID NO: 8405 - RNA, 20 nt, synthetic construct
  source 1..20: mol_type = other RNA
ccagtttagcaagactgctg

SEQ ID NO: 8406 - RNA, 20 nt, synthetic construct
  source 1..20: mol_type = other RNA
ccccagtttagcaagactgc

SEQ ID NO: 8407 - RNA, 20 nt, synthetic construct
  source 1..20: mol_type = other RNA
ctccccagtttagcaagact

SEQ ID NO: 8408 - RNA, 20 nt, synthetic construct
  source 1..20: mol_type = other RNA
agtctctctccccagtttag

SEQ ID NO: 8409 - RNA, 20 nt, synthetic construct
  source 1..20: mol_type = other RNA
gttttattagtaaacaaaac

SEQ ID NO: 8410 - RNA, 20 nt, synthetic construct
  source 1..20: mol_type = other RNA
ttattacctaacctagaaaa

SEQ ID NO: 8411 - RNA, 20 nt, synthetic construct
  source 1..20: mol_type = other RNA
acaaatactttctcattatt

SEQ ID NO: 8412 - RNA, 20 nt, synthetic construct
  source 1..20: mol_type = other RNA
ttttctccacaaatactttc

SEQ ID NO: 8413 - RNA, 20 nt, synthetic construct
  source 1..20: mol_type = other RNA
aggaatacacacagaagtct

SEQ ID NO: 8414 - RNA, 20 nt, synthetic construct
  source 1..20: mol_type = other RNA
tcaagtctctggctgaacag

SEQ ID NO: 8415 - RNA, 20 nt, synthetic construct
  source 1..20: mol_type = other RNA
ggctgaacagaaagctgtgt

SEQ ID NO: 8416 - RNA, 20 nt, synthetic construct
  source 1..20: mol_type = other RNA
ttctgtgcatacacagcttt

SEQ ID NO: 8417 - RNA, 20 nt, synthetic construct
  source 1..20: mol_type = other RNA
ggaaactctttctgtgcata

SEQ ID NO: 8418 - RNA, 20 nt, synthetic construct
  source 1..20: mol_type = other RNA
ctggaaactctttctgtgca

SEQ ID NO: 8419 - RNA, 20 nt, synthetic construct
  source 1..20: mol_type = other RNA
tttctctctggaaactcttt

SEQ ID NO: 8420 - RNA, 20 nt, synthetic construct
  source 1..20: mol_type = other RNA
ctgttccccagcagttgttc

SEQ ID NO: 8421 - RNA, 20 nt, synthetic construct
  source 1..20: mol_type = other RNA
ggcatcttcattgagctcac

SEQ ID NO: 8422 - RNA, 20 nt, synthetic construct
  source 1..20: mol_type = other RNA
atgaagatgccagagctcac

SEQ ID NO: 8423 - RNA, 20 nt, synthetic construct
  source 1..20: mol_type = other RNA
cagtgctatgtgagctctgg

SEQ ID NO: 8424 - RNA, 20 nt, synthetic construct
  source 1..20: mol_type = other RNA
aatacctcccagtgctatgt

SEQ ID NO: 8425 - RNA, 20 nt, synthetic construct
  source 1..20: mol_type = other RNA
catagcactgggaggtattt

SEQ ID NO: 8426 - RNA, 20 nt, synthetic construct
  source 1..20: mol_type = other RNA
ggctggtcagagctcaaata

SEQ ID NO: 8427 - RNA, 20 nt, synthetic construct
  source 1..20: mol_type = other RNA
tcaggctggtcagagctcaa

SEQ ID NO: 8428 - RNA, 20 nt, synthetic construct
  source 1..20: mol_type = other RNA
cctcaggctggtcagagctc

SEQ ID NO: 8429 - RNA, 20 nt, synthetic construct
  source 1..20: mol_type = other RNA
gaccagcctgaggagagaca

SEQ ID NO: 8430 - RNA, 20 nt, synthetic construct
  source 1..20: mol_type = other RNA
tgaagtatggttttttgggg

SEQ ID NO: 8431 - RNA, 20 nt, synthetic construct
  source 1..20: mol_type = other RNA
agaaacaccctagaaaagct

SEQ ID NO: 8432 - RNA, 20 nt, synthetic construct
  source 1..20: mol_type = other RNA
aagtaaattaattgcctgtc

SEQ ID NO: 8433 - RNA, 20 nt, synthetic construct
  source 1..20: mol_type = other RNA
gaagaggttgttttcttctg

SEQ ID NO: 8434 - RNA, 20 nt, synthetic construct
  source 1..20: mol_type = other RNA
tcagaggtaaacaacaaaat

SEQ ID NO: 8435 - RNA, 20 nt, synthetic construct
  source 1..20: mol_type = other RNA
attatatagtatgcacaatg

SEQ ID NO: 8436 - RNA, 20 nt, synthetic construct
  source 1..20: mol_type = other RNA
tggttatgggtcacactaaa

SEQ ID NO: 8437 - RNA, 20 nt, synthetic construct
  source 1..20: mol_type = other RNA
ttgccaattctgttattttt

SEQ ID NO: 8438 - RNA, 20 nt, synthetic construct
  source 1..20: mol_type = other RNA
atttggtccttttacaattt

SEQ ID NO: 8439 - RNA, 20 nt, synthetic construct
  source 1..20: mol_type = other RNA
ccatttggtccttttacaat

SEQ ID NO: 8440 - RNA, 20 nt, synthetic construct
  source 1..20: mol_type = other RNA
ttaaagagatgtcttttttt

SEQ ID NO: 8441 - RNA, 20 nt, synthetic construct
  source 1..20: mol_type = other RNA
ttaatgagaaaatcactaca

SEQ ID NO: 8442 - RNA, 20 nt, synthetic construct
  source 1..20: mol_type = other RNA
ggctttgtataagcgtgcta

SEQ ID NO: 8443 - RNA, 20 nt, synthetic construct
  source 1..20: mol_type = other RNA
gtttatcttctcaggctttg

SEQ ID NO: 8444 - RNA, 20 nt, synthetic construct
  source 1..20: mol_type = other RNA
aggacatctatgaaaatatc

SEQ ID NO: 8445 - RNA, 20 nt, synthetic construct
  source 1..20: mol_type = other RNA
gtgacttgctttaaacaaat

SEQ ID NO: 8446 - RNA, 20 nt, synthetic construct
  source 1..20: mol_type = other RNA
ttcccttcctctgtgacttg

SEQ ID NO: 8447 - RNA, 20 nt, synthetic construct
  source 1..20: mol_type = other RNA
catagtcaagaagctcaatg

SEQ ID NO: 8448 - RNA, 20 nt, synthetic construct
  source 1..20: mol_type = other RNA
atggatcagatataggattt

SEQ ID NO: 8449 - RNA, 20 nt, synthetic construct
  source 1..20: mol_type = other RNA
atgtaaaggtatgttttttc

SEQ ID NO: 8450 - RNA, 20 nt, synthetic construct
  source 1..20: mol_type = other RNA
tcagaaacaacacaaatcag

SEQ ID NO: 8451 - RNA, 20 nt, synthetic construct
  source 1..20: mol_type = other RNA
aaaggtgttattctattgtt

SEQ ID NO: 8452 - RNA, 20 nt, synthetic construct
  source 1..20: mol_type = other RNA
aaacgtgttattttgttgtt

SEQ ID NO: 8453 - RNA, 20 nt, synthetic construct
  source 1..20: mol_type = other RNA
ttaccactctaaacgtgtta

SEQ ID NO: 8454 - RNA, 20 nt, synthetic construct
  source 1..20: mol_type = other RNA
aaaggtgttattccattgtt

SEQ ID NO: 8455 - RNA, 20 nt, synthetic construct
  source 1..20: mol_type = other RNA
gaaggcgttattctgttgtt

SEQ ID NO: 8456 - RNA, 20 nt, synthetic construct
  source 1..20: mol_type = other RNA
aaaggtgttatttcattgtt

SEQ ID NO: 8457 - RNA, 20 nt, synthetic construct
  source 1..20: mol_type = other RNA
aaaggtgttattccattgtt

SEQ ID NO: 8458 - RNA, 20 nt, synthetic construct
  source 1..20: mol_type = other RNA
taaaaacaaagaacaaataa

SEQ ID NO: 8459 - RNA, 20 nt, synthetic construct
  source 1..20: mol_type = other RNA
ccaatgttatgtagtataca

SEQ ID NO: 8460 - RNA, 20 nt, synthetic construct
  source 1..20: mol_type = other RNA
taaagacacagtaatcaaga

SEQ ID NO: 8461 - RNA, 20 nt, synthetic construct
  source 1..20: mol_type = other RNA
caaagtgttaggattacagc

SEQ ID NO: 8462 - RNA, 20 nt, synthetic construct
  source 1..20: mol_type = other RNA
tcttggcctcccaaagtgtt

SEQ ID NO: 8463 - RNA, 20 nt, synthetic construct
  source 1..20: mol_type = other RNA
catcttggcctcccaaagtg

SEQ ID NO: 8464 - RNA, 20 nt, synthetic construct
  source 1..20: mol_type = other RNA
ggcaatcctctcatcttggc

SEQ ID NO: 8465 - RNA, 20 nt, synthetic construct
  source 1..20: mol_type = other RNA
tctcaggcaatcctctcatc

SEQ ID NO: 8466 - RNA, 20 nt, synthetic construct
  source 1..20: mol_type = other RNA
tcatctcaggcaatcctctc

SEQ ID NO: 8467 - RNA, 20 nt, synthetic construct
  source 1..20: mol_type = other RNA
tctctacaaatatttaaaaa

SEQ ID NO: 8468 - RNA, 20 nt, synthetic construct
  source 1..20: mol_type = other RNA
acaaatatttaaaaaaatta

SEQ ID NO: 8469 - RNA, 20 nt, synthetic construct
  source 1..20: mol_type = other RNA
gcttcctgaatagctgggac

SEQ ID NO: 8470 - RNA, 20 nt, synthetic construct
  source 1..20: mol_type = other RNA
cacctcagcttcctgaatag

SEQ ID NO: 8471 - RNA, 20 nt, synthetic construct
  source 1..20: mol_type = other RNA
agtgatcctcccacctcagc

SEQ ID NO: 8472 - RNA, 20 nt, synthetic construct
  source 1..20: mol_type = other RNA
tgggctccagtgatcctccc

SEQ ID NO: 8473 - RNA, 20 nt, synthetic construct
  source 1..20: mol_type = other RNA
acctcatgggctccagtgat

SEQ ID NO: 8474 - RNA, 20 nt, synthetic construct
  source 1..20: mol_type = other RNA
tttcagcctccacctcatgg

SEQ ID NO: 8475 - RNA, 20 nt, synthetic construct
  source 1..20: mol_type = other RNA
caggctaaagttcagtagca

SEQ ID NO: 8476 - RNA, 20 nt, synthetic construct
  source 1..20: mol_type = other RNA
ctctctcaaacaaacaaaca

SEQ ID NO: 8477 - RNA, 20 nt, synthetic construct
  source 1..20: mol_type = other RNA
ctctcaaacaaacaaacaaa

SEQ ID NO: 8478 - RNA, 20 nt, synthetic construct
  source 1..20: mol_type = other RNA
ctcaaacaaacaaacaaaaa

SEQ ID NO: 8479 - RNA, 20 nt, synthetic construct
  source 1..20: mol_type = other RNA
caaacaaacaaacaaaaaat

SEQ ID NO: 8480 - RNA, 20 nt, synthetic construct
  source 1..20: mol_type = other RNA
aacaaacaaacaaaaaatac

SEQ ID NO: 8481 - RNA, 20 nt, synthetic construct
  source 1..20: mol_type = other RNA
ttaaattgctttgctacctg

SEQ ID NO: 8482 - RNA, 20 nt, synthetic construct
  source 1..20: mol_type = other RNA
aattaatttaatttgagtca

SEQ ID NO: 8483 - RNA, 20 nt, synthetic construct
  source 1..20: mol_type = other RNA
aattaaattaatttgagata

SEQ ID NO: 8484 - RNA, 20 nt, synthetic construct
  source 1..20: mol_type = other RNA
tagacctcaatgtaacagct

SEQ ID NO: 8485 - RNA, 20 nt, synthetic construct
  source 1..20: mol_type = other RNA
gaattagctgttacattgag

SEQ ID NO: 8486 - RNA, 20 nt, synthetic construct
  source 1..20: mol_type = other RNA
atgtaacagctaattctgag

SEQ ID NO: 8487 - RNA, 20 nt, synthetic construct
  source 1..20: mol_type = other RNA
aaggttataagatactatac

SEQ ID NO: 8488 - RNA, 20 nt, synthetic construct
  source 1..20: mol_type = other RNA
aaaaatttttccttctccaa

SEQ ID NO: 8489 - RNA, 20 nt, synthetic construct
  source 1..20: mol_type = other RNA
ccaaatatgactgttaagaa

SEQ ID NO: 8490 - RNA, 20 nt, synthetic construct
  source 1..20: mol_type = other RNA
catccatatatctgacaaat

SEQ ID NO: 8491 - RNA, 20 nt, synthetic construct
  source 1..20: mol_type = other RNA
tccatatatctgacaaatgg

SEQ ID NO: 8492 - RNA, 20 nt, synthetic construct
  source 1..20: mol_type = other RNA
ggatacaggccatttgtcag

SEQ ID NO: 8493 - RNA, 20 nt, synthetic construct
  source 1..20: mol_type = other RNA
gattagtgagtgggagaaat

SEQ ID NO: 8494 - RNA, 20 nt, synthetic construct
  source 1..20: mol_type = other RNA
cactcactaatcagaggaca

SEQ ID NO: 8495 - RNA, 20 nt, synthetic construct
  source 1..20: mol_type = other RNA
ctaatcagaggacaaacaac

SEQ ID NO: 8496 - RNA, 20 nt, synthetic construct
  source 1..20: mol_type = other RNA
taagaaatgactattcaagc

SEQ ID NO: 8497 - RNA, 20 nt, synthetic construct
  source 1..20: mol_type = other RNA
gtgtgcatcttctcctaaga

SEQ ID NO: 8498 - RNA, 20 nt, synthetic construct
  source 1..20: mol_type = other RNA
tgatttttgatggctaagat

SEQ ID NO: 8499 - RNA, 20 nt, synthetic construct
  source 1..20: mol_type = other RNA
taagatgacactgaacatcc

SEQ ID NO: 8500 - RNA, 20 nt, synthetic construct
  source 1..20: mol_type = other RNA
aaatcggtgacaccacttat

SEQ ID NO: 8501 - RNA, 20 nt, synthetic construct
  source 1..20: mol_type = other RNA
ctcatatgctggtggaagtt

SEQ ID NO: 8502 - RNA, 20 nt, synthetic construct
  source 1..20: mol_type = other RNA
catatgctggtggaagttca

SEQ ID NO: 8503 - RNA, 20 nt, synthetic construct
  source 1..20: mol_type = other RNA
tatgctggtggaagttcaaa

SEQ ID NO: 8504 - RNA, 20 nt, synthetic construct
  source 1..20: mol_type = other RNA
aaataaaaactatttcaatg

SEQ ID NO: 8505 - RNA, 20 nt, synthetic construct
  source 1..20: mol_type = other RNA
gaagcatgaacaaacctcaa

SEQ ID NO: 8506 - RNA, 20 nt, synthetic construct
  source 1..20: mol_type = other RNA
aaaatatattaaggaaagaa

SEQ ID NO: 8507 - RNA, 20 nt, synthetic construct
  source 1..20: mol_type = other RNA
tacagactatacactttgac

SEQ ID NO: 8508 - RNA, 20 nt, synthetic construct
  source 1..20: mol_type = other RNA
catgaatggactcatacaga

SEQ ID NO: 8509 - RNA, 20 nt, synthetic construct
  source 1..20: mol_type = other RNA
tcccacggccagtgtcaaat

SEQ ID NO: 8510 - RNA, 20 nt, synthetic construct
  source 1..20: mol_type = other RNA
gctaccctcttcccacggcc

SEQ ID NO: 8511 - RNA, 20 nt, synthetic construct
  source 1..20: mol_type = other RNA
atcaatctctgctaccctct

SEQ ID NO: 8512 - RNA, 20 nt, synthetic construct
  source 1..20: mol_type = other RNA
cttgtgtggctgctcaatca

SEQ ID NO: 8513 - RNA, 20 nt, synthetic construct
  source 1..20: mol_type = other RNA
caatgcagaacattttcacc

SEQ ID NO: 8514 - RNA, 20 nt, synthetic construct
  source 1..20: mol_type = other RNA
tccagctacatttaagatct

SEQ ID NO: 8515 - RNA, 20 nt, synthetic construct
  source 1..20: mol_type = other RNA
ctctatgtgaaaatatactc

SEQ ID NO: 8516 - RNA, 20 nt, synthetic construct
  source 1..20: mol_type = other RNA
atgtgaaaatatactcaact

SEQ ID NO: 8517 - RNA, 20 nt, synthetic construct
  source 1..20: mol_type = other RNA
gtttttcagttgagtatatt

SEQ ID NO: 8518 - RNA, 20 nt, synthetic construct
  source 1..20: mol_type = other RNA
actgaaaaacagagcaggta

SEQ ID NO: 8519 - RNA, 20 nt, synthetic construct
  source 1..20: mol_type = other RNA
agcccagatcccccatttga

SEQ ID NO: 8520 - RNA, 20 nt, synthetic construct
  source 1..20: mol_type = other RNA
aatgggggatctgggcttga

SEQ ID NO: 8521 - RNA, 20 nt, synthetic construct
  source 1..20: mol_type = other RNA
acacatgtgacctagtctca

SEQ ID NO: 8522 - RNA, 20 nt, synthetic construct
  source 1..20: mol_type = other RNA
gtagagactctacacatgtg

SEQ ID NO: 8523 - RNA, 20 nt, synthetic construct
  source 1..20: mol_type = other RNA
acagagaccgtgttggattc

SEQ ID NO: 8524 - RNA, 20 nt, synthetic construct
  source 1..20: mol_type = other RNA
ataatacgttccaagttttc

SEQ ID NO: 8525 - RNA, 20 nt, synthetic construct
  source 1..20: mol_type = other RNA
gacagccacaggtcatgaat

SEQ ID NO: 8526 - RNA, 20 nt, synthetic construct
  source 1..20: mol_type = other RNA
cattcatgacctgtggctgt

SEQ ID NO: 8527 - RNA, 20 nt, synthetic construct
  source 1..20: mol_type = other RNA
gaatcctcacattcatgacc

SEQ ID NO: 8528 - RNA, 20 nt, synthetic construct
  source 1..20: mol_type = other RNA
cagaatcctcacattcatga

SEQ ID NO: 8529 - RNA, 20 nt, synthetic construct
  source 1..20: mol_type = other RNA
aacctctcagaatcctcaca

SEQ ID NO: 8530 - RNA, 20 nt, synthetic construct
  source 1..20: mol_type = other RNA
caagaacgttgctccaacct

SEQ ID NO: 8531 - RNA, 20 nt, synthetic construct
  source 1..20: mol_type = other RNA
aagattcctccagcctgggg

SEQ ID NO: 8532 - RNA, 20 nt, synthetic construct
  source 1..20: mol_type = other RNA
agcctggggtcttcacctgc

SEQ ID NO: 8533 - RNA, 20 nt, synthetic construct
  source 1..20: mol_type = other RNA
tactgcattgttttctgact

SEQ ID NO: 8534 - RNA, 20 nt, synthetic construct
  source 1..20: mol_type = other RNA
tccatagccacttgacccct

SEQ ID NO: 8535 - RNA, 20 nt, synthetic construct
  source 1..20: mol_type = other RNA
ctttatgccttgggtcccgc

SEQ ID NO: 8536 - RNA, 20 nt, synthetic construct
  source 1..20: mol_type = other RNA
gggactgaaggaatgggtga

SEQ ID NO: 8537 - RNA, 20 nt, synthetic construct
  source 1..20: mol_type = other RNA
tcacccattccttcagtccc

SEQ ID NO: 8538 - RNA, 20 nt, synthetic construct
  source 1..20: mol_type = other RNA
gctggctgcagccactctgg

SEQ ID NO: 8539 - RNA, 20 nt, synthetic construct
  source 1..20: mol_type = other RNA
gtccatcctctgctggctgc

SEQ ID NO: 8540 - RNA, 20 nt, synthetic construct
  source 1..20: mol_type = other RNA
cagtccatcctctgctggct

SEQ ID NO: 8541 - RNA, 20 nt, synthetic construct
  source 1..20: mol_type = other RNA
tgctctcagtccatcctctg

SEQ ID NO: 8542 - RNA, 20 nt, synthetic construct
  source 1..20: mol_type = other RNA
cctgctctcagtccatcctc

SEQ ID NO: 8543 - RNA, 20 nt, synthetic construct
  source 1..20: mol_type = other RNA
tctcctgctctcagtccatc

SEQ ID NO: 8544 - RNA, 20 nt, synthetic construct
  source 1..20: mol_type = other RNA
aggatgggttcatgggcacg

SEQ ID NO: 8545 - RNA, 20 nt, synthetic construct
  source 1..20: mol_type = other RNA
caggcaggatgctgcttctc

SEQ ID NO: 8546 - RNA, 20 nt, synthetic construct
  source 1..20: mol_type = other RNA
accagatacagtatttatag

SEQ ID NO: 8547 - RNA, 20 nt, synthetic construct
  source 1..20: mol_type = other RNA
acatttgcaatataaaataa

SEQ ID NO: 8548 - RNA, 20 nt, synthetic construct
  source 1..20: mol_type = other RNA
tagtgtagcataaatgctct

SEQ ID NO: 8549 - RNA, 20 nt, synthetic construct
  source 1..20: mol_type = other RNA
atttactcatagtgtagcat

SEQ ID NO: 8550 - RNA, 20 nt, synthetic construct
  source 1..20: mol_type = other RNA
aatacatttccccaaggaag

SEQ ID NO: 8551 - RNA, 20 nt, synthetic construct
  source 1..20: mol_type = other RNA
ataagactatatagtaatat

SEQ ID NO: 8552 - RNA, 20 nt, synthetic construct
  source 1..20: mol_type = other RNA
ctataagactatatagtaat

SEQ ID NO: 8553 - RNA, 20 nt, synthetic construct
  source 1..20: mol_type = other RNA
ctctataagactatatagta

SEQ ID NO: 8554 - RNA, 20 nt, synthetic construct
  source 1..20: mol_type = other RNA
ctctctataagactatatag

SEQ ID NO: 8555 - RNA, 20 nt, synthetic construct
  source 1..20: mol_type = other RNA
ttgtctctctctctataaga

SEQ ID NO: 8556 - RNA, 20 nt, synthetic construct
  source 1..20: mol_type = other RNA
gtctgtctagctctttgtct

SEQ ID NO: 8557 - RNA, 20 nt, synthetic construct
  source 1..20: mol_type = other RNA
agaataaatgacacagattt

SEQ ID NO: 8558 - RNA, 20 nt, synthetic construct
  source 1..20: mol_type = other RNA
atgaaaactgagataataca

SEQ ID NO: 8559 - RNA, 20 nt, synthetic construct
  source 1..20: mol_type = other RNA
ctatgaaaactgagataata

SEQ ID NO: 8560 - RNA, 20 nt, synthetic construct
  source 1..20: mol_type = other RNA
gttttcatagagagcatata

SEQ ID NO: 8561 - RNA, 20 nt, synthetic construct
  source 1..20: mol_type = other RNA
acattttgctgtaacaaagt

SEQ ID NO: 8562 - RNA, 20 nt, synthetic construct
  source 1..20: mol_type = other RNA
catctctggtgacctgtgtt

SEQ ID NO: 8563 - RNA, 20 nt, synthetic construct
  source 1..20: mol_type = other RNA
ggtgacctgtgttgttttga

SEQ ID NO: 8564 - RNA, 20 nt, synthetic construct
  source 1..20: mol_type = other RNA
gcatctggattcctgcagta

SEQ ID NO: 8565 - RNA, 20 nt, synthetic construct
  source 1..20: mol_type = other RNA
cacctgacactgggatccat

SEQ ID NO: 8566 - RNA, 20 nt, synthetic construct
  source 1..20: mol_type = other RNA
gtgcttggaaccggggccac

SEQ ID NO: 8567 - RNA, 20 nt, synthetic construct
  source 1..20: mol_type = other RNA
ttctgaacaaggtaagaaat

SEQ ID NO: 8568 - RNA, 20 nt, synthetic construct
  source 1..20: mol_type = other RNA
agtgtaccactgaaggcttc

SEQ ID NO: 8569 - RNA, 20 nt, synthetic construct
  source 1..20: mol_type = other RNA
accaaccctccagtgtacca

SEQ ID NO: 8570 - RNA, 20 nt, synthetic construct
  source 1..20: mol_type = other RNA
acattgcagaccctcaacca

SEQ ID NO: 8571 - RNA, 20 nt, synthetic construct
  source 1..20: mol_type = other RNA
gcgccctctctgggggatcc

SEQ ID NO: 8572 - RNA, 20 nt, synthetic construct
  source 1..20: mol_type = other RNA
ctgggggatccagaactgtg

SEQ ID NO: 8573 - RNA, 20 nt, synthetic construct
  source 1..20: mol_type = other RNA
gggggatccagaactgtgat

SEQ ID NO: 8574 - RNA, 20 nt, synthetic construct
  source 1..20: mol_type = other RNA
cagcgtgccaaaaatcacag

SEQ ID NO: 8575 - RNA, 20 nt, synthetic construct
  source 1..20: mol_type = other RNA
tcacagcgtgccaaaaatca

SEQ ID NO: 8576 - RNA, 20 nt, synthetic construct
  source 1..20: mol_type = other RNA
cctggttattaaatgggtca

SEQ ID NO: 8577 - RNA, 20 nt, synthetic construct
  source 1..20: mol_type = other RNA
aaggccatgttcttaagaaa

SEQ ID NO: 8578 - RNA, 20 nt, synthetic construct
  source 1..20: mol_type = other RNA
aggatatcatactcaaaggc

SEQ ID NO: 8579 - RNA, 20 nt, synthetic construct
  source 1..20: mol_type = other RNA
ttaggtttctctaggatatc

SEQ ID NO: 8580 - RNA, 20 nt, synthetic construct
  source 1..20: mol_type = other RNA
tgctatgcagccccaggaca

SEQ ID NO: 8581 - RNA, 20 nt, synthetic construct
  source 1..20: mol_type = other RNA
ccctggcctatctcagtctt

SEQ ID NO: 8582 - RNA, 20 nt, synthetic construct
  source 1..20: mol_type = other RNA
ctggcctatctcagtctttc

SEQ ID NO: 8583 - RNA, 20 nt, synthetic construct
  source 1..20: mol_type = other RNA
gtctttcacaggctctgttc

SEQ ID NO: 8584 - RNA, 20 nt, synthetic construct
  source 1..20: mol_type = other RNA
gttcacctcagctttgaagt

SEQ ID NO: 8585 - RNA, 20 nt, synthetic construct
  source 1..20: mol_type = other RNA
gctttgaagttagaaatttc

SEQ ID NO: 8586 - RNA, 20 nt, synthetic construct
  source 1..20: mol_type = other RNA
tcttctcatgaaacctgcat

SEQ ID NO: 8587 - RNA, 20 nt, synthetic construct
  source 1..20: mol_type = other RNA
ctgccaatgcaggtttcatg

SEQ ID NO: 8588 - RNA, 20 nt, synthetic construct
  source 1..20: mol_type = other RNA
tgaaacctgcattggcagtg

SEQ ID NO: 8589 - RNA, 20 nt, synthetic construct
  source 1..20: mol_type = other RNA
tcttctgtagactcactgcc

SEQ ID NO: 8590 - RNA, 20 nt, synthetic construct
  source 1..20: mol_type = other RNA
tcctcttcttctgtagactc

SEQ ID NO: 8591 - RNA, 20 nt, synthetic construct
  source 1..20: mol_type = other RNA
gggcactagaagattcccta

SEQ ID NO: 8592 - RNA, 20 nt, synthetic construct
  source 1..20: mol_type = other RNA
cctccaagggaataagttgt

SEQ ID NO: 8593 - RNA, 20 nt, synthetic construct
  source 1..20: mol_type = other RNA
tccaagggaataagttgttt

SEQ ID NO: 8594 - RNA, 20 nt, synthetic construct
  source 1..20: mol_type = other RNA
aagggaataagttgtttgtc

SEQ ID NO: 8595 - RNA, 20 nt, synthetic construct
  source 1..20: mol_type = other RNA
aggagggttagagacaaaca

SEQ ID NO: 8596 - RNA, 20 nt, synthetic construct
  source 1..20: mol_type = other RNA
ttgtttctcaaggagggtta

SEQ ID NO: 8597 - RNA, 20 nt, synthetic construct
  source 1..20: mol_type = other RNA
aaccctccttgagaaacaat

SEQ ID NO: 8598 - RNA, 20 nt, synthetic construct
  source 1..20: mol_type = other RNA
ttgagaaacaatgagtcttt

SEQ ID NO: 8599 - RNA, 20 nt, synthetic construct
  source 1..20: mol_type = other RNA
taaatgtaggatgatttcct

SEQ ID NO: 8600 - RNA, 20 nt, synthetic construct
  source 1..20: mol_type = other RNA
taccaaggcaaaaggcttaa

SEQ ID NO: 8601 - RNA, 20 nt, synthetic construct
  source 1..20: mol_type = other RNA
tacagcctgcaccaaggaat

SEQ ID NO: 8602 - RNA, 20 nt, synthetic construct
  source 1..20: mol_type = other RNA
gctggttttcatgagaacca

SEQ ID NO: 8603 - RNA, 20 nt, synthetic construct
  source 1..20: mol_type = other RNA
tgaaaaccagcagagattca

SEQ ID NO: 8604 - RNA, 20 nt, synthetic construct
  source 1..20: mol_type = other RNA
atcatatgaatctctgctgg

SEQ ID NO: 8605 - RNA, 20 nt, synthetic construct
  source 1..20: mol_type = other RNA
tctgttctttatctttagat

SEQ ID NO: 8606 - RNA, 20 nt, synthetic construct
  source 1..20: mol_type = other RNA
gttctttatctttagattta

SEQ ID NO: 8607 - RNA, 20 nt, synthetic construct
  source 1..20: mol_type = other RNA
gaaaattattactattcttt

SEQ ID NO: 8608 - RNA, 20 nt, synthetic construct
  source 1..20: mol_type = other RNA
catgtttctctgctcatgca

SEQ ID NO: 8609 - RNA, 20 nt, synthetic construct
  source 1..20: mol_type = other RNA
gtaattgcatgagcagagaa

SEQ ID NO: 8610 - RNA, 20 nt, synthetic construct
  source 1..20: mol_type = other RNA
gctcatgcaattactgagta

SEQ ID NO: 8611 - RNA, 20 nt, synthetic construct
  source 1..20: mol_type = other RNA
tgcaattactgagtatgatt

SEQ ID NO: 8612 - RNA, 20 nt, synthetic construct
  source 1..20: mol_type = other RNA
ggtggtgctgaaattaaaat

SEQ ID NO: 8613 - RNA, 20 nt, synthetic construct
  source 1..20: mol_type = other RNA
gtccatcaccatggtagcaa

SEQ ID NO: 8614 - RNA, 20 nt, synthetic construct
  source 1..20: mol_type = other RNA
ataactccgtccatcaccat

SEQ ID NO: 8615 - RNA, 20 nt, synthetic construct
  source 1..20: mol_type = other RNA
accactgtcacaggaaggac

SEQ ID NO: 8616 - RNA, 20 nt, synthetic construct
  source 1..20: mol_type = other RNA
gatgccagtgtggtatcata

SEQ ID NO: 8617 - RNA, 20 nt, synthetic construct
  source 1..20: mol_type = other RNA
tatggttttaatcaaataca

SEQ ID NO: 8618 - RNA, 20 nt, synthetic construct
  source 1..20: mol_type = other RNA
tcttatggttttaatcaaat

SEQ ID NO: 8619 - RNA, 20 nt, synthetic construct
  source 1..20: mol_type = other RNA
aatattggttagaagaccca

SEQ ID NO: 8620 - RNA, 20 nt, synthetic construct
  source 1..20: mol_type = other RNA
cttcctagggacaaatttct

SEQ ID NO: 8621 - RNA, 20 nt, synthetic construct
  source 1..20: mol_type = other RNA
tagactcacattttggcaaa

SEQ ID NO: 8622 - RNA, 20 nt, synthetic construct
  source 1..20: mol_type = other RNA
cattttggcaaaatgtctca

SEQ ID NO: 8623 - RNA, 20 nt, synthetic construct
  source 1..20: mol_type = other RNA
aaagcaaaggtcctgagaca

SEQ ID NO: 8624 - RNA, 20 nt, synthetic construct
  source 1..20: mol_type = other RNA
ttgctcaaaagcaaaggtcc

SEQ ID NO: 8625 - RNA, 20 nt, synthetic construct
  source 1..20: mol_type = other RNA
ggacctttgcttttgagcaa

SEQ ID NO: 8626 - RNA, 20 nt, synthetic construct
  source 1..20: mol_type = other RNA
tagactctttgctcaaaagc

SEQ ID NO: 8627 - RNA, 20 nt, synthetic construct
  source 1..20: mol_type = other RNA
tctcttagactctttgctca

SEQ ID NO: 8628 - RNA, 20 nt, synthetic construct
  source 1..20: mol_type = other RNA
ttccataaaactattaggaa

SEQ ID NO: 8629 - RNA, 20 nt, synthetic construct
  source 1..20: mol_type = other RNA
gaagataaatgaccaaagct

SEQ ID NO: 8630 - RNA, 20 nt, synthetic construct
  source 1..20: mol_type = other RNA
tgcaattctgtcattctaaa

SEQ ID NO: 8631 - RNA, 20 nt, synthetic construct
  source 1..20: mol_type = other RNA
gacatacatagtgaaacaat

SEQ ID NO: 8632 - RNA, 20 nt, synthetic construct
  source 1..20: mol_type = other RNA
tcaagtcctggcaacacatg

SEQ ID NO: 8633 - RNA, 20 nt, synthetic construct
  source 1..20: mol_type = other RNA
tccgccttcctgcttttgct

SEQ ID NO: 8634 - RNA, 20 nt, synthetic construct
  source 1..20: mol_type = other RNA
catccgccttcctgcttttg

SEQ ID NO: 8635 - RNA, 20 nt, synthetic construct
  source 1..20: mol_type = other RNA
tgactctcatccgccttcct

SEQ ID NO: 8636 - RNA, 20 nt, synthetic construct
  source 1..20: mol_type = other RNA
atacactactatctgttgtg

SEQ ID NO: 8637 - RNA, 20 nt, synthetic construct
  source 1..20: mol_type = other RNA
ttttccttcaatccatgatg

SEQ ID NO: 8638 - RNA, 20 nt, synthetic construct
  source 1..20: mol_type = other RNA
atctctttttccttcaatcc

SEQ ID NO: 8639 - RNA, 20 nt, synthetic construct
  source 1..20: mol_type = other RNA
gttcatcaagactgctgtgg

SEQ ID NO: 8640 - RNA, 20 nt, synthetic construct
  source 1..20: mol_type = other RNA
cagttcatcaagactgctgt

SEQ ID NO: 8641 - RNA, 20 nt, synthetic construct
  source 1..20: mol_type = other RNA
ggtgtctctcagttcatcaa

SEQ ID NO: 8642 - RNA, 20 nt, synthetic construct
  source 1..20: mol_type = other RNA
ttattaccaagtgtagaaaa

SEQ ID NO: 8643 - RNA, 20 nt, synthetic construct
  source 1..20: mol_type = other RNA
acaaattctttctcattatt

SEQ ID NO: 8644 - RNA, 20 nt, synthetic construct
  source 1..20: mol_type = other RNA
ttatctccacaaattctttc

SEQ ID NO: 8645 - RNA, 20 nt, synthetic construct
  source 1..20: mol_type = other RNA
gtgtaatataaatctgcata

SEQ ID NO: 8646 - RNA, 20 nt, synthetic construct
  source 1..20: mol_type = other RNA
ctgtgcatatgcagatttat

SEQ ID NO: 8647 - RNA, 20 nt, synthetic construct
  source 1..20: mol_type = other RNA
ttgttcccttgtagttattc

SEQ ID NO: 8648 - RNA, 20 nt, synthetic construct
  source 1..20: mol_type = other RNA
attgaactcattgttccctt

SEQ ID NO: 8649 - RNA, 20 nt, synthetic construct
  source 1..20: mol_type = other RNA
gccatctccattgaactcat

SEQ ID NO: 8650 - RNA, 20 nt, synthetic construct
  source 1..20: mol_type = other RNA
aatatcccccagtgctttgt

SEQ ID NO: 8651 - RNA, 20 nt, synthetic construct
  source 1..20: mol_type = other RNA
caaagcactgggggatattt

SEQ ID NO: 8652 - RNA, 20 nt, synthetic construct
  source 1..20: mol_type = other RNA
tttctagctggtaagaactc

SEQ ID NO: 8653 - RNA, 20 nt, synthetic construct
  source 1..20: mol_type = other RNA
ttgcaaatcttgggcattca

SEQ ID NO: 8654 - RNA, 20 nt, synthetic construct
  source 1..20: mol_type = other RNA
actgaatgcccaagatttgc

SEQ ID NO: 8655 - RNA, 20 nt, synthetic construct
  source 1..20: mol_type = other RNA
gtttccaaagagtggctttt

SEQ ID NO: 8656 - RNA, 20 nt, synthetic construct
  source 1..20: mol_type = other RNA
ttggaaacagagttgatgta

SEQ ID NO: 8657 - RNA, 20 nt, synthetic construct
  source 1..20: mol_type = other RNA
taaaatacatcaactctgtt

SEQ ID NO: 8658 - RNA, 20 nt, synthetic construct
  source 1..20: mol_type = other RNA
acaaaaatcctagcaaaatt

SEQ ID NO: 8659 - RNA, 20 nt, synthetic construct
  source 1..20: mol_type = other RNA
caacataaattagttgccca

SEQ ID NO: 8660 - RNA, 20 nt, synthetic construct
  source 1..20: mol_type = other RNA
acataaattagttgcccatc

SEQ ID NO: 8661 - RNA, 20 nt, synthetic construct
  source 1..20: mol_type = other RNA
tcataggtaaacaataaaat

SEQ ID NO: 8662 - RNA, 20 nt, synthetic construct
  source 1..20: mol_type = other RNA
gttatctggcatccacaata

SEQ ID NO: 8663 - RNA, 20 nt, synthetic construct
  source 1..20: mol_type = other RNA
tggttatggatcacactaaa

SEQ ID NO: 8664 - RNA, 20 nt, synthetic construct
  source 1..20: mol_type = other RNA
tgtgatatctgatcacaaga

SEQ ID NO: 8665 - RNA, 20 nt, synthetic construct
  source 1..20: mol_type = other RNA
ttcttctcttgtgatatctg

SEQ ID NO: 8666 - RNA, 20 nt, synthetic construct
  source 1..20: mol_type = other RNA
cagattcaagaaaactaatc

SEQ ID NO: 8667 - RNA, 20 nt, synthetic construct
  source 1..20: mol_type = other RNA
ggcttataaaattttcctag

SEQ ID NO: 8668 - RNA, 20 nt, synthetic construct
  source 1..20: mol_type = other RNA
tcagaaacaatgaaagtcag

SEQ ID NO: 8669 - RNA, 20 nt, synthetic construct
  source 1..20: mol_type = other RNA
tgggtttttcttctattact

SEQ ID NO: 8670 - RNA, 20 nt, synthetic construct
  source 1..20: mol_type = other RNA
cctcttgggtttttcttcta

SEQ ID NO: 8671 - RNA, 20 nt, synthetic construct
  source 1..20: mol_type = other RNA
tgtctgccacgatccctcac

SEQ ID NO: 8672 - RNA, 20 nt, synthetic construct
  source 1..20: mol_type = other RNA
gtccagagctgcaatctagt

SEQ ID NO: 8673 - RNA, 20 nt, synthetic construct
  source 1..20: mol_type = other RNA
gcatgctgctctgtccagag

SEQ ID NO: 8674 - RNA, 20 nt, synthetic construct
  source 1..20: mol_type = other RNA
ggacagagcagcatgcagag

SEQ ID NO: 8675 - RNA, 20 nt, synthetic construct
  source 1..20: mol_type = other RNA
tattgtgaattttagcccca

SEQ ID NO: 8676 - RNA, 20 nt, synthetic construct
  source 1..20: mol_type = other RNA
ggattgctggtctgttcttg

SEQ ID NO: 8677 - RNA, 20 nt, synthetic construct
  source 1..20: mol_type = other RNA
caggattgctggtctgttct

SEQ ID NO: 8678 - RNA, 20 nt, synthetic construct
  source 1..20: mol_type = other RNA
cttatcctgcaggagcagtc

SEQ ID NO: 8679 - RNA, 20 nt, synthetic construct
  source 1..20: mol_type = other RNA
tgcaggataagggagacacc

SEQ ID NO: 8680 - RNA, 20 nt, synthetic construct
  source 1..20: mol_type = other RNA
cagtatttggggtgtctccc

SEQ ID NO: 8681 - RNA, 20 nt, synthetic construct
  source 1..20: mol_type = other RNA
cttttccacttctgcagttg

SEQ ID NO: 8682 - RNA, 20 nt, synthetic construct
  source 1..20: mol_type = other RNA
agttgtggggtgtgtttgag

SEQ ID NO: 8683 - RNA, 20 nt, synthetic construct
  source 1..20: mol_type = other RNA
ctcaaacacaccccacaact

SEQ ID NO: 8684 - RNA, 20 nt, synthetic construct
  source 1..20: mol_type = other RNA
aacacaccccacaactggag

SEQ ID NO: 8685 - RNA, 20 nt, synthetic construct
  source 1..20: mol_type = other RNA
tgcaaacagactttcagctt

SEQ ID NO: 8686 - RNA, 20 nt, synthetic construct
  source 1..20: mol_type = other RNA
aaatttactgaggcccaggt

SEQ ID NO: 8687 - RNA, 20 nt, synthetic construct
  source 1..20: mol_type = other RNA
ctaaatttactgaggcccag

SEQ ID NO: 8688 - RNA, 20 nt, synthetic construct
  source 1..20: mol_type = other RNA
gctctctaaatttactgagg

SEQ ID NO: 8689 - RNA, 20 nt, synthetic construct
  source 1..20: mol_type = other RNA
gtaaatttagagagctgagc

SEQ ID NO: 8690 - RNA, 20 nt, synthetic construct
  source 1..20: mol_type = other RNA
acccctatattttgcttggc

SEQ ID NO: 8691 - RNA, 20 nt, synthetic construct
  source 1..20: mol_type = other RNA
gctgcttcctctacccctat

SEQ ID NO: 8692 - RNA, 20 nt, synthetic construct
  source 1..20: mol_type = other RNA
gaggtcttctctgctgcttc

SEQ ID NO: 8693 - RNA, 20 nt, synthetic construct
  source 1..20: mol_type = other RNA
gagcttgctggatccccaag

SEQ ID NO: 8694 - RNA, 20 nt, synthetic construct
  source 1..20: mol_type = other RNA
gtggtgccaggcaggaatga

SEQ ID NO: 8695 - RNA, 20 nt, synthetic construct
  source 1..20: mol_type = other RNA
ttcctgcctggcaccacaga

SEQ ID NO: 8696 - RNA, 20 nt, synthetic construct
  source 1..20: mol_type = other RNA
gttcctttggccacacttct

SEQ ID NO: 8697 - RNA, 20 nt, synthetic construct
  source 1..20: mol_type = other RNA
atgtggagttttaccctctg

SEQ ID NO: 8698 - RNA, 20 nt, synthetic construct
  source 1..20: mol_type = other RNA
acatggaggactgctctacc

SEQ ID NO: 8699 - RNA, 20 nt, synthetic construct
  source 1..20: mol_type = other RNA
acctgaactttctaacaatt

SEQ ID NO: 8700 - RNA, 20 nt, synthetic construct
  source 1..20: mol_type = other RNA
ccctgttcaaattgttagaa

SEQ ID NO: 8701 - RNA, 20 nt, synthetic construct
  source 1..20: mol_type = other RNA
cccaagttctggccaggagg

SEQ ID NO: 8702 - RNA, 20 nt, synthetic construct
  source 1..20: mol_type = other RNA
tggccagaacttgggggagg

SEQ ID NO: 8703 - RNA, 20 nt, synthetic construct
  source 1..20: mol_type = other RNA
cagctgtgaaagaaaagggc

SEQ ID NO: 8704 - RNA, 20 nt, synthetic construct
  source 1..20: mol_type = other RNA
ggcaagttttcaagcctgac

SEQ ID NO: 8705 - RNA, 20 nt, synthetic construct
  source 1..20: mol_type = other RNA
aagtctgtttccaggtgggg

SEQ ID NO: 8706 - RNA, 20 nt, synthetic construct
  source 1..20: mol_type = other RNA
caccatgcccccaaccccgc

SEQ ID NO: 8707 - RNA, 20 nt, synthetic construct
  source 1..20: mol_type = other RNA
cccagcacccatgcaaactg

SEQ ID NO: 8708 - RNA, 20 nt, synthetic construct
  source 1..20: mol_type = other RNA
acttccccgacaactcagat

SEQ ID NO: 8709 - RNA, 20 nt, synthetic construct
  source 1..20: mol_type = other RNA
gctgagtcatctgagttgtc

SEQ ID NO: 8710 - RNA, 20 nt, synthetic construct
  source 1..20: mol_type = other RNA
gatgactcagcagaggcagc

SEQ ID NO: 8711 - RNA, 20 nt, synthetic construct
  source 1..20: mol_type = other RNA
gcagaggcagccataatcct

SEQ ID NO: 8712 - RNA, 20 nt, synthetic construct
  source 1..20: mol_type = other RNA
taggtacacaactccagtga

SEQ ID NO: 8713 - RNA, 20 nt, synthetic construct
  source 1..20: mol_type = other RNA
agtgacctgggaacttcacc

SEQ ID NO: 8714 - RNA, 20 nt, synthetic construct
  source 1..20: mol_type = other RNA
gactttccttgggcacgtct

SEQ ID NO: 8715 - RNA, 20 nt, synthetic construct
  source 1..20: mol_type = other RNA
gacacgcctagtcccacccc

SEQ ID NO: 8716 - RNA, 20 nt, synthetic construct
  source 1..20: mol_type = other RNA
ttgtcttctgctaccagggt

SEQ ID NO: 8717 - RNA, 20 nt, synthetic construct
  source 1..20: mol_type = other RNA
aaagattatatgctctttgt

SEQ ID NO: 8718 - RNA, 20 nt, synthetic construct
  source 1..20: mol_type = other RNA
agtccctctccacactagta

SEQ ID NO: 8719 - RNA, 20 nt, synthetic construct
  source 1..20: mol_type = other RNA
ccacactagtatagctgatg

SEQ ID NO: 8720 - RNA, 20 nt, synthetic construct
  source 1..20: mol_type = other RNA
tgcatcagctatactagtgt

SEQ ID NO: 8721 - RNA, 20 nt, synthetic construct
  source 1..20: mol_type = other RNA
acactagtatagctgatgca

SEQ ID NO: 8722 - RNA, 20 nt, synthetic construct
  source 1..20: mol_type = other RNA
atttttgtgctggttggcct

SEQ ID NO: 8723 - RNA, 20 nt, synthetic construct
  source 1..20: mol_type = other RNA
ataggggttcctagctttgg

SEQ ID NO: 8724 - RNA, 20 nt, synthetic construct
  source 1..20: mol_type = other RNA
tccacctccaccagaacagg

SEQ ID NO: 8725 - RNA, 20 nt, synthetic construct
  source 1..20: mol_type = other RNA
acctccaccagaacaggcac

SEQ ID NO: 8726 - RNA, 20 nt, synthetic construct
  source 1..20: mol_type = other RNA
accagaacaggcactggtat

SEQ ID NO: 8727 - RNA, 20 nt, synthetic construct
  source 1..20: mol_type = other RNA
gctgtggataccagtgcctg

SEQ ID NO: 8728 - RNA, 20 nt, synthetic construct
  source 1..20: mol_type = other RNA
cagctgtggataccagtgcc

SEQ ID NO: 8729 - RNA, 20 nt, synthetic construct
  source 1..20: mol_type = other RNA
gtacagacagtccccagtac

SEQ ID NO: 8730 - RNA, 20 nt, synthetic construct
  source 1..20: mol_type = other RNA
gggctggtactggggactgt

SEQ ID NO: 8731 - RNA, 20 nt, synthetic construct
  source 1..20: mol_type = other RNA
caggaagccacatccatagg

SEQ ID NO: 8732 - RNA, 20 nt, synthetic construct
  source 1..20: mol_type = other RNA
tttcctatggatgtggcttc

SEQ ID NO: 8733 - RNA, 20 nt, synthetic construct
  source 1..20: mol_type = other RNA
ctcttttcctatggatgtgg

SEQ ID NO: 8734 - RNA, 20 nt, synthetic construct
  source 1..20: mol_type = other RNA
ccctcttttcctatggatgt

SEQ ID NO: 8735 - RNA, 20 nt, synthetic construct
  source 1..20: mol_type = other RNA
tttgggtagactgtgtcaga

SEQ ID NO: 8736 - RNA, 20 nt, synthetic construct
  source 1..20: mol_type = other RNA
gacacagtctacccaaatga

SEQ ID NO: 8737 - RNA, 20 nt, synthetic construct
  source 1..20: mol_type = other RNA
tcacactcccagttcaccag

SEQ ID NO: 8738 - RNA, 20 nt, synthetic construct
  source 1..20: mol_type = other RNA
cagttcaccagcaatggatc

SEQ ID NO: 8739 - RNA, 20 nt, synthetic construct
  source 1..20: mol_type = other RNA
ttcaggtaaatcagggattt

SEQ ID NO: 8740 - RNA, 20 nt, synthetic construct
  source 1..20: mol_type = other RNA
tgaattctctttcaggtaaa

SEQ ID NO: 8741 - RNA, 20 nt, synthetic construct
  source 1..20: mol_type = other RNA
ctgattagcttaataactaa

SEQ ID NO: 8742 - RNA, 20 nt, synthetic construct
  source 1..20: mol_type = other RNA
ggtccctccctgattagctt

SEQ ID NO: 8743 - RNA, 20 nt, synthetic construct
  source 1..20: mol_type = other RNA
ggaaagtctcagcaatagaa

SEQ ID NO: 8744 - RNA, 20 nt, synthetic construct
  source 1..20: mol_type = other RNA
gcaatagaactgaacaagta

SEQ ID NO: 8745 - RNA, 20 nt, synthetic construct
  source 1..20: mol_type = other RNA
gaatttattttttctacttg

SEQ ID NO: 8746 - RNA, 20 nt, synthetic construct
  source 1..20: mol_type = other RNA
aagacaaggacttcaaatta

SEQ ID NO: 8747 - RNA, 20 nt, synthetic construct
  source 1..20: mol_type = other RNA
ggagccacgattattcttat

SEQ ID NO: 8748 - RNA, 20 nt, synthetic construct
  source 1..20: mol_type = other RNA
tgaggaaaaagacaatacta

SEQ ID NO: 8749 - RNA, 20 nt, synthetic construct
  source 1..20: mol_type = other RNA
tcaggttatgcaaagttaag

SEQ ID NO: 8750 - RNA, 20 nt, synthetic construct
  source 1..20: mol_type = other RNA
taagattcttgccttcgtct

SEQ ID NO: 8751 - RNA, 20 nt, synthetic construct
  source 1..20: mol_type = other RNA
cagctcttaagattcttgcc

SEQ ID NO: 8752 - RNA, 20 nt, synthetic construct
  source 1..20: mol_type = other RNA
aatcctttatagcttgtaca

SEQ ID NO: 8753 - RNA, 20 nt, synthetic construct
  source 1..20: mol_type = other RNA
tcaaacaaaacaattatcag

SEQ ID NO: 8754 - RNA, 20 nt, synthetic construct
  source 1..20: mol_type = other RNA
aacaaaacaattatcagtca

SEQ ID NO: 8755 - RNA, 20 nt, synthetic construct
  source 1..20: mol_type = other RNA
tagcatttgtttgtccaaaa

SEQ ID NO: 8756 - RNA, 20 nt, synthetic construct
  source 1..20: mol_type = other RNA
ttttagcagttcttctagtg

SEQ ID NO: 8757 - RNA, 20 nt, synthetic construct
  source 1..20: mol_type = other RNA
aaatcttgaaacaaatccta

SEQ ID NO: 8758 - RNA, 20 nt, synthetic construct
  source 1..20: mol_type = other RNA
ttaaagcataaatcacacag

SEQ ID NO: 8759 - RNA, 20 nt, synthetic construct
  source 1..20: mol_type = other RNA
gtactttggttttgtttttt

SEQ ID NO: 8760 - RNA, 20 nt, synthetic construct
  source 1..20: mol_type = other RNA
catttcaatgctaaaattga

SEQ ID NO: 8761 - RNA, 20 nt, synthetic construct
  source 1..20: mol_type = other RNA
ttttgtatcctttaagtgga

SEQ ID NO: 8762 - RNA, 20 nt, synthetic construct
  source 1..20: mol_type = other RNA
acttaaaggatacaaaaaga

SEQ ID NO: 8763 - RNA, 20 nt, synthetic construct
  source 1..20: mol_type = other RNA
cggggagcggcagactggag

SEQ ID NO: 8764 - RNA, 20 nt, synthetic construct
  source 1..20: mol_type = other RNA
agtctgccgctccccgtgag

SEQ ID NO: 8765 - RNA, 20 nt, synthetic construct
  source 1..20: mol_type = other RNA
ccgtgagatcaacacatagg

SEQ ID NO: 8766 - RNA, 20 nt, synthetic construct
  source 1..20: mol_type = other RNA
tctcattgggactggttaga

SEQ ID NO: 8767 - RNA, 20 nt, synthetic construct
  source 1..20: mol_type = other RNA
ttgggactggttagacagtg

SEQ ID NO: 8768 - RNA, 20 nt, synthetic construct
  source 1..20: mol_type = other RNA
gtgggctgcacccactgtct

SEQ ID NO: 8769 - RNA, 20 nt, synthetic construct
  source 1..20: mol_type = other RNA
cctgggaagtggaaggggtc

SEQ ID NO: 8770 - RNA, 20 nt, synthetic construct
  source 1..20: mol_type = other RNA
ctcccctagccaaaggaagc

SEQ ID NO: 8771 - RNA, 20 nt, synthetic construct
  source 1..20: mol_type = other RNA
cggcttcctttggctagggg

SEQ ID NO: 8772 - RNA, 20 nt, synthetic construct
  source 1..20: mol_type = other RNA
cctagccaaaggaagccgtg

SEQ ID NO: 8773 - RNA, 20 nt, synthetic construct
  source 1..20: mol_type = other RNA
tggtcttcaggttgcaaaga

SEQ ID NO: 8774 - RNA, 20 nt, synthetic construct
  source 1..20: mol_type = other RNA
tgcagctagcttagtgtctg

SEQ ID NO: 8775 - RNA, 20 nt, synthetic construct
  source 1..20: mol_type = other RNA
ctggcttcagccctttcttc

SEQ ID NO: 8776 - RNA, 20 nt, synthetic construct
  source 1..20: mol_type = other RNA
atgggggtgggatccactga

SEQ ID NO: 8777 - RNA, 20 nt, synthetic construct
  source 1..20: mol_type = other RNA
gtggatcccacccccatgga

SEQ ID NO: 8778 - RNA, 20 nt, synthetic construct
  source 1..20: mol_type = other RNA
actggcttgaaattcttgct

SEQ ID NO: 8779 - RNA, 20 nt, synthetic construct
  source 1..20: mol_type = other RNA
caccaagcttgagcgtccca

SEQ ID NO: 8780 - RNA, 20 nt, synthetic construct
  source 1..20: mol_type = other RNA
tcccaccaagcttgagcgtc

SEQ ID NO: 8781 - RNA, 20 nt, synthetic construct
  source 1..20: mol_type = other RNA
agcttggtgggaggaggggt

SEQ ID NO: 8782 - RNA, 20 nt, synthetic construct
  source 1..20: mol_type = other RNA
agccccagtatttgtggata

SEQ ID NO: 8783 - RNA, 20 nt, synthetic construct
  source 1..20: mol_type = other RNA
tactcaagccccagtatttg

SEQ ID NO: 8784 - RNA, 20 nt, synthetic construct
  source 1..20: mol_type = other RNA
cagtgtaagcaaaaccgcta

SEQ ID NO: 8785 - RNA, 20 nt, synthetic construct
  source 1..20: mol_type = other RNA
tgctacaatggctttgccaa

SEQ ID NO: 8786 - RNA, 20 nt, synthetic construct
  source 1..20: mol_type = other RNA
ctagattcctcctctctggg

SEQ ID NO: 8787 - RNA, 20 nt, synthetic construct
  source 1..20: mol_type = other RNA
agattcctcctctctgggca

SEQ ID NO: 8788 - RNA, 20 nt, synthetic construct
  source 1..20: mol_type = other RNA
tctctgggcagggcatctct

SEQ ID NO: 8789 - RNA, 20 nt, synthetic construct
  source 1..20: mol_type = other RNA
ctgggcagggcatctctgaa

SEQ ID NO: 8790 - RNA, 20 nt, synthetic construct
  source 1..20: mol_type = other RNA
gggcagggcatctctgaaag

SEQ ID NO: 8791 - RNA, 20 nt, synthetic construct
  source 1..20: mol_type = other RNA
gaaagaaaggcagcagcccc

SEQ ID NO: 8792 - RNA, 20 nt, synthetic construct
  source 1..20: mol_type = other RNA
gtcccagggagatgggagtt

SEQ ID NO: 8793 - RNA, 20 nt, synthetic construct
  source 1..20: mol_type = other RNA
catctccctgggacagagca

SEQ ID NO: 8794 - RNA, 20 nt, synthetic construct
  source 1..20: mol_type = other RNA
agttgctctgtcccagggag

SEQ ID NO: 8795 - RNA, 20 nt, synthetic construct
  source 1..20: mol_type = other RNA
ctgggacagagcaactggag

SEQ ID NO: 8796 - RNA, 20 nt, synthetic construct
  source 1..20: mol_type = other RNA
cagccaccccttcctccagt

SEQ ID NO: 8797 - RNA, 20 nt, synthetic construct
  source 1..20: mol_type = other RNA
agcagacttagtttcctgcc

SEQ ID NO: 8798 - RNA, 20 nt, synthetic construct
  source 1..20: mol_type = other RNA
tttcagagctggcaggcagg

SEQ ID NO: 8799 - RNA, 20 nt, synthetic construct
  source 1..20: mol_type = other RNA
gaaaagagcaccagatcccc

SEQ ID NO: 8800 - RNA, 20 nt, synthetic construct
  source 1..20: mol_type = other RNA
agtgctgtgttgggggatct

SEQ ID NO: 8801 - RNA, 20 nt, synthetic construct
  source 1..20: mol_type = other RNA
gataagggacagactgcctc

SEQ ID NO: 8802 - RNA, 20 nt, synthetic construct
  source 1..20: mol_type = other RNA
tcaagtgggtcctggtttca

SEQ ID NO: 8803 - RNA, 20 nt, synthetic construct
  source 1..20: mol_type = other RNA
agtgggtcctggtttcagaa

SEQ ID NO: 8804 - RNA, 20 nt, synthetic construct
  source 1..20: mol_type = other RNA
gaggagtttcttattatctt

SEQ ID NO: 8805 - RNA, 20 nt, synthetic construct
  source 1..20: mol_type = other RNA
tttagctcagaggagtttct

SEQ ID NO: 8806 - RNA, 20 nt, synthetic construct
  source 1..20: mol_type = other RNA
tctgagctaaaggagcatgt

SEQ ID NO: 8807 - RNA, 20 nt, synthetic construct
  source 1..20: mol_type = other RNA
gagctaaaggagcatgttct

SEQ ID NO: 8808 - RNA, 20 nt, synthetic construct
  source 1..20: mol_type = other RNA
gacctttttcaaggttctta

SEQ ID NO: 8809 - RNA, 20 nt, synthetic construct
  source 1..20: mol_type = other RNA
aaactgcttactgtagttag

SEQ ID NO: 8810 - RNA, 20 nt, synthetic construct
  source 1..20: mol_type = other RNA
ctaaggtcatttatgttctt

SEQ ID NO: 8811 - RNA, 20 nt, synthetic construct
  source 1..20: mol_type = other RNA
tgctgtgtttttcagctccc

SEQ ID NO: 8812 - RNA, 20 nt, synthetic construct
  source 1..20: mol_type = other RNA
gatatcctttcttccacttg

SEQ ID NO: 8813 - RNA, 20 nt, synthetic construct
  source 1..20: mol_type = other RNA
aagtatgggactatgtgaaa

SEQ ID NO: 8814 - RNA, 20 nt, synthetic construct
  source 1..20: mol_type = other RNA
catcactttcaggtacacca

SEQ ID NO: 8815 - RNA, 20 nt, synthetic construct
  source 1..20: mol_type = other RNA
tggataatatcctgaagagt

SEQ ID NO: 8816 - RNA, 20 nt, synthetic construct
  source 1..20: mol_type = other RNA
tcaggatattatccaggaga

SEQ ID NO: 8817 - RNA, 20 nt, synthetic construct
  source 1..20: mol_type = other RNA
gtatttccttaatttgaatg

SEQ ID NO: 8818 - RNA, 20 nt, synthetic construct
  source 1..20: mol_type = other RNA
gtatttcctgaatttgaatg

SEQ ID NO: 8819 - RNA, 20 nt, synthetic construct
  source 1..20: mol_type = other RNA
tcttgaggagtatctttgtg

SEQ ID NO: 8820 - RNA, 20 nt, synthetic construct
  source 1..20: mol_type = other RNA
tcaagaagagcaacctgaag

SEQ ID NO: 8821 - RNA, 20 nt, synthetic construct
  source 1..20: mol_type = other RNA
agaagagcaacctgaagaca

SEQ ID NO: 8822 - RNA, 20 nt, synthetic construct
  source 1..20: mol_type = other RNA
acatttttttccttcatttc

SEQ ID NO: 8823 - RNA, 20 nt, synthetic construct
  source 1..20: mol_type = other RNA
ggctgccctcaacatttttt

SEQ ID NO: 8824 - RNA, 20 nt, synthetic construct
  source 1..20: mol_type = other RNA
ctggctgccctcaacatttt

SEQ ID NO: 8825 - RNA, 20 nt, synthetic construct
  source 1..20: mol_type = other RNA
tctggcttgtagagtttctg

SEQ ID NO: 8826 - RNA, 20 nt, synthetic construct
  source 1..20: mol_type = other RNA
cttctggcttgtagagtttc

SEQ ID NO: 8827 - RNA, 20 nt, synthetic construct
  source 1..20: mol_type = other RNA
cactctcttctggcttgtag

SEQ ID NO: 8828 - RNA, 20 nt, synthetic construct
  source 1..20: mol_type = other RNA
acaagccagaagagagtggg

SEQ ID NO: 8829 - RNA, 20 nt, synthetic construct
  source 1..20: mol_type = other RNA
tcatttacattaggtatatc

SEQ ID NO: 8830 - RNA, 20 nt, synthetic construct
  source 1..20: mol_type = other RNA
taatactatccctccccact

SEQ ID NO: 8831 - RNA, 20 nt, synthetic construct
  source 1..20: mol_type = other RNA
ccactccccccatcccatga

SEQ ID NO: 8832 - RNA, 20 nt, synthetic construct
  source 1..20: mol_type = other RNA
ccccatcccatgacaggccc

SEQ ID NO: 8833 - RNA, 20 nt, synthetic construct
  source 1..20: mol_type = other RNA
gtgtccatgtactctcattg

SEQ ID NO: 8834 - RNA, 20 nt, synthetic construct
  source 1..20: mol_type = other RNA
taggtgggaattgaacaatg

SEQ ID NO: 8835 - RNA, 20 nt, synthetic construct
  source 1..20: mol_type = other RNA
cattgttcaattcccaccta

SEQ ID NO: 8836 - RNA, 20 nt, synthetic construct
  source 1..20: mol_type = other RNA
ttgttcaattcccacctatg

SEQ ID NO: 8837 - RNA, 20 nt, synthetic construct
  source 1..20: mol_type = other RNA
ctcataggtgggaattgaac

SEQ ID NO: 8838 - RNA, 20 nt, synthetic construct
  source 1..20: mol_type = other RNA
gcaaactatcacaaggacag

SEQ ID NO: 8839 - RNA, 20 nt, synthetic construct
  source 1..20: mol_type = other RNA
aggatttagaactagaaata

SEQ ID NO: 8840 - RNA, 20 nt, synthetic construct
  source 1..20: mol_type = other RNA
acatcctctctagcatctgt

SEQ ID NO: 8841 - RNA, 20 nt, synthetic construct
  source 1..20: mol_type = other RNA
ctagcatctgttgtttcctg

SEQ ID NO: 8842 - RNA, 20 nt, synthetic construct
  source 1..20: mol_type = other RNA
agcatctgttgtttcctgac

SEQ ID NO: 8843 - RNA, 20 nt, synthetic construct
  source 1..20: mol_type = other RNA
taccagttagaatggtgatc

SEQ ID NO: 8844 - RNA, 20 nt, synthetic construct
  source 1..20: mol_type = other RNA
ttgtggttttgatttgcatt

SEQ ID NO: 8845 - RNA, 20 nt, synthetic construct
  source 1..20: mol_type = other RNA
ccatcactggccatcagaga

SEQ ID NO: 8846 - RNA, 20 nt, synthetic construct
  source 1..20: mol_type = other RNA
gatggccagtgatggtgagc

SEQ ID NO: 8847 - RNA, 20 nt, synthetic construct
  source 1..20: mol_type = other RNA
tgactgcataaaagttttct

SEQ ID NO: 8848 - RNA, 20 nt, synthetic construct
  source 1..20: mol_type = other RNA
aaagaaaacttttatgcagt

SEQ ID NO: 8849 - RNA, 20 nt, synthetic construct
  source 1..20: mol_type = other RNA
cattctgtagcttgcctgtt

SEQ ID NO: 8850 - RNA, 20 nt, synthetic construct
  source 1..20: mol_type = other RNA
gaatgaacaggcaagctaca

SEQ ID NO: 8851 - RNA, 20 nt, synthetic construct
  source 1..20: mol_type = other RNA
ttagtttaattagatcccat

SEQ ID NO: 8852 - RNA, 20 nt, synthetic construct
  source 1..20: mol_type = other RNA
gaaataataccacacatcta

SEQ ID NO: 8853 - RNA, 20 nt, synthetic construct
  source 1..20: mol_type = other RNA
gttctgttccattggtctat

SEQ ID NO: 8854 - RNA, 20 nt, synthetic construct
  source 1..20: mol_type = other RNA
gttttggtaccagtaccatg

SEQ ID NO: 8855 - RNA, 20 nt, synthetic construct
  source 1..20: mol_type = other RNA
gcctgacttcaaactacatt

SEQ ID NO: 8856 - RNA, 20 nt, synthetic construct
  source 1..20: mol_type = other RNA
agctttgcttttttggctta

SEQ ID NO: 8857 - RNA, 20 nt, synthetic construct
  source 1..20: mol_type = other RNA
tttttgttccatatgaactt

SEQ ID NO: 8858 - RNA, 20 nt, synthetic construct
  source 1..20: mol_type = other RNA
tggataggaagaatcaatat

SEQ ID NO: 8859 - RNA, 20 nt, synthetic construct
  source 1..20: mol_type = other RNA
tttatttcattaagcagtgg

SEQ ID NO: 8860 - RNA, 20 nt, synthetic construct
  source 1..20: mol_type = other RNA
tcaaggagaactacaaacca

SEQ ID NO: 8861 - RNA, 20 nt, synthetic construct
  source 1..20: mol_type = other RNA
ttgaagaggtccttcccatc

SEQ ID NO: 8862 - RNA, 20 nt, synthetic construct
  source 1..20: mol_type = other RNA
cattcacaattgcttcaaag

SEQ ID NO: 8863 - RNA, 20 nt, synthetic construct
  source 1..20: mol_type = other RNA
ttgaagcaattgtgaatggg

SEQ ID NO: 8864 - RNA, 20 nt, synthetic construct
  source 1..20: mol_type = other RNA
agatacaaaatcaatgtgca

SEQ ID NO: 8865 - RNA, 20 nt, synthetic construct
  source 1..20: mol_type = other RNA
ttaagctgataagcaacttc

SEQ ID NO: 8866 - RNA, 20 nt, synthetic construct
  source 1..20: mol_type = other RNA
gaccaaaatctccttaagct

SEQ ID NO: 8867 - RNA, 20 nt, synthetic construct
  source 1..20: mol_type = other RNA
tttcctaactgaataccctt

SEQ ID NO: 8868 - RNA, 20 nt, synthetic construct
  source 1..20: mol_type = other RNA
tgcctaattgccctggccag

SEQ ID NO: 8869 - RNA, 20 nt, synthetic construct
  source 1..20: mol_type = other RNA
tattcaacatagtgttggaa

SEQ ID NO: 8870 - RNA, 20 nt, synthetic construct
  source 1..20: mol_type = other RNA
ccactcctattcaacatagt

SEQ ID NO: 8871 - RNA, 20 nt, synthetic construct
  source 1..20: mol_type = other RNA
caccactcctattcaacata

SEQ ID NO: 8872 - RNA, 20 nt, synthetic construct
  source 1..20: mol_type = other RNA
ctcaccactcctattcaaca

SEQ ID NO: 8873 - RNA, 20 nt, synthetic construct
  source 1..20: mol_type = other RNA
aaataataagagctatttat

SEQ ID NO: 8874 - RNA, 20 nt, synthetic construct
  source 1..20: mol_type = other RNA
tattattttgagatatgtcc

SEQ ID NO: 8875 - RNA, 20 nt, synthetic construct
  source 1..20: mol_type = other RNA
ataaactatgtattgatggg

SEQ ID NO: 8876 - RNA, 20 nt, synthetic construct
  source 1..20: mol_type = other RNA
caataaactatgtattgatg

SEQ ID NO: 8877 - RNA, 20 nt, synthetic construct
  source 1..20: mol_type = other RNA
atgctgaactctcaataaac

SEQ ID NO: 8878 - RNA, 20 nt, synthetic construct
  source 1..20: mol_type = other RNA
ccatgctgaactctcaataa

SEQ ID NO: 8879 - RNA, 20 nt, synthetic construct
  source 1..20: mol_type = other RNA
atagatgcagaaaaggcctt

SEQ ID NO: 8880 - RNA, 20 nt, synthetic construct
  source 1..20: mol_type = other RNA
ataaaatactggcaaaccga

SEQ ID NO: 8881 - RNA, 20 nt, synthetic construct
  source 1..20: mol_type = other RNA
tttttgttgtgtctctgcca

SEQ ID NO: 8882 - RNA, 20 nt, synthetic construct
  source 1..20: mol_type = other RNA
gccaggatttggtatcagga

SEQ ID NO: 8883 - RNA, 20 nt, synthetic construct
  source 1..20: mol_type = other RNA
ttttatgaggccagcatcat

SEQ ID NO: 8884 - RNA, 20 nt, synthetic construct
  source 1..20: mol_type = other RNA
ctaactcattttatgaggcc

SEQ ID NO: 8885 - RNA, 20 nt, synthetic construct
  source 1..20: mol_type = other RNA
taaaatgagttagggaggat

SEQ ID NO: 8886 - RNA, 20 nt, synthetic construct
  source 1..20: mol_type = other RNA
ttttctatgattggaatagt

SEQ ID NO: 8887 - RNA, 20 nt, synthetic construct
  source 1..20: mol_type = other RNA
tctttgtatctgtggtagaa

SEQ ID NO: 8888 - RNA, 20 nt, synthetic construct
  source 1..20: mol_type = other RNA
ttgtatctgtggtagaattc

SEQ ID NO: 8889 - RNA, 20 nt, synthetic construct
  source 1..20: mol_type = other RNA
cctggactttttttggttgg

SEQ ID NO: 8890 - RNA, 20 nt, synthetic construct
  source 1..20: mol_type = other RNA
tggactttttttggttggta

SEQ ID NO: 8891 - RNA, 20 nt, synthetic construct
  source 1..20: mol_type = other RNA
gaaattgaggcaataattaa

SEQ ID NO: 8892 - RNA, 20 nt, synthetic construct
  source 1..20: mol_type = other RNA
taattattgcctcaatttca

SEQ ID NO: 8893 - RNA, 20 nt, synthetic construct
  source 1..20: mol_type = other RNA
atttcagagcctgttattgg

SEQ ID NO: 8894 - RNA, 20 nt, synthetic construct
  source 1..20: mol_type = other RNA
gtgcaaataaactagaaaat

SEQ ID NO: 8895 - RNA, 20 nt, synthetic construct
  source 1..20: mol_type = other RNA
gatggtagtttgtatttctg

SEQ ID NO: 8896 - RNA, 20 nt, synthetic construct
  source 1..20: mol_type = other RNA
cttttcttctttattagtct

SEQ ID NO: 8897 - RNA, 20 nt, synthetic construct
  source 1..20: mol_type = other RNA
tttcttctttattagtcttg

SEQ ID NO: 8898 - RNA, 20 nt, synthetic construct
  source 1..20: mol_type = other RNA
tggattcattgatgttttga

SEQ ID NO: 8899 - RNA, 20 nt, synthetic construct
  source 1..20: mol_type = other RNA
atctccttcagttctgctct

SEQ ID NO: 8900 - RNA, 20 nt, synthetic construct
  source 1..20: mol_type = other RNA
ttcagttctgctctggtctt

SEQ ID NO: 8901 - RNA, 20 nt, synthetic construct
  source 1..20: mol_type = other RNA
ggtcttagttatttcttgcc

SEQ ID NO: 8902 - RNA, 20 nt, synthetic construct
  source 1..20: mol_type = other RNA
tgcttctctagttcttttaa

SEQ ID NO: 8903 - RNA, 20 nt, synthetic construct
  source 1..20: mol_type = other RNA
agttcttttaatggtgatgt

SEQ ID NO: 8904 - RNA, 20 nt, synthetic construct
  source 1..20: mol_type = other RNA
tgtgggcatttagtgctgta

SEQ ID NO: 8905 - RNA, 20 nt, synthetic construct
  source 1..20: mol_type = other RNA
ccctacacactgctttaaat

SEQ ID NO: 8906 - RNA, 20 nt, synthetic construct
  source 1..20: mol_type = other RNA
gggacacatttaaagcagtg

SEQ ID NO: 8907 - RNA, 20 nt, synthetic construct
  source 1..20: mol_type = other RNA
ggtgcaggttgttcagtttc

SEQ ID NO: 8908 - RNA, 20 nt, synthetic construct
  source 1..20: mol_type = other RNA
actatatggaaactgaacaa

SEQ ID NO: 8909 - RNA, 20 nt, synthetic construct
  source 1..20: mol_type = other RNA
ttaaaaactgctcaactata

SEQ ID NO: 8910 - RNA, 20 nt, synthetic construct
  source 1..20: mol_type = other RNA
ggattaagaaactcattaaa

SEQ ID NO: 8911 - RNA, 20 nt, synthetic construct
  source 1..20: mol_type = other RNA
gaccacagtgcaatcaaact

SEQ ID NO: 8912 - RNA, 20 nt, synthetic construct
  source 1..20: mol_type = other RNA
cagaccacagtgcaatcaaa

SEQ ID NO: 8913 - RNA, 20 nt, synthetic construct
  source 1..20: mol_type = other RNA
gcaaatgtaaaagaacagaa

SEQ ID NO: 8914 - RNA, 20 nt, synthetic construct
  source 1..20: mol_type = other RNA
cttccaactatctggtcaat

SEQ ID NO: 8915 - RNA, 20 nt, synthetic construct
  source 1..20: mol_type = other RNA
gcaccacatcgcacttattc

SEQ ID NO: 8916 - RNA, 20 nt, synthetic construct
  source 1..20: mol_type = other RNA
accccaaatcaacagaatat

SEQ ID NO: 8917 - RNA, 20 nt, synthetic construct
  source 1..20: mol_type = other RNA
ccaccccaaatcaacagaat

SEQ ID NO: 8918 - RNA, 20 nt, synthetic construct
  source 1..20: mol_type = other RNA
gcaccaagcagacctaatag

SEQ ID NO: 8919 - RNA, 20 nt, synthetic construct
  source 1..20: mol_type = other RNA
gctctgcaccaagcagacct

SEQ ID NO: 8920 - RNA, 20 nt, synthetic construct
  source 1..20: mol_type = other RNA
ttgatctgtctaatgttgac

SEQ ID NO: 8921 - RNA, 20 nt, synthetic construct
  source 1..20: mol_type = other RNA
cacacaataataatgggaga

SEQ ID NO: 8922 - RNA, 20 nt, synthetic construct
  source 1..20: mol_type = other RNA
cattattattgtgtgggagt

SEQ ID NO: 8923 - RNA, 20 nt, synthetic construct
  source 1..20: mol_type = other RNA
ttgtaggtctctaaggactt

SEQ ID NO: 8924 - RNA, 20 nt, synthetic construct
  source 1..20: mol_type = other RNA
aaggacttgctttatgaatc

SEQ ID NO: 8925 - RNA, 20 nt, synthetic construct
  source 1..20: mol_type = other RNA
tgtattgggtgcatatatat

SEQ ID NO: 8926 - RNA, 20 nt, synthetic construct
  source 1..20: mol_type = other RNA
tcttgttaaattggtccctt

SEQ ID NO: 8927 - RNA, 20 nt, synthetic construct
  source 1..20: mol_type = other RNA
tttgatctttgttagtttaa

SEQ ID NO: 8928 - RNA, 20 nt, synthetic construct
  source 1..20: mol_type = other RNA
gataaaacagactttaaact

SEQ ID NO: 8929 - RNA, 20 nt, synthetic construct
  source 1..20: mol_type = other RNA
aaataaagggatggaggaag

SEQ ID NO: 8930 - RNA, 20 nt, synthetic construct
  source 1..20: mol_type = other RNA
atccctttattttgagccta

SEQ ID NO: 8931 - RNA, 20 nt, synthetic construct
  source 1..20: mol_type = other RNA
cgtgcagagacacacatagg

SEQ ID NO: 8932 - RNA, 20 nt, synthetic construct
  source 1..20: mol_type = other RNA
gcacgtgagatgtgtcttca

SEQ ID NO: 8933 - RNA, 20 nt, synthetic construct
  source 1..20: mol_type = other RNA
ttatccaattttccagtctg

SEQ ID NO: 8934 - RNA, 20 nt, synthetic construct
  source 1..20: mol_type = other RNA
aattaaaagacacagactgg

SEQ ID NO: 8935 - RNA, 20 nt, synthetic construct
  source 1..20: mol_type = other RNA
ttagttgatgcagtttcttc

SEQ ID NO: 8936 - RNA, 20 nt, synthetic construct
  source 1..20: mol_type = other RNA
tgaaggaagcactaaacatg

SEQ ID NO: 8937 - RNA, 20 nt, synthetic construct
  source 1..20: mol_type = other RNA
tgtaaggcaggcctggtggt

SEQ ID NO: 8938 - RNA, 20 nt, synthetic construct
  source 1..20: mol_type = other RNA
cagcatttgcttgtctgtaa

SEQ ID NO: 8939 - RNA, 20 nt, synthetic construct
  source 1..20: mol_type = other RNA
gcatttgcttgtctgtaaag

SEQ ID NO: 8940 - RNA, 20 nt, synthetic construct
  source 1..20: mol_type = other RNA
ttcacttatgaagcttagtt

SEQ ID NO: 8941 - RNA, 20 nt, synthetic construct
  source 1..20: mol_type = other RNA
gttgaaaattcttttcttta

SEQ ID NO: 8942 - RNA, 20 nt, synthetic construct
  source 1..20: mol_type = other RNA
acaagccagaagagagtggc

SEQ ID NO: 8943 - RNA, 20 nt, synthetic construct
  source 1..20: mol_type = other RNA
cttctggcttgtagagtttc

SEQ ID NO: 8944 - RNA, 20 nt, synthetic construct
  source 1..20: mol_type = other RNA
tctggcttgtagagtttctg

SEQ ID NO: 8945 - RNA, 20 nt, synthetic construct
  source 1..20: mol_type = other RNA
gcagaaactctacaagccag

SEQ ID NO: 8946 - RNA, 20 nt, synthetic construct
  source 1..20: mol_type = other RNA
cagcagaaactctacaagcc

SEQ ID NO: 8947 - RNA, 20 nt, synthetic construct
  source 1..20: mol_type = other RNA
aagacacataattgtcagat

SEQ ID NO: 8948 - RNA, 20 nt, synthetic construct
  source 1..20: mol_type = other RNA
agaagagtaactccaagaca

SEQ ID NO: 8949 - RNA, 20 nt, synthetic construct
  source 1..20: mol_type = other RNA
tcgagaagagtaactccaag

SEQ ID NO: 8950 - RNA, 20 nt, synthetic construct
  source 1..20: mol_type = other RNA
tctcgaggagtatttttgtg

SEQ ID NO: 8951 - RNA, 20 nt, synthetic construct
  source 1..20: mol_type = other RNA
aggagtatttttgtggcatt

SEQ ID NO: 8952 - RNA, 20 nt, synthetic construct
  source 1..20: mol_type = other RNA
gtatttcctgaatttgaatg

SEQ ID NO: 8953 - RNA, 20 nt, synthetic construct
  source 1..20: mol_type = other RNA
tcaggatattatccaggaga

SEQ ID NO: 8954 - RNA, 20 nt, synthetic construct
  source 1..20: mol_type = other RNA
tggataatatcctgaagagt

SEQ ID NO: 8955 - RNA, 20 nt, synthetic construct
  source 1..20: mol_type = other RNA
tcgtcactttcaggtacacc

SEQ ID NO: 8956 - RNA, 20 nt, synthetic construct
  source 1..20: mol_type = other RNA
tcactttcaggtacaccaag

SEQ ID NO: 8957 - RNA, 20 nt, synthetic construct
  source 1..20: mol_type = other RNA
aataaatatgggactatgtg

SEQ ID NO: 8958 - RNA, 20 nt, synthetic construct
  source 1..20: mol_type = other RNA
tttttttctctaaacttctc

SEQ ID NO: 8959 - RNA, 20 nt, synthetic construct
  source 1..20: mol_type = other RNA
aaacttctcttctcgcttca

SEQ ID NO: 8960 - RNA, 20 nt, synthetic construct
  source 1..20: mol_type = other RNA
tctcgcttcatttcattcat

SEQ ID NO: 8961 - RNA, 20 nt, synthetic construct
  source 1..20: mol_type = other RNA
cttcatttcattcatttgat

SEQ ID NO: 8962 - RNA, 20 nt, synthetic construct
  source 1..20: mol_type = other RNA
tgccatggttttcagctcca

SEQ ID NO: 8963 - RNA, 20 nt, synthetic construct
  source 1..20: mol_type = other RNA
attagatcatttaaggtctt

SEQ ID NO: 8964 - RNA, 20 nt, synthetic construct
  source 1..20: mol_type = other RNA
atgctgtttattttagtctg

SEQ ID NO: 8965 - RNA, 20 nt, synthetic construct
  source 1..20: mol_type = other RNA
gagctaaagaaggatgttcg

SEQ ID NO: 8966 - RNA, 20 nt, synthetic construct
  source 1..20: mol_type = other RNA
gagaaatttgttattacaga

SEQ ID NO: 8967 - RNA, 20 nt, synthetic construct
  source 1..20: mol_type = other RNA
caactcatcaaagtcattct

SEQ ID NO: 8968 - RNA, 20 nt, synthetic construct
  source 1..20: mol_type = other RNA
actcatcaaagtcattctct

SEQ ID NO: 8969 - RNA, 20 nt, synthetic construct
  source 1..20: mol_type = other RNA
tcaaagtcattctctgtcca

SEQ ID NO: 8970 - RNA, 20 nt, synthetic construct
  source 1..20: mol_type = other RNA
gtccagctttgttctgttgc

SEQ ID NO: 8971 - RNA, 20 nt, synthetic construct
  source 1..20: mol_type = other RNA
cgagcaacagaacaaagctg

SEQ ID NO: 8972 - RNA, 20 nt, synthetic construct
  source 1..20: mol_type = other RNA
tcacgagcaacagaacaaag

SEQ ID NO: 8973 - RNA, 20 nt, synthetic construct
  source 1..20: mol_type = other RNA
gaaggaacgcagctcctcac

SEQ ID NO: 8974 - RNA, 20 nt, synthetic construct
  source 1..20: mol_type = other RNA
tgaggagctgcgttccttcg

SEQ ID NO: 8975 - RNA, 20 nt, synthetic construct
  source 1..20: mol_type = other RNA
tccgaaggaacgcagctcct

SEQ ID NO: 8976 - RNA, 20 nt, synthetic construct
  source 1..20: mol_type = other RNA
tctcctccgaaggaacgcag

SEQ ID NO: 8977 - RNA, 20 nt, synthetic construct
  source 1..20: mol_type = other RNA
ggtttctccccatctttgtg

SEQ ID NO: 8978 - RNA, 20 nt, synthetic construct
  source 1..20: mol_type = other RNA
ccatctttgtggtttatcta

SEQ ID NO: 8979 - RNA, 20 nt, synthetic construct
  source 1..20: mol_type = other RNA
aacagacctgcagctgaggg

SEQ ID NO: 8980 - RNA, 20 nt, synthetic construct
  source 1..20: mol_type = other RNA
gctgcaggtctgttggagtt

SEQ ID NO: 8981 - RNA, 20 nt, synthetic construct
  source 1..20: mol_type = other RNA
agcaaactccaacagacctg

SEQ ID NO: 8982 - RNA, 20 nt, synthetic construct
  source 1..20: mol_type = other RNA
agtccctgtttgcctgggta

SEQ ID NO: 8983 - RNA, 20 nt, synthetic construct
  source 1..20: mol_type = other RNA
actggtaatacccaggcaaa

SEQ ID NO: 8984 - RNA, 20 nt, synthetic construct
  source 1..20: mol_type = other RNA
gagatgaagcttccagagga

SEQ ID NO: 8985 - RNA, 20 nt, synthetic construct
  source 1..20: mol_type = other RNA
ggaagcttcatctcagaggg

SEQ ID NO: 8986 - RNA, 20 nt, synthetic construct
  source 1..20: mol_type = other RNA
tacagctgggtgcccctctg

SEQ ID NO: 8987 - RNA, 20 nt, synthetic construct
  source 1..20: mol_type = other RNA
gaggggcacccagctgtatg

SEQ ID NO: 8988 - RNA, 20 nt, synthetic construct
  source 1..20: mol_type = other RNA
cagtaggggccaactgacac

SEQ ID NO: 8989 - RNA, 20 nt, synthetic construct
  source 1..20: mol_type = other RNA
agtgggtccgtgacccccga

SEQ ID NO: 8990 - RNA, 20 nt, synthetic construct
  source 1..20: mol_type = other RNA
tcaagtgggtccgtgacccc

SEQ ID NO: 8991 - RNA, 20 nt, synthetic construct
  source 1..20: mol_type = other RNA
ggggtcacggacccacttga

SEQ ID NO: 8992 - RNA, 20 nt, synthetic construct
  source 1..20: mol_type = other RNA
cagcagagagtttgagatct

SEQ ID NO: 8993 - RNA, 20 nt, synthetic construct
  source 1..20: mol_type = other RNA
gatctcaaactctctgctgg

SEQ ID NO: 8994 - RNA, 20 nt, synthetic construct
  source 1..20: mol_type = other RNA
aactctctgctgggagaacc

SEQ ID NO: 8995 - RNA, 20 nt, synthetic construct
  source 1..20: mol_type = other RNA
ctgctgggagaaccactact

SEQ ID NO: 8996 - RNA, 20 nt, synthetic construct
  source 1..20: mol_type = other RNA
gctgggagaaccactactct

SEQ ID NO: 8997 - RNA, 20 nt, synthetic construct
  source 1..20: mol_type = other RNA
cttcaaagctgtcagacagg

SEQ ID NO: 8998 - RNA, 20 nt, synthetic construct
  source 1..20: mol_type = other RNA
tcaaagctgtcagacaggga

SEQ ID NO: 8999 - RNA, 20 nt, synthetic construct
  source 1..20: mol_type = other RNA
gggggcagggcatagctgaa

SEQ ID NO: 9000 - RNA, 20 nt, synthetic construct
  source 1..20: mol_type = other RNA
acctctgggggcagggcata

SEQ ID NO: 9001 - RNA, 20 nt, synthetic construct
  source 1..20: mol_type = other RNA
gtagactccacctctggggg

SEQ ID NO: 9002 - RNA, 20 nt, synthetic construct
  source 1..20: mol_type = other RNA
aggagacctgcctgcctctg

SEQ ID NO: 9003 - RNA, 20 nt, synthetic construct
  source 1..20: mol_type = other RNA
ttgagctgtggtgggctcca

SEQ ID NO: 9004 - RNA, 20 nt, synthetic construct
  source 1..20: mol_type = other RNA
aactgggtggagcccaccac

SEQ ID NO: 9005 - RNA, 20 nt, synthetic construct
  source 1..20: mol_type = other RNA
acccagtttgagcttcctgg

SEQ ID NO: 9006 - RNA, 20 nt, synthetic construct
  source 1..20: mol_type = other RNA
agtctcagcaatggcagacg

SEQ ID NO: 9007 - RNA, 20 nt, synthetic construct
  source 1..20: mol_type = other RNA
gcaatggcagacgcccctcc

SEQ ID NO: 9008 - RNA, 20 nt, synthetic construct
  source 1..20: mol_type = other RNA
cccagctttgctgccgcctt

SEQ ID NO: 9009 - RNA, 20 nt, synthetic construct
  source 1..20: mol_type = other RNA
gactactgtgctagcagttc

SEQ ID NO: 9010 - RNA, 20 nt, synthetic construct
  source 1..20: mol_type = other RNA
ctgctagtacagcagtctga

SEQ ID NO: 9011 - RNA, 20 nt, synthetic construct
  source 1..20: mol_type = other RNA
gactgctgtactagcagtga

SEQ ID NO: 9012 - RNA, 20 nt, synthetic construct
  source 1..20: mol_type = other RNA
gagggtcccatgcccacaga

SEQ ID NO: 9013 - RNA, 20 nt, synthetic construct
  source 1..20: mol_type = other RNA
gtgggcatgggaccctctga

SEQ ID NO: 9014 - RNA, 20 nt, synthetic construct
  source 1..20: mol_type = other RNA
gagccatgtgcaggatataa

SEQ ID NO: 9015 - RNA, 20 nt, synthetic construct
  source 1..20: mol_type = other RNA
tggtgtgccgtttgctaaga

SEQ ID NO: 9016 - RNA, 20 nt, synthetic construct
  source 1..20: mol_type = other RNA
caccctaatattgcactttt

SEQ ID NO: 9017 - RNA, 20 nt, synthetic construct
  source 1..20: mol_type = other RNA
cccgggaagtgtaaggggtc

SEQ ID NO: 9018 - RNA, 20 nt, synthetic construct
  source 1..20: mol_type = other RNA
ctctccgtgggctgcaccca

SEQ ID NO: 9019 - RNA, 20 nt, synthetic construct
  source 1..20: mol_type = other RNA
ccgtgggctgcacccactgt

SEQ ID NO: 9020 - RNA, 20 nt, synthetic construct
  source 1..20: mol_type = other RNA
gtgggctgcacccactgtct

SEQ ID NO: 9021 - RNA, 20 nt, synthetic construct
  source 1..20: mol_type = other RNA
ccggggcttgtcagacagtg

SEQ ID NO: 9022 - RNA, 20 nt, synthetic construct
  source 1..20: mol_type = other RNA
gctggaaatgcagaaaccac

SEQ ID NO: 9023 - RNA, 20 nt, synthetic construct
  source 1..20: mol_type = other RNA
agtccacagttcccagcatg

SEQ ID NO: 9024 - RNA, 20 nt, synthetic construct
  source 1..20: mol_type = other RNA
tgctgggaactgtggactgg

SEQ ID NO: 9025 - RNA, 20 nt, synthetic construct
  source 1..20: mol_type = other RNA
cctctctcacgatcacaagg

SEQ ID NO: 9026 - RNA, 20 nt, synthetic construct
  source 1..20: mol_type = other RNA
ctcacgatcacaaggtccca

SEQ ID NO: 9027 - RNA, 20 nt, synthetic construct
  source 1..20: mol_type = other RNA
cacgatcacaaggtcccaca

SEQ ID NO: 9028 - RNA, 20 nt, synthetic construct
  source 1..20: mol_type = other RNA
cgatcacaaggtcccacaat

SEQ ID NO: 9029 - RNA, 20 nt, synthetic construct
  source 1..20: mol_type = other RNA
gcctgcagacggcctattgt

SEQ ID NO: 9030 - RNA, 20 nt, synthetic construct
  source 1..20: mol_type = other RNA
tcagcctgcagacggcctat

SEQ ID NO: 9031 - RNA, 20 nt, synthetic construct
  source 1..20: mol_type = other RNA
aatttcttcagttttggaat

SEQ ID NO: 9032 - RNA, 20 nt, synthetic construct
  source 1..20: mol_type = other RNA
tttgttataaagcttagttt

SEQ ID NO: 9033 - RNA, 20 nt, synthetic construct
  source 1..20: mol_type = other RNA
gcatttgcttgtttgtaaag

SEQ ID NO: 9034 - RNA, 20 nt, synthetic construct
  source 1..20: mol_type = other RNA
tgtaaggcaggcctggtgtt

SEQ ID NO: 9035 - RNA, 20 nt, synthetic construct
  source 1..20: mol_type = other RNA
ttattcaatttcccagtctg

SEQ ID NO: 9036 - RNA, 20 nt, synthetic construct
  source 1..20: mol_type = other RNA
gggtgaaaagacatacatgg

SEQ ID NO: 9037 - RNA, 20 nt, synthetic construct
  source 1..20: mol_type = other RNA
aaataaagaaatgaaggaat

SEQ ID NO: 9038 - RNA, 20 nt, synthetic construct
  source 1..20: mol_type = other RNA
tttgatctttgatggtttaa

SEQ ID NO: 9039 - RNA, 20 nt, synthetic construct
  source 1..20: mol_type = other RNA
tttgtctcttttgatctttg

SEQ ID NO: 9040 - RNA, 20 nt, synthetic construct
  source 1..20: mol_type = other RNA
tgtattgggtgcatatataa

SEQ ID NO: 9041 - RNA, 20 nt, synthetic construct
  source 1..20: mol_type = other RNA
aagaacttgctttattaatc

SEQ ID NO: 9042 - RNA, 20 nt, synthetic construct
  source 1..20: mol_type = other RNA
ttgtaggtctctaagaactt

SEQ ID NO: 9043 - RNA, 20 nt, synthetic construct
  source 1..20: mol_type = other RNA
cactatttttgtgtggaagt

SEQ ID NO: 9044 - RNA, 20 nt, synthetic construct
  source 1..20: mol_type = other RNA
ggaccaagctgacctaatag

SEQ ID NO: 9045 - RNA, 20 nt, synthetic construct
  source 1..20: mol_type = other RNA
acaccacaaatcaacagaat

SEQ ID NO: 9046 - RNA, 20 nt, synthetic construct
  source 1..20: mol_type = other RNA
gcaccacattgcacttattc

SEQ ID NO: 9047 - RNA, 20 nt, synthetic construct
  source 1..20: mol_type = other RNA
gcaaatgccgtagaatggaa

SEQ ID NO: 9048 - RNA, 20 nt, synthetic construct
  source 1..20: mol_type = other RNA
cagaccaaagtgcaatcaaa

SEQ ID NO: 9049 - RNA, 20 nt, synthetic construct
  source 1..20: mol_type = other RNA
gaccaaagtgcaatcaaact

SEQ ID NO: 9050 - RNA, 20 nt, synthetic construct
  source 1..20: mol_type = other RNA
ggattaataaactcactcaa

SEQ ID NO: 9051 - RNA, 20 nt, synthetic construct
  source 1..20: mol_type = other RNA
ctcaaaaccacacaactata

SEQ ID NO: 9052 - RNA, 20 nt, synthetic construct
  source 1..20: mol_type = other RNA
aaaccacacaactatatgga

SEQ ID NO: 9053 - RNA, 20 nt, synthetic construct
  source 1..20: mol_type = other RNA
tgaattactactgggtaaat

SEQ ID NO: 9054 - RNA, 20 nt, synthetic construct
  source 1..20: mol_type = other RNA
ttggtttctaagaacttatc

SEQ ID NO: 9055 - RNA, 20 nt, synthetic construct
  source 1..20: mol_type = other RNA
ggtacacagctaaagccatg

SEQ ID NO: 9056 - RNA, 20 nt, synthetic construct
  source 1..20: mol_type = other RNA
aaacatggctttagctgtgt

SEQ ID NO: 9057 - RNA, 20 nt, synthetic construct
  source 1..20: mol_type = other RNA
tgtgggcatttagtgctata

SEQ ID NO: 9058 - RNA, 20 nt, synthetic construct
  source 1..20: mol_type = other RNA
ggttctttgaattgtgatgt

SEQ ID NO: 9059 - RNA, 20 nt, synthetic construct
  source 1..20: mol_type = other RNA
tgcttctctggttctttgaa

SEQ ID NO: 9060 - RNA, 20 nt, synthetic construct
  source 1..20: mol_type = other RNA
gatcttagttatttcttgtc

SEQ ID NO: 9061 - RNA, 20 nt, synthetic construct
  source 1..20: mol_type = other RNA
tggatttattaattttttaa

SEQ ID NO: 9062 - RNA, 20 nt, synthetic construct
  source 1..20: mol_type = other RNA
attttcttctttattagtct

SEQ ID NO: 9063 - RNA, 20 nt, synthetic construct
  source 1..20: mol_type = other RNA
gatggtagtttgtatttctg

SEQ ID NO: 9064 - RNA, 20 nt, synthetic construct
  source 1..20: mol_type = other RNA
atgcaaataaaatagaaaat

SEQ ID NO: 9065 - RNA, 20 nt, synthetic construct
  source 1..20: mol_type = other RNA
caagactaaaccaggaagaa

SEQ ID NO: 9066 - RNA, 20 nt, synthetic construct
  source 1..20: mol_type = other RNA
atttcagaacttgttattgg

SEQ ID NO: 9067 - RNA, 20 nt, synthetic construct
  source 1..20: mol_type = other RNA
ggtctgggctttttttggtt

SEQ ID NO: 9068 - RNA, 20 nt, synthetic construct
  source 1..20: mol_type = other RNA
gttaggatttgactgttaat

SEQ ID NO: 9069 - RNA, 20 nt, synthetic construct
  source 1..20: mol_type = other RNA
tctttgtacctctgttagga

SEQ ID NO: 9070 - RNA, 20 nt, synthetic construct
  source 1..20: mol_type = other RNA
ttttctattgtgtggaatag

SEQ ID NO: 9071 - RNA, 20 nt, synthetic construct
  source 1..20: mol_type = other RNA
taaaatgagttaggcaggag

SEQ ID NO: 9072 - RNA, 20 nt, synthetic construct
  source 1..20: mol_type = other RNA
tgcctaactcattttatgag

SEQ ID NO: 9073 - RNA, 20 nt, synthetic construct
  source 1..20: mol_type = other RNA
ttttatgaggccagcatcat

SEQ ID NO: 9074 - RNA, 20 nt, synthetic construct
  source 1..20: mol_type = other RNA
gccaggttttggtatcagaa

SEQ ID NO: 9075 - RNA, 20 nt, synthetic construct
  source 1..20: mol_type = other RNA
ataaaatactggcaaactga

SEQ ID NO: 9076 - RNA, 20 nt, synthetic construct
  source 1..20: mol_type = other RNA
atcaatacctagtttattaa

SEQ ID NO: 9077 - RNA, 20 nt, synthetic construct
  source 1..20: mol_type = other RNA
taataaactaggtattgatg

SEQ ID NO: 9078 - RNA, 20 nt, synthetic construct
  source 1..20: mol_type = other RNA
tattattttgagacatgctc

SEQ ID NO: 9079 - RNA, 20 nt, synthetic construct
  source 1..20: mol_type = other RNA
aaataataagagctacttat

SEQ ID NO: 9080 - RNA, 20 nt, synthetic construct
  source 1..20: mol_type = other RNA
ttcagtatgatattggctat

SEQ ID NO: 9081 - RNA, 20 nt, synthetic construct
  source 1..20: mol_type = other RNA
ctcaccactcctattcaaca

SEQ ID NO: 9082 - RNA, 20 nt, synthetic construct
  source 1..20: mol_type = other RNA
caccactcctattcaacata

SEQ ID NO: 9083 - RNA, 20 nt, synthetic construct
  source 1..20: mol_type = other RNA
ccactcctattcaacatagt

SEQ ID NO: 9084 - RNA, 20 nt, synthetic construct
  source 1..20: mol_type = other RNA
tattcaacatagtattggaa

SEQ ID NO: 9085 - RNA, 20 nt, synthetic construct
  source 1..20: mol_type = other RNA
tgcctgattgccctggacag

SEQ ID NO: 9086 - RNA, 20 nt, synthetic construct
  source 1..20: mol_type = other RNA
tcccacttgaatacctttat

SEQ ID NO: 9087 - RNA, 20 nt, synthetic construct
  source 1..20: mol_type = other RNA
cttcccacttgaataccttt

SEQ ID NO: 9088 - RNA, 20 nt, synthetic construct
  source 1..20: mol_type = other RNA
ctctcttcccacttgaatac

SEQ ID NO: 9089 - RNA, 20 nt, synthetic construct
  source 1..20: mol_type = other RNA
ttgcagatgacatgattgta

SEQ ID NO: 9090 - RNA, 20 nt, synthetic construct
  source 1..20: mol_type = other RNA
atcatctcagcccaaaatct

SEQ ID NO: 9091 - RNA, 20 nt, synthetic construct
  source 1..20: mol_type = other RNA
gcccaaaatctccttaagct

SEQ ID NO: 9092 - RNA, 20 nt, synthetic construct
  source 1..20: mol_type = other RNA
ttaagctgataagcaacttc

SEQ ID NO: 9093 - RNA, 20 nt, synthetic construct
  source 1..20: mol_type = other RNA
ggatacaaaatcaatgtgca

SEQ ID NO: 9094 - RNA, 20 nt, synthetic construct
  source 1..20: mol_type = other RNA
tattggtgtataggaatgct

SEQ ID NO: 9095 - RNA, 20 nt, synthetic construct
  source 1..20: mol_type = other RNA
gtgtctcttattggtgtata

SEQ ID NO: 9096 - RNA, 20 nt, synthetic construct
  source 1..20: mol_type = other RNA
ggatttggctctgtgtctct

SEQ ID NO: 9097 - RNA, 20 nt, synthetic construct
  source 1..20: mol_type = other RNA
ttgtagcaattgtgaatggg

SEQ ID NO: 9098 - RNA, 20 nt, synthetic construct
  source 1..20: mol_type = other RNA
ttgaagaggtccttcacatc

SEQ ID NO: 9099 - RNA, 20 nt, synthetic construct
  source 1..20: mol_type = other RNA
tcaaggagaactacaaacca

SEQ ID NO: 9100 - RNA, 20 nt, synthetic construct
  source 1..20: mol_type = other RNA
aggaaataagataggacaca

SEQ ID NO: 9101 - RNA, 20 nt, synthetic construct
  source 1..20: mol_type = other RNA
agctttgttctttttgctta

SEQ ID NO: 9102 - RNA, 20 nt, synthetic construct
  source 1..20: mol_type = other RNA
gttctgttctattggtctat

SEQ ID NO: 9103 - RNA, 20 nt, synthetic construct
  source 1..20: mol_type = other RNA
gaaataacaccacacatcta

SEQ ID NO: 9104 - RNA, 20 nt, synthetic construct
  source 1..20: mol_type = other RNA
agatagattaaagaattaaa

SEQ ID NO: 9105 - RNA, 20 nt, synthetic construct
  source 1..20: mol_type = other RNA
caaagtgtcttctagggttt

SEQ ID NO: 9106 - RNA, 20 nt, synthetic construct
  source 1..20: mol_type = other RNA
gcctcccaaagtgtcttcta

SEQ ID NO: 9107 - RNA, 20 nt, synthetic construct
  source 1..20: mol_type = other RNA
tgatccatccacctcggcct

SEQ ID NO: 9108 - RNA, 20 nt, synthetic construct
  source 1..20: mol_type = other RNA
tgacctcgtgatccatccac

SEQ ID NO: 9109 - RNA, 20 nt, synthetic construct
  source 1..20: mol_type = other RNA
atctcctgacctcgtgatcc

SEQ ID NO: 9110 - RNA, 20 nt, synthetic construct
  source 1..20: mol_type = other RNA
actaaaaatacaaaaaatta

SEQ ID NO: 9111 - RNA, 20 nt, synthetic construct
  source 1..20: mol_type = other RNA
caagtagctgggactacagg

SEQ ID NO: 9112 - RNA, 20 nt, synthetic construct
  source 1..20: mol_type = other RNA
gcctcccaagtagctgggac

SEQ ID NO: 9113 - RNA, 20 nt, synthetic construct
  source 1..20: mol_type = other RNA
tgcctcagcctcccaagtag

SEQ ID NO: 9114 - RNA, 20 nt, synthetic construct
  source 1..20: mol_type = other RNA
tgccattctcctgcctcagc

SEQ ID NO: 9115 - RNA, 20 nt, synthetic construct
  source 1..20: mol_type = other RNA
gctcatgccattctcctgcc

SEQ ID NO: 9116 - RNA, 20 nt, synthetic construct
  source 1..20: mol_type = other RNA
tcagctcatgccattctcct

SEQ ID NO: 9117 - RNA, 20 nt, synthetic construct
  source 1..20: mol_type = other RNA
acctcctcagctcatgccat

SEQ ID NO: 9118 - RNA, 20 nt, synthetic construct
  source 1..20: mol_type = other RNA
gttgcccaggctggagtgca

SEQ ID NO: 9119 - RNA, 20 nt, synthetic construct
  source 1..20: mol_type = other RNA
ctctgttgcccaggctggag

SEQ ID NO: 9120 - RNA, 20 nt, synthetic construct
  source 1..20: mol_type = other RNA
agcctgggcaacagagtgag

SEQ ID NO: 9121 - RNA, 20 nt, synthetic construct
  source 1..20: mol_type = other RNA
atcaaaaaaacaaaaacaaa

SEQ ID NO: 9122 - RNA, 20 nt, synthetic construct
  source 1..20: mol_type = other RNA
catgcctatgtcctgaatgg

SEQ ID NO: 9123 - RNA, 20 nt, synthetic construct
  source 1..20: mol_type = other RNA
ttattttaattagatctgat

SEQ ID NO: 9124 - RNA, 20 nt, synthetic construct
  source 1..20: mol_type = other RNA
gatgagagttttttgctgtg

SEQ ID NO: 9125 - RNA, 20 nt, synthetic construct
  source 1..20: mol_type = other RNA
catcagagtgaaaaagcaac

SEQ ID NO: 9126 - RNA, 20 nt, synthetic construct
  source 1..20: mol_type = other RNA
tcagagtgaaaaagcaacct

SEQ ID NO: 9127 - RNA, 20 nt, synthetic construct
  source 1..20: mol_type = other RNA
ataggttgctttttcactct

SEQ ID NO: 9128 - RNA, 20 nt, synthetic construct
  source 1..20: mol_type = other RNA
aattaacagtgatgatgagc

SEQ ID NO: 9129 - RNA, 20 nt, synthetic construct
  source 1..20: mol_type = other RNA
tcatcactgttaattagaga

SEQ ID NO: 9130 - RNA, 20 nt, synthetic construct
  source 1..20: mol_type = other RNA
ttgtggtttcgatttgcatt

SEQ ID NO: 9131 - RNA, 20 nt, synthetic construct
  source 1..20: mol_type = other RNA
tgcccgttagaatggcgatc

SEQ ID NO: 9132 - RNA, 20 nt, synthetic construct
  source 1..20: mol_type = other RNA
tcagcatctgttgtttcctg

SEQ ID NO: 9133 - RNA, 20 nt, synthetic construct
  source 1..20: mol_type = other RNA
acacatcctcttcagcatct

SEQ ID NO: 9134 - RNA, 20 nt, synthetic construct
  source 1..20: mol_type = other RNA
ttctccacacatcctcttca

SEQ ID NO: 9135 - RNA, 20 nt, synthetic construct
  source 1..20: mol_type = other RNA
caccaacagtgtaaatgtgt

SEQ ID NO: 9136 - RNA, 20 nt, synthetic construct
  source 1..20: mol_type = other RNA
aggatctagaaccagaagta

SEQ ID NO: 9137 - RNA, 20 nt, synthetic construct
  source 1..20: mol_type = other RNA
tcctgttttatggctgcata

SEQ ID NO: 9138 - RNA, 20 nt, synthetic construct
  source 1..20: mol_type = other RNA
gcaaactaacacaagaacag

SEQ ID NO: 9139 - RNA, 20 nt, synthetic construct
  source 1..20: mol_type = other RNA
cacttatgagtgagaacata

SEQ ID NO: 9140 - RNA, 20 nt, synthetic construct
  source 1..20: mol_type = other RNA
ctcataagtgtgagttgaac

SEQ ID NO: 9141 - RNA, 20 nt, synthetic construct
  source 1..20: mol_type = other RNA
ttgttcaactcacacttatg

SEQ ID NO: 9142 - RNA, 20 nt, synthetic construct
  source 1..20: mol_type = other RNA
taagtgtgagttgaacaatg

SEQ ID NO: 9143 - RNA, 20 nt, synthetic construct
  source 1..20: mol_type = other RNA
ccaacaggcccctgtgtgtg

SEQ ID NO: 9144 - RNA, 20 nt, synthetic construct
  source 1..20: mol_type = other RNA
actccccaacaggcccctgt

SEQ ID NO: 9145 - RNA, 20 nt, synthetic construct
  source 1..20: mol_type = other RNA
cctagcctcaactccccaac

SEQ ID NO: 9146 - RNA, 20 nt, synthetic construct
  source 1..20: mol_type = other RNA
taatccaatccctcccctag

SEQ ID NO: 9147 - RNA, 20 nt, synthetic construct
  source 1..20: mol_type = other RNA
gaacttaaagtataataata

SEQ ID NO: 9148 - RNA, 20 nt, synthetic construct
  source 1..20: mol_type = other RNA
tgaaggcagcagatggttgg

SEQ ID NO: 9149 - RNA, 20 nt, synthetic construct
  source 1..20: mol_type = other RNA
ccaaccatctgctgccttca

SEQ ID NO: 9150 - RNA, 20 nt, synthetic construct
  source 1..20: mol_type = other RNA
tttaagacataaggactcac

SEQ ID NO: 9151 - RNA, 20 nt, synthetic construct
  source 1..20: mol_type = other RNA
cataaacttaaagtaaatgg

SEQ ID NO: 9152 - RNA, 20 nt, synthetic construct
  source 1..20: mol_type = other RNA
acatcagtgacaccacttat

SEQ ID NO: 9153 - RNA, 20 nt, synthetic construct
  source 1..20: mol_type = other RNA
tatcatatgctggtggaaga

SEQ ID NO: 9154 - RNA, 20 nt, synthetic construct
  source 1..20: mol_type = other RNA
atcttacaaacctgcaattc

SEQ ID NO: 9155 - RNA, 20 nt, synthetic construct
  source 1..20: mol_type = other RNA
ttgtggacttactttttcat

SEQ ID NO: 9156 - RNA, 20 nt, synthetic construct
  source 1..20: mol_type = other RNA
tataaatattcatatagaac

SEQ ID NO: 9157 - RNA, 20 nt, synthetic construct
  source 1..20: mol_type = other RNA
gtgctgaatagtattcaagt

SEQ ID NO: 9158 - RNA, 20 nt, synthetic construct
  source 1..20: mol_type = other RNA
atccatgctatttaagatac

SEQ ID NO: 9159 - RNA, 20 nt, synthetic construct
  source 1..20: mol_type = other RNA
aaaatatactcaggaaagaa

SEQ ID NO: 9160 - RNA, 20 nt, synthetic construct
  source 1..20: mol_type = other RNA
ggaaagaagccatgtatatt

SEQ ID NO: 9161 - RNA, 20 nt, synthetic construct
  source 1..20: mol_type = other RNA
tacagaatatacatggcttc

SEQ ID NO: 9162 - RNA, 20 nt, synthetic construct
  source 1..20: mol_type = other RNA
tgtaaatgaactcatacaga

SEQ ID NO: 9163 - RNA, 20 nt, synthetic construct
  source 1..20: mol_type = other RNA
tttggaggaaatgtaaatga

SEQ ID NO: 9164 - RNA, 20 nt, synthetic construct
  source 1..20: mol_type = other RNA
aaaagaggaaaaactaattt

SEQ ID NO: 9165 - RNA, 20 nt, synthetic construct
  source 1..20: mol_type = other RNA
ggcagtggtaagggggtagc

SEQ ID NO: 9166 - RNA, 20 nt, synthetic construct
  source 1..20: mol_type = other RNA
tgagtccctacccaattaat

SEQ ID NO: 9167 - RNA, 20 nt, synthetic construct
  source 1..20: mol_type = other RNA
cttgagtccctacccaatta

SEQ ID NO: 9168 - RNA, 20 nt, synthetic construct
  source 1..20: mol_type = other RNA
agagagtttctggggtcaca

SEQ ID NO: 9169 - RNA, 20 nt, synthetic construct
  source 1..20: mol_type = other RNA
catcaccacacggaacattt

SEQ ID NO: 9170 - RNA, 20 nt, synthetic construct
  source 1..20: mol_type = other RNA
acaggtataggtgttgatcc

SEQ ID NO: 9171 - RNA, 20 nt, synthetic construct
  source 1..20: mol_type = other RNA
ctctgtgggaaagtatatct

SEQ ID NO: 9172 - RNA, 20 nt, synthetic construct
  source 1..20: mol_type = other RNA
gtgggaaagtatatctcaac

SEQ ID NO: 9173 - RNA, 20 nt, synthetic construct
  source 1..20: mol_type = other RNA
actgtaaaaagggcagaaat

SEQ ID NO: 9174 - RNA, 20 nt, synthetic construct
  source 1..20: mol_type = other RNA
gccttttagcacatccagtt

SEQ ID NO: 9175 - RNA, 20 nt, synthetic construct
  source 1..20: mol_type = other RNA
aagcaactggatgtgctaaa

SEQ ID NO: 9176 - RNA, 20 nt, synthetic construct
  source 1..20: mol_type = other RNA
agcctagacccccatttgag

SEQ ID NO: 9177 - RNA, 20 nt, synthetic construct
  source 1..20: mol_type = other RNA
aatgggggtctaggctggag

SEQ ID NO: 9178 - RNA, 20 nt, synthetic construct
  source 1..20: mol_type = other RNA
atgcctgtgacctagtctcc

SEQ ID NO: 9179 - RNA, 20 nt, synthetic construct
  source 1..20: mol_type = other RNA
aaactttcccatggcacata

SEQ ID NO: 9180 - RNA, 20 nt, synthetic construct
  source 1..20: mol_type = other RNA
gagaaaacctgaaacgtatt

SEQ ID NO: 9181 - RNA, 20 nt, synthetic construct
  source 1..20: mol_type = other RNA
ctgagaaaacctgaaacgta

SEQ ID NO: 9182 - RNA, 20 nt, synthetic construct
  source 1..20: mol_type = other RNA
gagagctgcaggttagtaat

SEQ ID NO: 9183 - RNA, 20 nt, synthetic construct
  source 1..20: mol_type = other RNA
gattactaacctgcagctct

SEQ ID NO: 9184 - RNA, 20 nt, synthetic construct
  source 1..20: mol_type = other RNA
taggaacgttgacccaactt

SEQ ID NO: 9185 - RNA, 20 nt, synthetic construct
  source 1..20: mol_type = other RNA
cattcatgcctcctaggaac

SEQ ID NO: 9186 - RNA, 20 nt, synthetic construct
  source 1..20: mol_type = other RNA
aagatccctccaccccaggg

SEQ ID NO: 9187 - RNA, 20 nt, synthetic construct
  source 1..20: mol_type = other RNA
accccagggtccttgctttc

SEQ ID NO: 9188 - RNA, 20 nt, synthetic construct
  source 1..20: mol_type = other RNA
tactccattgttttctgact

SEQ ID NO: 9189 - RNA, 20 nt, synthetic construct
  source 1..20: mol_type = other RNA
attgttttctgactcctctg

SEQ ID NO: 9190 - RNA, 20 nt, synthetic construct
  source 1..20: mol_type = other RNA
tctgtagccactcgacctct

SEQ ID NO: 9191 - RNA, 20 nt, synthetic construct
  source 1..20: mol_type = other RNA
gtagccactcgacctcttca

SEQ ID NO: 9192 - RNA, 20 nt, synthetic construct
  source 1..20: mol_type = other RNA
acctcttcagatcccattgt

SEQ ID NO: 9193 - RNA, 20 nt, synthetic construct
  source 1..20: mol_type = other RNA
tcagatcccattgtctaccc

SEQ ID NO: 9194 - RNA, 20 nt, synthetic construct
  source 1..20: mol_type = other RNA
gaaactgagggaatggagga

SEQ ID NO: 9195 - RNA, 20 nt, synthetic construct
  source 1..20: mol_type = other RNA
tcctccattccctcagtttc

SEQ ID NO: 9196 - RNA, 20 nt, synthetic construct
  source 1..20: mol_type = other RNA
attccctcagtttcggagtg

SEQ ID NO: 9197 - RNA, 20 nt, synthetic construct
  source 1..20: mol_type = other RNA
gtttcggagtggctgccgct

SEQ ID NO: 9198 - RNA, 20 nt, synthetic construct
  source 1..20: mol_type = other RNA
gctagcggcagccactccga

SEQ ID NO: 9199 - RNA, 20 nt, synthetic construct
  source 1..20: mol_type = other RNA
gtccatcctctgctagcggc

SEQ ID NO: 9200 - RNA, 20 nt, synthetic construct
  source 1..20: mol_type = other RNA
cagtccatcctctgctagcg

SEQ ID NO: 9201 - RNA, 20 nt, synthetic construct
  source 1..20: mol_type = other RNA
tgctctcagtccatcctctg

SEQ ID NO: 9202 - RNA, 20 nt, synthetic construct
  source 1..20: mol_type = other RNA
cctgctctcagtccatcctc

SEQ ID NO: 9203 - RNA, 20 nt, synthetic construct
  source 1..20: mol_type = other RNA
aggatgggttcctgggcagg

SEQ ID NO: 9204 - RNA, 20 nt, synthetic construct
  source 1..20: mol_type = other RNA
cagacaggatgccatttctc

SEQ ID NO: 9205 - RNA, 20 nt, synthetic construct
  source 1..20: mol_type = other RNA
acttttagagtgaaaagcaa

SEQ ID NO: 9206 - RNA, 20 nt, synthetic construct
  source 1..20: mol_type = other RNA
aaaagtagagccttttagct

SEQ ID NO: 9207 - RNA, 20 nt, synthetic construct
  source 1..20: mol_type = other RNA
cagtgtagctaaaaggctct

SEQ ID NO: 9208 - RNA, 20 nt, synthetic construct
  source 1..20: mol_type = other RNA
gcagtaacatgtaaattgta

SEQ ID NO: 9209 - RNA, 20 nt, synthetic construct
  source 1..20: mol_type = other RNA
aggactctgcagtaacatgt

SEQ ID NO: 9210 - RNA, 20 nt, synthetic construct
  source 1..20: mol_type = other RNA
ctaggactctgcagtaacat

SEQ ID NO: 9211 - RNA, 20 nt, synthetic construct
  source 1..20: mol_type = other RNA
ctctaggactctgcagtaac

SEQ ID NO: 9212 - RNA, 20 nt, synthetic construct
  source 1..20: mol_type = other RNA
gtgtctctctctaggactct

SEQ ID NO: 9213 - RNA, 20 nt, synthetic construct
  source 1..20: mol_type = other RNA
ttctctgtgtctctctctag

SEQ ID NO: 9214 - RNA, 20 nt, synthetic construct
  source 1..20: mol_type = other RNA
cacctgtaatcccagcactt

SEQ ID NO: 9215 - RNA, 20 nt, synthetic construct
  source 1..20: mol_type = other RNA
caaagtgctgggattacagg

SEQ ID NO: 9216 - RNA, 20 nt, synthetic construct
  source 1..20: mol_type = other RNA
gcctcccaaagtgctgggat

SEQ ID NO: 9217 - RNA, 20 nt, synthetic construct
  source 1..20: mol_type = other RNA
tgatccacccacctcggcct

SEQ ID NO: 9218 - RNA, 20 nt, synthetic construct
  source 1..20: mol_type = other RNA
tgacctcgtgatccacccac

SEQ ID NO: 9219 - RNA, 20 nt, synthetic construct
  source 1..20: mol_type = other RNA
atctcctgacctcgtgatcc

SEQ ID NO: 9220 - RNA, 20 nt, synthetic construct
  source 1..20: mol_type = other RNA
actaaaaatacaaaaaatta

SEQ ID NO: 9221 - RNA, 20 nt, synthetic construct
  source 1..20: mol_type = other RNA
tgagtagctgggactacagg

SEQ ID NO: 9222 - RNA, 20 nt, synthetic construct
  source 1..20: mol_type = other RNA
gtctcctgagtagctgggac

SEQ ID NO: 9223 - RNA, 20 nt, synthetic construct
  source 1..20: mol_type = other RNA
tgcctcagtctcctgagtag

SEQ ID NO: 9224 - RNA, 20 nt, synthetic construct
  source 1..20: mol_type = other RNA
ggagactgaggcaggagaat

SEQ ID NO: 9225 - RNA, 20 nt, synthetic construct
  source 1..20: mol_type = other RNA
tgggttcaagccattctcct

SEQ ID NO: 9226 - RNA, 20 nt, synthetic construct
  source 1..20: mol_type = other RNA
ctgcaaggtctgcctcctgg

SEQ ID NO: 9227 - RNA, 20 nt, synthetic construct
  source 1..20: mol_type = other RNA
gctcactgcaaggtctgcct

SEQ ID NO: 9228 - RNA, 20 nt, synthetic construct
  source 1..20: mol_type = other RNA
gtcgcccagactggagtgca

SEQ ID NO: 9229 - RNA, 20 nt, synthetic construct
  source 1..20: mol_type = other RNA
ctctgtcgcccagactggag

SEQ ID NO: 9230 - RNA, 20 nt, synthetic construct
  source 1..20: mol_type = other RNA
agtctgggcgacagagcgag

SEQ ID NO: 9231 - RNA, 20 nt, synthetic construct
  source 1..20: mol_type = other RNA
gtcacaaaaaaaaaaaaaaa

SEQ ID NO: 9232 - RNA, 20 nt, synthetic construct
  source 1..20: mol_type = other RNA
tcaaaatctatgtcatttat

SEQ ID NO: 9233 - RNA, 20 nt, synthetic construct
  source 1..20: mol_type = other RNA
agaataaatgacatagattt

SEQ ID NO: 9234 - RNA, 20 nt, synthetic construct
  source 1..20: mol_type = other RNA
ttctgccaactgcattcctc

SEQ ID NO: 9235 - RNA, 20 nt, synthetic construct
  source 1..20: mol_type = other RNA
gtttttttatggatcataga

SEQ ID NO: 9236 - RNA, 20 nt, synthetic construct
  source 1..20: mol_type = other RNA
agttctaaagaaccatgtaa

SEQ ID NO: 9237 - RNA, 20 nt, synthetic construct
  source 1..20: mol_type = other RNA
tgtgacctgtgttgttttgg

SEQ ID NO: 9238 - RNA, 20 nt, synthetic construct
  source 1..20: mol_type = other RNA
gtcaggccactgcaaattcc

SEQ ID NO: 9239 - RNA, 20 nt, synthetic construct
  source 1..20: mol_type = other RNA
cacacggatcggttgtgtaa

SEQ ID NO: 9240 - RNA, 20 nt, synthetic construct
  source 1..20: mol_type = other RNA
cacctcacacacggatcggt

SEQ ID NO: 9241 - RNA, 20 nt, synthetic construct
  source 1..20: mol_type = other RNA
aggacacctgattctgtttc

SEQ ID NO: 9242 - RNA, 20 nt, synthetic construct
  source 1..20: mol_type = other RNA
cactgttgttccagttccaa

SEQ ID NO: 9243 - RNA, 20 nt, synthetic construct
  source 1..20: mol_type = other RNA
atgcttggaactggaacaac

SEQ ID NO: 9244 - RNA, 20 nt, synthetic construct
  source 1..20: mol_type = other RNA
ttctgaagcaggtaagaagt

SEQ ID NO: 9245 - RNA, 20 nt, synthetic construct
  source 1..20: mol_type = other RNA
tttcatcccaatgttcaaat

SEQ ID NO: 9246 - RNA, 20 nt, synthetic construct
  source 1..20: mol_type = other RNA
agtttctgtgtagcatggaa

SEQ ID NO: 9247 - RNA, 20 nt, synthetic construct
  source 1..20: mol_type = other RNA
accagagagagtgctgaggc

SEQ ID NO: 9248 - RNA, 20 nt, synthetic construct
  source 1..20: mol_type = other RNA
gcactctctctggtggagca

SEQ ID NO: 9249 - RNA, 20 nt, synthetic construct
  source 1..20: mol_type = other RNA
ctctggtggagcaatttttg

SEQ ID NO: 9250 - RNA, 20 nt, synthetic construct
  source 1..20: mol_type = other RNA
ctggtggagcaatttttggc

SEQ ID NO: 9251 - RNA, 20 nt, synthetic construct
  source 1..20: mol_type = other RNA
ggtggagcaatttttggcgc

SEQ ID NO: 9252 - RNA, 20 nt, synthetic construct
  source 1..20: mol_type = other RNA
ctttgttatgaaaggggtta

SEQ ID NO: 9253 - RNA, 20 nt, synthetic construct
  source 1..20: mol_type = other RNA
gtgttccagacaaaattcca

SEQ ID NO: 9254 - RNA, 20 nt, synthetic construct
  source 1..20: mol_type = other RNA
ctagtgtgaaatttggcaca

SEQ ID NO: 9255 - RNA, 20 nt, synthetic construct
  source 1..20: mol_type = other RNA
gcaactgcaatgctgaagat

SEQ ID NO: 9256 - RNA, 20 nt, synthetic construct
  source 1..20: mol_type = other RNA
gcggccacatacctcagcaa

SEQ ID NO: 9257 - RNA, 20 nt, synthetic construct
  source 1..20: mol_type = other RNA
ggcttatttcagtcttaggt

SEQ ID NO: 9258 - RNA, 20 nt, synthetic construct
  source 1..20: mol_type = other RNA
gcacacctatgcttggaagg

SEQ ID NO: 9259 - RNA, 20 nt, synthetic construct
  source 1..20: mol_type = other RNA
tggaacgtgcatctttggtg

SEQ ID NO: 9260 - RNA, 20 nt, synthetic construct
  source 1..20: mol_type = other RNA
acacacaccaaagatgcacg

SEQ ID NO: 9261 - RNA, 20 nt, synthetic construct
  source 1..20: mol_type = other RNA
caacacacaccaaagatgca

SEQ ID NO: 9262 - RNA, 20 nt, synthetic construct
  source 1..20: mol_type = other RNA
tgttccagcatcctgcattg

SEQ ID NO: 9263 - RNA, 20 nt, synthetic construct
  source 1..20: mol_type = other RNA
actgtaagggaataagattt

SEQ ID NO: 9264 - RNA, 20 nt, synthetic construct
  source 1..20: mol_type = other RNA
atccttctctaagaagcaat

SEQ ID NO: 9265 - RNA, 20 nt, synthetic construct
  source 1..20: mol_type = other RNA
aagaagcaatgtgtctttgc

SEQ ID NO: 9266 - RNA, 20 nt, synthetic construct
  source 1..20: mol_type = other RNA
aagtactagatgcaggacca

SEQ ID NO: 9267 - RNA, 20 nt, synthetic construct
  source 1..20: mol_type = other RNA
tgaaaagccaaagccttaag

SEQ ID NO: 9268 - RNA, 20 nt, synthetic construct
  source 1..20: mol_type = other RNA
ttgttttcatgaacaaccag

SEQ ID NO: 9269 - RNA, 20 nt, synthetic construct
  source 1..20: mol_type = other RNA
actggttgttcatgaaaaca

SEQ ID NO: 9270 - RNA, 20 nt, synthetic construct
  source 1..20: mol_type = other RNA
ctactggttgttcatgaaaa

SEQ ID NO: 9271 - RNA, 20 nt, synthetic construct
  source 1..20: mol_type = other RNA
ttcgtatggctctctactgg

SEQ ID NO: 9272 - RNA, 20 nt, synthetic construct
  source 1..20: mol_type = other RNA
tgtgcaagctctttcgtatg

SEQ ID NO: 9273 - RNA, 20 nt, synthetic construct
  source 1..20: mol_type = other RNA
tacaattggaacaaagactc

SEQ ID NO: 9274 - RNA, 20 nt, synthetic construct
  source 1..20: mol_type = other RNA
caagcagaaggacatgctga

SEQ ID NO: 9275 - RNA, 20 nt, synthetic construct
  source 1..20: mol_type = other RNA
ttagtatactcacaagcaga

SEQ ID NO: 9276 - RNA, 20 nt, synthetic construct
  source 1..20: mol_type = other RNA
gttggtgctgaaaatagaca

SEQ ID NO: 9277 - RNA, 20 nt, synthetic construct
  source 1..20: mol_type = other RNA
ggccattaccatggtagcac

SEQ ID NO: 9278 - RNA, 20 nt, synthetic construct
  source 1..20: mol_type = other RNA
ataactctggccattaccat

SEQ ID NO: 9279 - RNA, 20 nt, synthetic construct
  source 1..20: mol_type = other RNA
accactgtcacaggaaggac

SEQ ID NO: 9280 - RNA, 20 nt, synthetic construct
  source 1..20: mol_type = other RNA
gatgccggtgtggtgtcatg

SEQ ID NO: 9281 - RNA, 20 nt, synthetic construct
  source 1..20: mol_type = other RNA
tttgggtagttttctggggt

SEQ ID NO: 9282 - RNA, 20 nt, synthetic construct
  source 1..20: mol_type = other RNA
tacaagtaacatcaaagaca

SEQ ID NO: 9283 - RNA, 20 nt, synthetic construct
  source 1..20: mol_type = other RNA
tcttacaagtaacatcaaag

SEQ ID NO: 9284 - RNA, 20 nt, synthetic construct
  source 1..20: mol_type = other RNA
tctaggaggaacttaagttg

SEQ ID NO: 9285 - RNA, 20 nt, synthetic construct
  source 1..20: mol_type = other RNA
tagaagagccttgcttcaag

SEQ ID NO: 9286 - RNA, 20 nt, synthetic construct
  source 1..20: mol_type = other RNA
ttgatcaaaagcaaagttgt

SEQ ID NO: 9287 - RNA, 20 nt, synthetic construct
  source 1..20: mol_type = other RNA
gactctttgatcaaaagcaa

SEQ ID NO: 9288 - RNA, 20 nt, synthetic construct
  source 1..20: mol_type = other RNA
cagactctttgatcaaaagc

SEQ ID NO: 9289 - RNA, 20 nt, synthetic construct
  source 1..20: mol_type = other RNA
atgtagccttctgcttccat

SEQ ID NO: 9290 - RNA, 20 nt, synthetic construct
  source 1..20: mol_type = other RNA
tcagctccatgtagccttct

SEQ ID NO: 9291 - RNA, 20 nt, synthetic construct
  source 1..20: mol_type = other RNA
tgagctttatattaaaaaga

SEQ ID NO: 9292 - RNA, 20 nt, synthetic construct
  source 1..20: mol_type = other RNA
agagatcaaatgatcaaata

SEQ ID NO: 9293 - RNA, 20 nt, synthetic construct
  source 1..20: mol_type = other RNA
aagtatttgatcatttgatc

SEQ ID NO: 9294 - RNA, 20 nt, synthetic construct
  source 1..20: mol_type = other RNA
taaaagatcaatgcactctt

SEQ ID NO: 9295 - RNA, 20 nt, synthetic construct
  source 1..20: mol_type = other RNA
ttcacccatgcaattctatc

SEQ ID NO: 9296 - RNA, 20 nt, synthetic construct
  source 1..20: mol_type = other RNA
cttctctgaaatgaaggctt

SEQ ID NO: 9297 - RNA, 20 nt, synthetic construct
  source 1..20: mol_type = other RNA
gaaatgaaggctttttgcca

SEQ ID NO: 9298 - RNA, 20 nt, synthetic construct
  source 1..20: mol_type = other RNA
tatacatgtgaattatttac

SEQ ID NO: 9299 - RNA, 20 nt, synthetic construct
  source 1..20: mol_type = other RNA
agttttctgaagggatatgg

SEQ ID NO: 9300 - RNA, 20 nt, synthetic construct
  source 1..20: mol_type = other RNA
tggcaacccatatcccttca

SEQ ID NO: 9301 - RNA, 20 nt, synthetic construct
  source 1..20: mol_type = other RNA
cctggcaacccatatccctt

SEQ ID NO: 9302 - RNA, 20 nt, synthetic construct
  source 1..20: mol_type = other RNA
tcctctcctggcaacccata

SEQ ID NO: 9303 - RNA, 20 nt, synthetic construct
  source 1..20: mol_type = other RNA
tctacattcttgcttttgct

SEQ ID NO: 9304 - RNA, 20 nt, synthetic construct
  source 1..20: mol_type = other RNA
atatctgtttacttcctaat

SEQ ID NO: 9305 - RNA, 20 nt, synthetic construct
  source 1..20: mol_type = other RNA
tgtccaacatgtggaaagtg

SEQ ID NO: 9306 - RNA, 20 nt, synthetic construct
  source 1..20: mol_type = other RNA
gtcctgtactgtctcttgtc

SEQ ID NO: 9307 - RNA, 20 nt, synthetic construct
  source 1..20: mol_type = other RNA
ttcatttccttttctaaatt

SEQ ID NO: 9308 - RNA, 20 nt, synthetic construct
  source 1..20: mol_type = other RNA
gtaactattatgactttctt

SEQ ID NO: 9309 - RNA, 20 nt, synthetic construct
  source 1..20: mol_type = other RNA
aggaagaaagtcataatagt

SEQ ID NO: 9310 - RNA, 20 nt, synthetic construct
  source 1..20: mol_type = other RNA
aattccttgcccttcagtcc

SEQ ID NO: 9311 - RNA, 20 nt, synthetic construct
  source 1..20: mol_type = other RNA
gttcagcaagactgctgtgg

SEQ ID NO: 9312 - RNA, 20 nt, synthetic construct
  source 1..20: mol_type = other RNA
ttcctcagttcagcaagact

SEQ ID NO: 9313 - RNA, 20 nt, synthetic construct
  source 1..20: mol_type = other RNA
agtctctttcctcagttcag

SEQ ID NO: 9314 - RNA, 20 nt, synthetic construct
  source 1..20: mol_type = other RNA
ttattacctagcatagaaaa

SEQ ID NO: 9315 - RNA, 20 nt, synthetic construct
  source 1..20: mol_type = other RNA
ttttcaccacaaattctttc

SEQ ID NO: 9316 - RNA, 20 nt, synthetic construct
  source 1..20: mol_type = other RNA
ctgtgcatatgcagtttata

SEQ ID NO: 9317 - RNA, 20 nt, synthetic construct
  source 1..20: mol_type = other RNA
gtcccactttgtagaatttc

SEQ ID NO: 9318 - RNA, 20 nt, synthetic construct
  source 1..20: mol_type = other RNA
ctgtttccctgaatttgtcc

SEQ ID NO: 9319 - RNA, 20 nt, synthetic construct
  source 1..20: mol_type = other RNA
ggcgtcaccattgagctcac

SEQ ID NO: 9320 - RNA, 20 nt, synthetic construct
  source 1..20: mol_type = other RNA
atggtgacgccagagctcac

SEQ ID NO: 9321 - RNA, 20 nt, synthetic construct
  source 1..20: mol_type = other RNA
cgtagcactgggggataccg

SEQ ID NO: 9322 - RNA, 20 nt, synthetic construct
  source 1..20: mol_type = other RNA
ggctgatcagaaccccggta

SEQ ID NO: 9323 - RNA, 20 nt, synthetic construct
  source 1..20: mol_type = other RNA
tcgggctgatcagaaccccg

SEQ ID NO: 9324 - RNA, 20 nt, synthetic construct
  source 1..20: mol_type = other RNA
cctcgggctgatcagaaccc

SEQ ID NO: 9325 - RNA, 20 nt, synthetic construct
  source 1..20: mol_type = other RNA
ttgaacatctcgggcattca

SEQ ID NO: 9326 - RNA, 20 nt, synthetic construct
  source 1..20: mol_type = other RNA
actgaatgcccgagatgttc

SEQ ID NO: 9327 - RNA, 20 nt, synthetic construct
  source 1..20: mol_type = other RNA
ggcattcagtagagacccca

SEQ ID NO: 9328 - RNA, 20 nt, synthetic construct
  source 1..20: mol_type = other RNA
taaagtatgacttttctggg

SEQ ID NO: 9329 - RNA, 20 nt, synthetic construct
  source 1..20: mol_type = other RNA
aagtaaattaactgcctgac

SEQ ID NO: 9330 - RNA, 20 nt, synthetic construct
  source 1..20: mol_type = other RNA
agtgatggttgagttttctt

SEQ ID NO: 9331 - RNA, 20 nt, synthetic construct
  source 1..20: mol_type = other RNA
accatcactggaggtaaata

SEQ ID NO: 9332 - RNA, 20 nt, synthetic construct
  source 1..20: mol_type = other RNA
ttgtgaatgcaacattacag

SEQ ID NO: 9333 - RNA, 20 nt, synthetic construct
  source 1..20: mol_type = other RNA
gtaatgttgcattcacaagg

SEQ ID NO: 9334 - RNA, 20 nt, synthetic construct
  source 1..20: mol_type = other RNA
taaatttttaaatgatgtca

SEQ ID NO: 9335 - RNA, 20 nt, synthetic construct
  source 1..20: mol_type = other RNA
tagttatggatcacactaat

SEQ ID NO: 9336 - RNA, 20 nt, synthetic construct
  source 1..20: mol_type = other RNA
tgttcatgttttctttaaat

SEQ ID NO: 9337 - RNA, 20 nt, synthetic construct
  source 1..20: mol_type = other RNA
ctggatggccttaatattag

SEQ ID NO: 9338 - RNA, 20 nt, synthetic construct
  source 1..20: mol_type = other RNA
atgaaagccatacaatctgt

SEQ ID NO: 9339 - RNA, 20 nt, synthetic construct
  source 1..20: mol_type = other RNA
gtgtgtgtgtgtgtgtgcgc

SEQ ID NO: 9340 - RNA, 20 nt, synthetic construct
  source 1..20: mol_type = other RNA
ctgtgtgtgtgtgtgtgtgc

SEQ ID NO: 9341 - RNA, 20 nt, synthetic construct
  source 1..20: mol_type = other RNA
ctctgtgtgtgtgtgtgtgt

SEQ ID NO: 9342 - RNA, 20 nt, synthetic construct
  source 1..20: mol_type = other RNA
ctctctgtgtgtgtgtgtgt

SEQ ID NO: 9343 - RNA, 20 nt, synthetic construct
  source 1..20: mol_type = other RNA
ctctctctgtgtgtgtgtgt

SEQ ID NO: 9344 - RNA, 20 nt, synthetic construct
  source 1..20: mol_type = other RNA
ctctctctctgtgtgtgtgt

SEQ ID NO: 9345 - RNA, 20 nt, synthetic construct
  source 1..20: mol_type = other RNA
ctctctctctctgtgtgtgt

SEQ ID NO: 9346 - RNA, 20 nt, synthetic construct
  source 1..20: mol_type = other RNA
ctctctctctctctgtgtgt

SEQ ID NO: 9347 - RNA, 20 nt, synthetic construct
  source 1..20: mol_type = other RNA
ttctctctctctctctctct

SEQ ID NO: 9348 - RNA, 20 nt, synthetic construct
  source 1..20: mol_type = other RNA
ctttctctctctctctctct

SEQ ID NO: 9349 - RNA, 20 nt, synthetic construct
  source 1..20: mol_type = other RNA
ctctttctctctctctctct

SEQ ID NO: 9350 - RNA, 20 nt, synthetic construct
  source 1..20: mol_type = other RNA
ctctctttctctctctctct

SEQ ID NO: 9351 - RNA, 20 nt, synthetic construct
  source 1..20: mol_type = other RNA
ctctctctttctctctctct

SEQ ID NO: 9352 - RNA, 20 nt, synthetic construct
  source 1..20: mol_type = other RNA
ttcccgtccttctgtgactt

SEQ ID NO: 9353 - RNA, 20 nt, synthetic construct
  source 1..20: mol_type = other RNA
aagcaatgatggctgaagac

SEQ ID NO: 9354 - RNA, 20 nt, synthetic construct
  source 1..20: mol_type = other RNA
cagtcaagaagctcaatgaa

SEQ ID NO: 9355 - RNA, 20 nt, synthetic construct
  source 1..20: mol_type = other RNA
atgaatcagaaatagtattt

SEQ ID NO: 9356 - RNA, 20 nt, synthetic construct
  source 1..20: mol_type = other RNA
atgatttacttgggtacatt

SEQ ID NO: 9357 - RNA, 20 nt, synthetic construct
  source 1..20: mol_type = other RNA
ggcttataagattatccttg

SEQ ID NO: 9358 - RNA, 20 nt, synthetic construct
  source 1..20: mol_type = other RNA
atgtaaatgatattgttttc

SEQ ID NO: 9359 - RNA, 20 nt, synthetic construct
  source 1..20: mol_type = other RNA
ttggaaacaatggcataaca

SEQ ID NO: 9360 - RNA, 20 nt, synthetic construct
  source 1..20: mol_type = other RNA
ttatcactttaaagatgtta

SEQ ID NO: 9361 - RNA, 20 nt, synthetic construct
  source 1..20: mol_type = other RNA
ggaggtggcagaatacgtat

SEQ ID NO: 9362 - RNA, 20 nt, synthetic construct
  source 1..20: mol_type = other RNA
agaggaaacaagcaaaaaaa

SEQ ID NO: 9363 - RNA, 20 nt, synthetic construct
  source 1..20: mol_type = other RNA
tcattacttagtatggatta

SEQ ID NO: 9364 - RNA, 20 nt, synthetic construct
  source 1..20: mol_type = other RNA
tatttatctaatttttaaat

SEQ ID NO: 9365 - RNA, 20 nt, synthetic construct
  source 1..20: mol_type = other RNA
ttaacagtatacttccagtt

SEQ ID NO: 9366 - RNA, 20 nt, synthetic construct
  source 1..20: mol_type = other RNA
gtttaaatttttttggttgt

SEQ ID NO: 9367 - RNA, 20 nt, synthetic construct
  source 1..20: mol_type = other RNA
cagtttaaatttttttggtt

SEQ ID NO: 9368 - RNA, 20 nt, synthetic construct
  source 1..20: mol_type = other RNA
tactatccattcctctcagt

SEQ ID NO: 9369 - RNA, 20 nt, synthetic construct
  source 1..20: mol_type = other RNA
ttttcttccttcttttgcat

SEQ ID NO: 9370 - RNA, 20 nt, synthetic construct
  source 1..20: mol_type = other RNA
taaggtagttcagtttgtgt

SEQ ID NO: 9371 - RNA, 20 nt, synthetic construct
  source 1..20: mol_type = other RNA
gccttttatttgtaatgctt

SEQ ID NO: 9372 - RNA, 20 nt, synthetic construct
  source 1..20: mol_type = other RNA
ttaagtgtaaagatctactt

SEQ ID NO: 9373 - RNA, 20 nt, synthetic construct
  source 1..20: mol_type = other RNA
agcttatttatgattcaggt

SEQ ID NO: 9374 - RNA, 20 nt, synthetic construct
  source 1..20: mol_type = other RNA
taaagactaataagtgaatg

SEQ ID NO: 9375 - RNA, 20 nt, synthetic construct
  source 1..20: mol_type = other RNA
atgtgcaaaaactttttctg

SEQ ID NO: 9376 - RNA, 20 nt, synthetic construct
  source 1..20: mol_type = other RNA
aggactatacaccttgcact

SEQ ID NO: 9377 - RNA, 20 nt, synthetic construct
  source 1..20: mol_type = other RNA
acattgttttctagtgcaag

SEQ ID NO: 9378 - RNA, 20 nt, synthetic construct
  source 1..20: mol_type = other RNA
atatcagttctcgtgaaatt

SEQ ID NO: 9379 - RNA, 20 nt, synthetic construct
  source 1..20: mol_type = other RNA
tgaaattgatctttggatga

SEQ ID NO: 9380 - RNA, 20 nt, synthetic construct
  source 1..20: mol_type = other RNA
aatttttttttccaaaaaag

SEQ ID NO: 9381 - RNA, 20 nt, synthetic construct
  source 1..20: mol_type = other RNA
tgcctgttaccccaacattt

SEQ ID NO: 9382 - RNA, 20 nt, synthetic construct
  source 1..20: mol_type = other RNA
caaaatgttggggtaacagg

SEQ ID NO: 9383 - RNA, 20 nt, synthetic construct
  source 1..20: mol_type = other RNA
gcctcccaaaatgttggggt

SEQ ID NO: 9384 - RNA, 20 nt, synthetic construct
  source 1..20: mol_type = other RNA
agactcagcctcccaaaatg

SEQ ID NO: 9385 - RNA, 20 nt, synthetic construct
  source 1..20: mol_type = other RNA
agccatcctccagactcagc

SEQ ID NO: 9386 - RNA, 20 nt, synthetic construct
  source 1..20: mol_type = other RNA
gttgctaaggctggtcttga

SEQ ID NO: 9387 - RNA, 20 nt, synthetic construct
  source 1..20: mol_type = other RNA
ctctgttgctaaggctggtc

SEQ ID NO: 9388 - RNA, 20 nt, synthetic construct
  source 1..20: mol_type = other RNA
ctctacaaaaaataaacaat

SEQ ID NO: 9389 - RNA, 20 nt, synthetic construct
  source 1..20: mol_type = other RNA
ctacaaaaaataaacaatta

SEQ ID NO: 9390 - RNA, 20 nt, synthetic construct
  source 1..20: mol_type = other RNA
acaaaaaataaacaattaga

SEQ ID NO: 9391 - RNA, 20 nt, synthetic construct
  source 1..20: mol_type = other RNA
gcattccgagtagctgaaac

SEQ ID NO: 9392 - RNA, 20 nt, synthetic construct
  source 1..20: mol_type = other RNA
cctcagcattccgagtagct

SEQ ID NO: 9393 - RNA, 20 nt, synthetic construct
  source 1..20: mol_type = other RNA
cacctcagcattccgagtag

SEQ ID NO: 9394 - RNA, 20 nt, synthetic construct
  source 1..20: mol_type = other RNA
gaatgctgaggtgagaggat

SEQ ID NO: 9395 - RNA, 20 nt, synthetic construct
  source 1..20: mol_type = other RNA
tgagtcaagcaatcctctca

SEQ ID NO: 9396 - RNA, 20 nt, synthetic construct
  source 1..20: mol_type = other RNA
tggctagacctcctgagtca

SEQ ID NO: 9397 - RNA, 20 nt, synthetic construct
  source 1..20: mol_type = other RNA
ctcatggctagacctcctga

SEQ ID NO: 9398 - RNA, 20 nt, synthetic construct
  source 1..20: mol_type = other RNA
ggaggtctagccatgagtga

SEQ ID NO: 9399 - RNA, 20 nt, synthetic construct
  source 1..20: mol_type = other RNA
gcattccagcctggatgatg

SEQ ID NO: 9400 - RNA, 20 nt, synthetic construct
  source 1..20: mol_type = other RNA
ttccatcatccaggctggaa

SEQ ID NO: 9401 - RNA, 20 nt, synthetic construct
  source 1..20: mol_type = other RNA
aaaaaaaaaaaaaaaaagga

SEQ ID NO: 9402 - RNA, 20 nt, synthetic construct
  source 1..20: mol_type = other RNA
attgaattgctttgccatct

SEQ ID NO: 9403 - RNA, 20 nt, synthetic construct
  source 1..20: mol_type = other RNA
aattattttgatatctcttc

SEQ ID NO: 9404 - RNA, 20 nt, synthetic construct
  source 1..20: mol_type = other RNA
gacacttaggtggaagagat

SEQ ID NO: 9405 - RNA, 20 nt, synthetic construct
  source 1..20: mol_type = other RNA
tccacctaagtgtcagagct

SEQ ID NO: 9406 - RNA, 20 nt, synthetic construct
  source 1..20: mol_type = other RNA
aaggttgtgaagattttata

SEQ ID NO: 9407 - RNA, 20 nt, synthetic construct
  source 1..20: mol_type = other RNA
aaaaagtttgccttctccaa

SEQ ID NO: 9408 - RNA, 20 nt, synthetic construct
  source 1..20: mol_type = other RNA
tgcctcaaaaaagtttgcct

SEQ ID NO: 9409 - RNA, 20 nt, synthetic construct
  source 1..20: mol_type = other RNA
ctataaaataaaacaaatta

SEQ ID NO: 9410 - RNA, 20 nt, synthetic construct
  source 1..20: mol_type = other RNA
tgcttaccaaaagtcattgt

SEQ ID NO: 9411 - RNA, 20 nt, synthetic construct
  source 1..20: mol_type = other RNA
tgtgttacttgcctatttat

SEQ ID NO: 9412 - RNA, 20 nt, synthetic construct
  source 1..20: mol_type = other RNA
ctgtccatatatctgacaaa

SEQ ID NO: 9413 - RNA, 20 nt, synthetic construct
  source 1..20: mol_type = other RNA
gtccatatatctgacaaatg

SEQ ID NO: 9414 - RNA, 20 nt, synthetic construct
  source 1..20: mol_type = other RNA
gtttagtgagtgggagaaat

SEQ ID NO: 9415 - RNA, 20 nt, synthetic construct
  source 1..20: mol_type = other RNA
cactcactaaacagaggaca

SEQ ID NO: 9416 - RNA, 20 nt, synthetic construct
  source 1..20: mol_type = other RNA
ctaaacagaggacaaacaac

SEQ ID NO: 9417 - RNA, 20 nt, synthetic construct
  source 1..20: mol_type = other RNA
ttatttttcatggctgagat

SEQ ID NO: 9418 - RNA, 20 nt, synthetic construct
  source 1..20: mol_type = other RNA
gccatgaaaaataaagagtt

SEQ ID NO: 9419 - RNA, 20 nt, synthetic construct
  source 1..20: mol_type = other RNA
tgatgattataactctttat

SEQ ID NO: 9420 - RNA, 20 nt, synthetic construct
  source 1..20: mol_type = other RNA
acatcagtgacatcagttac

SEQ ID NO: 9421 - RNA, 20 nt, synthetic construct
  source 1..20: mol_type = other RNA
ctcatatgctggtgaaagtg

SEQ ID NO: 9422 - RNA, 20 nt, synthetic construct
  source 1..20: mol_type = other RNA
catatgctggtgaaagtgca

SEQ ID NO: 9423 - RNA, 20 nt, synthetic construct
  source 1..20: mol_type = other RNA
tatgctggtgaaagtgcaaa

SEQ ID NO: 9424 - RNA, 20 nt, synthetic construct
  source 1..20: mol_type = other RNA
aaaagttcaataaatgcact

SEQ ID NO: 9425 - RNA, 20 nt, synthetic construct
  source 1..20: mol_type = other RNA
aagaatattcatagcagctt

SEQ ID NO: 9426 - RNA, 20 nt, synthetic construct
  source 1..20: mol_type = other RNA
cttttattgctgaacagtat

SEQ ID NO: 9427 - RNA, 20 nt, synthetic construct
  source 1..20: mol_type = other RNA
caaatagtatggaagatgct

SEQ ID NO: 9428 - RNA, 20 nt, synthetic construct
  source 1..20: mol_type = other RNA
aatagtatggaagatgctca

SEQ ID NO: 9429 - RNA, 20 nt, synthetic construct
  source 1..20: mol_type = other RNA
aaaatattacattaaagaaa

SEQ ID NO: 9430 - RNA, 20 nt, synthetic construct
  source 1..20: mol_type = other RNA
tacataatgttcatttttgt

SEQ ID NO: 9431 - RNA, 20 nt, synthetic construct
  source 1..20: mol_type = other RNA
tcccatggccagaggcaaat

SEQ ID NO: 9432 - RNA, 20 nt, synthetic construct
  source 1..20: mol_type = other RNA
cttcccatggccagaggcaa

SEQ ID NO: 9433 - RNA, 20 nt, synthetic construct
  source 1..20: mol_type = other RNA
gctactctcttcccatggcc

SEQ ID NO: 9434 - RNA, 20 nt, synthetic construct
  source 1..20: mol_type = other RNA
ggccatgggaagagagtagc

SEQ ID NO: 9435 - RNA, 20 nt, synthetic construct
  source 1..20: mol_type = other RNA
atcaatctctgctactctct

SEQ ID NO: 9436 - RNA, 20 nt, synthetic construct
  source 1..20: mol_type = other RNA
cacttcaatcacaatacagg

SEQ ID NO: 9437 - RNA, 20 nt, synthetic construct
  source 1..20: mol_type = other RNA
gttgaaaatagatcaataac

SEQ ID NO: 9438 - RNA, 20 nt, synthetic construct
  source 1..20: mol_type = other RNA
ctcatatactatacttgcta

SEQ ID NO: 9439 - RNA, 20 nt, synthetic construct
  source 1..20: mol_type = other RNA
tatactatacttgctaacac

SEQ ID NO: 9440 - RNA, 20 nt, synthetic construct
  source 1..20: mol_type = other RNA
aagcagctggctgtgttagc

SEQ ID NO: 9441 - RNA, 20 nt, synthetic construct
  source 1..20: mol_type = other RNA
attccagcaagctggttctc

SEQ ID NO: 9442 - RNA, 20 nt, synthetic construct
  source 1..20: mol_type = other RNA
agcccagattctccattcca

SEQ ID NO: 9443 - RNA, 20 nt, synthetic construct
  source 1..20: mol_type = other RNA
atacatgtgacccagtctca

SEQ ID NO: 9444 - RNA, 20 nt, synthetic construct
  source 1..20: mol_type = other RNA
gtagagactctatacatgtg

SEQ ID NO: 9445 - RNA, 20 nt, synthetic construct
  source 1..20: mol_type = other RNA
acagagacaatgttgcattc

SEQ ID NO: 9446 - RNA, 20 nt, synthetic construct
  source 1..20: mol_type = other RNA
gacagccacatgtcatgaat

SEQ ID NO: 9447 - RNA, 20 nt, synthetic construct
  source 1..20: mol_type = other RNA
cattcatgacatgtggctgt

SEQ ID NO: 9448 - RNA, 20 nt, synthetic construct
  source 1..20: mol_type = other RNA
gaatcctcacattcatgaca

SEQ ID NO: 9449 - RNA, 20 nt, synthetic construct
  source 1..20: mol_type = other RNA
cagaatcctcacattcatga

SEQ ID NO: 9450 - RNA, 20 nt, synthetic construct
  source 1..20: mol_type = other RNA
aacctctcagaatcctcaca

SEQ ID NO: 9451 - RNA, 20 nt, synthetic construct
  source 1..20: mol_type = other RNA
caggaatgttgctccaacct

SEQ ID NO: 9452 - RNA, 20 nt, synthetic construct
  source 1..20: mol_type = other RNA
ccttcgttcctcccaggaat

SEQ ID NO: 9453 - RNA, 20 nt, synthetic construct
  source 1..20: mol_type = other RNA
aagatcccccaccaccgggg

SEQ ID NO: 9454 - RNA, 20 nt, synthetic construct
  source 1..20: mol_type = other RNA
ccggctgtgctttttttttt

SEQ ID NO: 9455 - RNA, 20 nt, synthetic construct
  source 1..20: mol_type = other RNA
gtcaagaaaaaaaaaaaaaa

SEQ ID NO: 9456 - RNA, 20 nt, synthetic construct
  source 1..20: mol_type = other RNA
tgcctggcgacagagcgaga

SEQ ID NO: 9457 - RNA, 20 nt, synthetic construct
  source 1..20: mol_type = other RNA
ctctgtcgccaggcaggagt

SEQ ID NO: 9458 - RNA, 20 nt, synthetic construct
  source 1..20: mol_type = other RNA
gtcgccaggcaggagtgtaa

SEQ ID NO: 9459 - RNA, 20 nt, synthetic construct
  source 1..20: mol_type = other RNA
gctgattgcagcctccaact

SEQ ID NO: 9460 - RNA, 20 nt, synthetic construct
  source 1..20: mol_type = other RNA
tgaaccctggagttggaggc

SEQ ID NO: 9461 - RNA, 20 nt, synthetic construct
  source 1..20: mol_type = other RNA
aactccagggttcaagagat

SEQ ID NO: 9462 - RNA, 20 nt, synthetic construct
  source 1..20: mol_type = other RNA
agggttcaagagattctcct

SEQ ID NO: 9463 - RNA, 20 nt, synthetic construct
  source 1..20: mol_type = other RNA
tgaagctgaggcaggagaat

SEQ ID NO: 9464 - RNA, 20 nt, synthetic construct
  source 1..20: mol_type = other RNA
tgcctcagcttcatgagtag

SEQ ID NO: 9465 - RNA, 20 nt, synthetic construct
  source 1..20: mol_type = other RNA
gcttcatgagtagctgggac

SEQ ID NO: 9466 - RNA, 20 nt, synthetic construct
  source 1..20: mol_type = other RNA
actaaaaatacaaaaattag

SEQ ID NO: 9467 - RNA, 20 nt, synthetic construct
  source 1..20: mol_type = other RNA
ctctgttgacctcgtgatcc

SEQ ID NO: 9468 - RNA, 20 nt, synthetic construct
  source 1..20: mol_type = other RNA
gttgacctcgtgatccaccc

SEQ ID NO: 9469 - RNA, 20 nt, synthetic construct
  source 1..20: mol_type = other RNA
tgatccacccgccttggctt

SEQ ID NO: 9470 - RNA, 20 nt, synthetic construct
  source 1..20: mol_type = other RNA
cgcctgtaatcccagcactt

SEQ ID NO: 9471 - RNA, 20 nt, synthetic construct
  source 1..20: mol_type = other RNA
cacttactcaattgtttttc

SEQ ID NO: 9472 - RNA, 20 nt, synthetic construct
  source 1..20: mol_type = other RNA
cttactcaattgtttttctg

SEQ ID NO: 9473 - RNA, 20 nt, synthetic construct
  source 1..20: mol_type = other RNA
attgtttttctgaaccctcc

SEQ ID NO: 9474 - RNA, 20 nt, synthetic construct
  source 1..20: mol_type = other RNA
atagctggtggaccttttca

SEQ ID NO: 9475 - RNA, 20 nt, synthetic construct
  source 1..20: mol_type = other RNA
cactttatgccttgggtccc

SEQ ID NO: 9476 - RNA, 20 nt, synthetic construct
  source 1..20: mol_type = other RNA
ctttatgccttgggtcccac

SEQ ID NO: 9477 - RNA, 20 nt, synthetic construct
  source 1..20: mol_type = other RNA
tcccccttctgtcagtcccg

SEQ ID NO: 9478 - RNA, 20 nt, synthetic construct
  source 1..20: mol_type = other RNA
actggccacagccactgcgg

SEQ ID NO: 9479 - RNA, 20 nt, synthetic construct
  source 1..20: mol_type = other RNA
gtccatcctctactggccac

SEQ ID NO: 9480 - RNA, 20 nt, synthetic construct
  source 1..20: mol_type = other RNA
cagtccatcctctactggcc

SEQ ID NO: 9481 - RNA, 20 nt, synthetic construct
  source 1..20: mol_type = other RNA
tactctcagtccatcctcta

SEQ ID NO: 9482 - RNA, 20 nt, synthetic construct
  source 1..20: mol_type = other RNA
cctactctcagtccatcctc

SEQ ID NO: 9483 - RNA, 20 nt, synthetic construct
  source 1..20: mol_type = other RNA
tctcctactctcagtccatc

SEQ ID NO: 9484 - RNA, 20 nt, synthetic construct
  source 1..20: mol_type = other RNA
aggatgggttcctgggcaga

SEQ ID NO: 9485 - RNA, 20 nt, synthetic construct
  source 1..20: mol_type = other RNA
aactcacttgacccacctga

SEQ ID NO: 9486 - RNA, 20 nt, synthetic construct
  source 1..20: mol_type = other RNA
cttgacccacctgaagtggt

SEQ ID NO: 9487 - RNA, 20 nt, synthetic construct
  source 1..20: mol_type = other RNA
gcatttacagtgaaaaacaa

SEQ ID NO: 9488 - RNA, 20 nt, synthetic construct
  source 1..20: mol_type = other RNA
gtactagtcgtgtagctaaa

SEQ ID NO: 9489 - RNA, 20 nt, synthetic construct
  source 1..20: mol_type = other RNA
ctgtactagtcgtgtagcta

SEQ ID NO: 9490 - RNA, 20 nt, synthetic construct
  source 1..20: mol_type = other RNA
cttactctctgtactagtcg

SEQ ID NO: 9491 - RNA, 20 nt, synthetic construct
  source 1..20: mol_type = other RNA
aaggaggaaatgccatccaa

SEQ ID NO: 9492 - RNA, 20 nt, synthetic construct
  source 1..20: mol_type = other RNA
ttggagaaatatatgttagt

SEQ ID NO: 9493 - RNA, 20 nt, synthetic construct
  source 1..20: mol_type = other RNA
catgttactatacagtcctg

SEQ ID NO: 9494 - RNA, 20 nt, synthetic construct
  source 1..20: mol_type = other RNA
ttctacaggactgtatagta

SEQ ID NO: 9495 - RNA, 20 nt, synthetic construct
  source 1..20: mol_type = other RNA
gtatctctttctacaggact

SEQ ID NO: 9496 - RNA, 20 nt, synthetic construct
  source 1..20: mol_type = other RNA
ctgtatctctttctacagga

SEQ ID NO: 9497 - RNA, 20 nt, synthetic construct
  source 1..20: mol_type = other RNA
aggggtatgtgcttggcaga

SEQ ID NO: 9498 - RNA, 20 nt, synthetic construct
  source 1..20: mol_type = other RNA
ttctaccttctgccaagcac

SEQ ID NO: 9499 - RNA, 20 nt, synthetic construct
  source 1..20: mol_type = other RNA
atataaaaactgagatcata

SEQ ID NO: 9500 - RNA, 20 nt, synthetic construct
  source 1..20: mol_type = other RNA
gtttttatatggagcattga

SEQ ID NO: 9501 - RNA, 20 nt, synthetic construct
  source 1..20: mol_type = other RNA
tcttgacttgtaatctctat

SEQ ID NO: 9502 - RNA, 20 nt, synthetic construct
  source 1..20: mol_type = other RNA
ataatcctgataatccccat

SEQ ID NO: 9503 - RNA, 20 nt, synthetic construct
  source 1..20: mol_type = other RNA
acctggtcctgcccttgaca

SEQ ID NO: 9504 - RNA, 20 nt, synthetic construct
  source 1..20: mol_type = other RNA
ctgtcatgagaacagcctgg

SEQ ID NO: 9505 - RNA, 20 nt, synthetic construct
  source 1..20: mol_type = other RNA
caggctgttctcatgacagt

SEQ ID NO: 9506 - RNA, 20 nt, synthetic construct
  source 1..20: mol_type = other RNA
cactgtcatgagaacagcct

SEQ ID NO: 9507 - RNA, 20 nt, synthetic construct
  source 1..20: mol_type = other RNA
ctcactgtcatgagaacagc

SEQ ID NO: 9508 - RNA, 20 nt, synthetic construct
  source 1..20: mol_type = other RNA
ggagactctctcactgtcat

SEQ ID NO: 9509 - RNA, 20 nt, synthetic construct
  source 1..20: mol_type = other RNA
tgacagtgagagagtctcct

SEQ ID NO: 9510 - RNA, 20 nt, synthetic construct
  source 1..20: mol_type = other RNA
tgagatctgatggttttgta

SEQ ID NO: 9511 - RNA, 20 nt, synthetic construct
  source 1..20: mol_type = other RNA
gtcctgccgcctgtgaagaa

SEQ ID NO: 9512 - RNA, 20 nt, synthetic construct
  source 1..20: mol_type = other RNA
cttgccttctgccatgactg

SEQ ID NO: 9513 - RNA, 20 nt, synthetic construct
  source 1..20: mol_type = other RNA
ggaaatttacagtcatggca

SEQ ID NO: 9514 - RNA, 20 nt, synthetic construct
  source 1..20: mol_type = other RNA
cagttccacattgctgggga

SEQ ID NO: 9515 - RNA, 20 nt, synthetic construct
  source 1..20: mol_type = other RNA
ccagcaatgtggaactgtga

SEQ ID NO: 9516 - RNA, 20 nt, synthetic construct
  source 1..20: mol_type = other RNA
tttctttgtaacttacccag

SEQ ID NO: 9517 - RNA, 20 nt, synthetic construct
  source 1..20: mol_type = other RNA
cattgctatgaggaaatacc

SEQ ID NO: 9518 - RNA, 20 nt, synthetic construct
  source 1..20: mol_type = other RNA
ggtatttcctcatagcaatg

SEQ ID NO: 9519 - RNA, 20 nt, synthetic construct
  source 1..20: mol_type = other RNA
tagcaatgtgagaacgggct

SEQ ID NO: 9520 - RNA, 20 nt, synthetic construct
  source 1..20: mol_type = other RNA
acttcccatttgtgcatgcc

SEQ ID NO: 9521 - RNA, 20 nt, synthetic construct
  source 1..20: mol_type = other RNA
acattttgttctaacaaagt

SEQ ID NO: 9522 - RNA, 20 nt, synthetic construct
  source 1..20: mol_type = other RNA
tgtaacttgtattgctttgg

SEQ ID NO: 9523 - RNA, 20 nt, synthetic construct
  source 1..20: mol_type = other RNA
tccgactgtcatccaggttc

SEQ ID NO: 9524 - RNA, 20 nt, synthetic construct
  source 1..20: mol_type = other RNA
gactgtcatccaggttccaa

SEQ ID NO: 9525 - RNA, 20 nt, synthetic construct
  source 1..20: mol_type = other RNA
ttctgaacaaggtaagaagt

SEQ ID NO: 9526 - RNA, 20 nt, synthetic construct
  source 1..20: mol_type = other RNA
ctatgtgcttggacaacggg

SEQ ID NO: 9527 - RNA, 20 nt, synthetic construct
  source 1..20: mol_type = other RNA
atgtgcttggacaacgggat

SEQ ID NO: 9528 - RNA, 20 nt, synthetic construct
  source 1..20: mol_type = other RNA
cgtgtagcactaaaggcttc

SEQ ID NO: 9529 - RNA, 20 nt, synthetic construct
  source 1..20: mol_type = other RNA
agctcccgtgtagcactaaa

SEQ ID NO: 9530 - RNA, 20 nt, synthetic construct
  source 1..20: mol_type = other RNA
accaacactcgagctcccgt

SEQ ID NO: 9531 - RNA, 20 nt, synthetic construct
  source 1..20: mol_type = other RNA
agtgttggttgaggttctgc

SEQ ID NO: 9532 - RNA, 20 nt, synthetic construct
  source 1..20: mol_type = other RNA
ggctttcccagggacggcac

SEQ ID NO: 9533 - RNA, 20 nt, synthetic construct
  source 1..20: mol_type = other RNA
gtgccgtccctgggaaagcc

SEQ ID NO: 9534 - RNA, 20 nt, synthetic construct
  source 1..20: mol_type = other RNA
cacaagttgtgccaaaaatc

SEQ ID NO: 9535 - RNA, 20 nt, synthetic construct
  source 1..20: mol_type = other RNA
agggtgctcaacttaaccac

SEQ ID NO: 9536 - RNA, 20 nt, synthetic construct
  source 1..20: mol_type = other RNA
acttaaccactcaccttatt

SEQ ID NO: 9537 - RNA, 20 nt, synthetic construct
  source 1..20: mol_type = other RNA
ccttattctaaaatgggtta

SEQ ID NO: 9538 - RNA, 20 nt, synthetic construct
  source 1..20: mol_type = other RNA
ggagccacaacgctgaagac

SEQ ID NO: 9539 - RNA, 20 nt, synthetic construct
  source 1..20: mol_type = other RNA
tgagggatgtggcccctgat

SEQ ID NO: 9540 - RNA, 20 nt, synthetic construct
  source 1..20: mol_type = other RNA
aggacgacagaatcaggggc

SEQ ID NO: 9541 - RNA, 20 nt, synthetic construct
  source 1..20: mol_type = other RNA
tgggcagcccattcctggca

SEQ ID NO: 9542 - RNA, 20 nt, synthetic construct
  source 1..20: mol_type = other RNA
ttttccctttgctgacaaat

SEQ ID NO: 9543 - RNA, 20 nt, synthetic construct
  source 1..20: mol_type = other RNA
tctgtttgaaaagatttgtc

SEQ ID NO: 9544 - RNA, 20 nt, synthetic construct
  source 1..20: mol_type = other RNA
gcccctcttctgtttgaaaa

SEQ ID NO: 9545 - RNA, 20 nt, synthetic construct
  source 1..20: mol_type = other RNA
tgaagtctttccagtatttt

SEQ ID NO: 9546 - RNA, 20 nt, synthetic construct
  source 1..20: mol_type = other RNA
ggcctcttctcttttgacat

SEQ ID NO: 9547 - RNA, 20 nt, synthetic construct
  source 1..20: mol_type = other RNA
tctcttttgacatttcttta

SEQ ID NO: 9548 - RNA, 20 nt, synthetic construct
  source 1..20: mol_type = other RNA
tttgacatttctttactgtt

SEQ ID NO: 9549 - RNA, 20 nt, synthetic construct
  source 1..20: mol_type = other RNA
tttctagtgcttgtcctcta

SEQ ID NO: 9550 - RNA, 20 nt, synthetic construct
  source 1..20: mol_type = other RNA
aagccaggggtccccactcc

SEQ ID NO: 9551 - RNA, 20 nt, synthetic construct
  source 1..20: mol_type = other RNA
agtactggtactggtactgg

SEQ ID NO: 9552 - RNA, 20 nt, synthetic construct
  source 1..20: mol_type = other RNA
tgctgtgcagcccagttcct

SEQ ID NO: 9553 - RNA, 20 nt, synthetic construct
  source 1..20: mol_type = other RNA
cctcctgctgtgcagcccag

SEQ ID NO: 9554 - RNA, 20 nt, synthetic construct
  source 1..20: mol_type = other RNA
cccgaagctcacctcctgct

SEQ ID NO: 9555 - RNA, 20 nt, synthetic construct
  source 1..20: mol_type = other RNA
ggcagctatgagagtgatgg

SEQ ID NO: 9556 - RNA, 20 nt, synthetic construct
  source 1..20: mol_type = other RNA
catagctgcctgagctctgc

SEQ ID NO: 9557 - RNA, 20 nt, synthetic construct
  source 1..20: mol_type = other RNA
tagctgcctgagctctgcca

SEQ ID NO: 9558 - RNA, 20 nt, synthetic construct
  source 1..20: mol_type = other RNA
gatctgacagctggcagagc

SEQ ID NO: 9559 - RNA, 20 nt, synthetic construct
  source 1..20: mol_type = other RNA
gccagctgtcagatcagagg

SEQ ID NO: 9560 - RNA, 20 nt, synthetic construct
  source 1..20: mol_type = other RNA
catgtgcagttcacaatagg

SEQ ID NO: 9561 - RNA, 20 nt, synthetic construct
  source 1..20: mol_type = other RNA
taaggagcatgcaatctaga

SEQ ID NO: 9562 - RNA, 20 nt, synthetic construct
  source 1..20: mol_type = other RNA
ttatgagaatctaatgcctg

SEQ ID NO: 9563 - RNA, 20 nt, synthetic construct
  source 1..20: mol_type = other RNA
gggctcccactgattttacc

SEQ ID NO: 9564 - RNA, 20 nt, synthetic construct
  source 1..20: mol_type = other RNA
ccataaggtaaaatcagtgg

SEQ ID NO: 9565 - RNA, 20 nt, synthetic construct
  source 1..20: mol_type = other RNA
cactgattttaccttatggt

SEQ ID NO: 9566 - RNA, 20 nt, synthetic construct
  source 1..20: mol_type = other RNA
agtaccttccatttatcgtg

SEQ ID NO: 9567 - RNA, 20 nt, synthetic construct
  source 1..20: mol_type = other RNA
ccccaggtgcacagaaaaat

SEQ ID NO: 9568 - RNA, 20 nt, synthetic construct
  source 1..20: mol_type = other RNA
ggtgccaaaaaagttgggga

SEQ ID NO: 9569 - RNA, 20 nt, synthetic construct
  source 1..20: mol_type = other RNA
gactactagaacccagagca

SEQ ID NO: 9570 - RNA, 20 nt, synthetic construct
  source 1..20: mol_type = other RNA
gggttctagtagtcagagat

SEQ ID NO: 9571 - RNA, 20 nt, synthetic construct
  source 1..20: mol_type = other RNA
tagagggcatctctgactac

SEQ ID NO: 9572 - RNA, 20 nt, synthetic construct
  source 1..20: mol_type = other RNA
atgaggcttaagtcagattt

SEQ ID NO: 9573 - RNA, 20 nt, synthetic construct
  source 1..20: mol_type = other RNA
tggtgacctgatggcccatc

SEQ ID NO: 9574 - RNA, 20 nt, synthetic construct
  source 1..20: mol_type = other RNA
tgcattctctgtgatggttt

SEQ ID NO: 9575 - RNA, 20 nt, synthetic construct
  source 1..20: mol_type = other RNA
gtgatggtttactttggggc

SEQ ID NO: 9576 - RNA, 20 nt, synthetic construct
  source 1..20: mol_type = other RNA
gtcttccctattcataggcc

SEQ ID NO: 9577 - RNA, 20 nt, synthetic construct
  source 1..20: mol_type = other RNA
cacacccatgtaacataaca

SEQ ID NO: 9578 - RNA, 20 nt, synthetic construct
  source 1..20: mol_type = other RNA
cacccatgtaacataacact

SEQ ID NO: 9579 - RNA, 20 nt, synthetic construct
  source 1..20: mol_type = other RNA
caccagatatggggggattt

SEQ ID NO: 9580 - RNA, 20 nt, synthetic construct
  source 1..20: mol_type = other RNA
cttggggtgtgaggagaaat

SEQ ID NO: 9581 - RNA, 20 nt, synthetic construct
  source 1..20: mol_type = other RNA
tcacaccccaagcgagtctc

SEQ ID NO: 9582 - RNA, 20 nt, synthetic construct
  source 1..20: mol_type = other RNA
caccccaagcgagtctccag

SEQ ID NO: 9583 - RNA, 20 nt, synthetic construct
  source 1..20: mol_type = other RNA
agcagataccagctgggtgt

SEQ ID NO: 9584 - RNA, 20 nt, synthetic construct
  source 1..20: mol_type = other RNA
agatagagtgtcaggaccga

SEQ ID NO: 9585 - RNA, 20 nt, synthetic construct
  source 1..20: mol_type = other RNA
gtcctgacactctatctgga

SEQ ID NO: 9586 - RNA, 20 nt, synthetic construct
  source 1..20: mol_type = other RNA
atctggagacagtgtcagat

SEQ ID NO: 9587 - RNA, 20 nt, synthetic construct
  source 1..20: mol_type = other RNA
gtcctacaagactgccccac

SEQ ID NO: 9588 - RNA, 20 nt, synthetic construct
  source 1..20: mol_type = other RNA
agcaaagtaatcaaacccat

SEQ ID NO: 9589 - RNA, 20 nt, synthetic construct
  source 1..20: mol_type = other RNA
atgggtttgattactttgct

SEQ ID NO: 9590 - RNA, 20 nt, synthetic construct
  source 1..20: mol_type = other RNA
cagaactcagggaaacacgt

SEQ ID NO: 9591 - RNA, 20 nt, synthetic construct
  source 1..20: mol_type = other RNA
gggaaacacgttacttttat

SEQ ID NO: 9592 - RNA, 20 nt, synthetic construct
  source 1..20: mol_type = other RNA
tccacctggctgttcaccag

SEQ ID NO: 9593 - RNA, 20 nt, synthetic construct
  source 1..20: mol_type = other RNA
gagccccttcccacgtgcct

SEQ ID NO: 9594 - RNA, 20 nt, synthetic construct
  source 1..20: mol_type = other RNA
gagcctctatgccctctcca

SEQ ID NO: 9595 - RNA, 20 nt, synthetic construct
  source 1..20: mol_type = other RNA
atgccctctccagtgcacca

SEQ ID NO: 9596 - RNA, 20 nt, synthetic construct
  source 1..20: mol_type = other RNA
ccagtgcaccagtccccagt

SEQ ID NO: 9597 - RNA, 20 nt, synthetic construct
  source 1..20: mol_type = other RNA
agtgcaccagtccccagtac

SEQ ID NO: 9598 - RNA, 20 nt, synthetic construct
  source 1..20: mol_type = other RNA
ccaagtgcagtcttgttggg

SEQ ID NO: 9599 - RNA, 20 nt, synthetic construct
  source 1..20: mol_type = other RNA
aagtgcagtcttgttgggtt

SEQ ID NO: 9600 - RNA, 20 nt, synthetic construct
  source 1..20: mol_type = other RNA
ataaaaacccaacaagactg

SEQ ID NO: 9601 - RNA, 20 nt, synthetic construct
  source 1..20: mol_type = other RNA
gtaatgaagcctccataaaa

SEQ ID NO: 9602 - RNA, 20 nt, synthetic construct
  source 1..20: mol_type = other RNA
ccttcggcccctcttccctc

SEQ ID NO: 9603 - RNA, 20 nt, synthetic construct
  source 1..20: mol_type = other RNA
agggagggaagaggggccga

SEQ ID NO: 9604 - RNA, 20 nt, synthetic construct
  source 1..20: mol_type = other RNA
aacctccagggagggaagag

SEQ ID NO: 9605 - RNA, 20 nt, synthetic construct
  source 1..20: mol_type = other RNA
tccctccctggaggttggag

SEQ ID NO: 9606 - RNA, 20 nt, synthetic construct
  source 1..20: mol_type = other RNA
ctggaggttggagggtgggg

SEQ ID NO: 9607 - RNA, 20 nt, synthetic construct
  source 1..20: mol_type = other RNA
agtcacatggttggttccct

SEQ ID NO: 9608 - RNA, 20 nt, synthetic construct
  source 1..20: mol_type = other RNA
tggtgggttcctggatagcc

SEQ ID NO: 9609 - RNA, 20 nt, synthetic construct
  source 1..20: mol_type = other RNA
cttcacccaggaaactccaa

SEQ ID NO: 9610 - RNA, 20 nt, synthetic construct
  source 1..20: mol_type = other RNA
taaatcccttggagtttcct

SEQ ID NO: 9611 - RNA, 20 nt, synthetic construct
  source 1..20: mol_type = other RNA
aagggatttaggagctctgt

SEQ ID NO: 9612 - RNA, 20 nt, synthetic construct
  source 1..20: mol_type = other RNA
gccccccagttcttaacaca

SEQ ID NO: 9613 - RNA, 20 nt, synthetic construct
  source 1..20: mol_type = other RNA
gtgttaagaactggggggca

SEQ ID NO: 9614 - RNA, 20 nt, synthetic construct
  source 1..20: mol_type = other RNA
gcgccccagggacaaagctc

SEQ ID NO: 9615 - RNA, 20 nt, synthetic construct
  source 1..20: mol_type = other RNA
tcaatgatgtcccactgtcc

SEQ ID NO: 9616 - RNA, 20 nt, synthetic construct
  source 1..20: mol_type = other RNA
gaggacagtgggacatcatt

SEQ ID NO: 9617 - RNA, 20 nt, synthetic construct
  source 1..20: mol_type = other RNA
gaggctctagctctaagacc

SEQ ID NO: 9618 - RNA, 20 nt, synthetic construct
  source 1..20: mol_type = other RNA
agctctaagacctccagtgg

SEQ ID NO: 9619 - RNA, 20 nt, synthetic construct
  source 1..20: mol_type = other RNA
aagacctccagtgggtcaag

SEQ ID NO: 9620 - RNA, 20 nt, synthetic construct
  source 1..20: mol_type = other RNA
aggagcttgacccactggag

SEQ ID NO: 9621 - RNA, 20 nt, synthetic construct
  source 1..20: mol_type = other RNA
agtgggtcaagctcctggag

SEQ ID NO: 9622 - RNA, 20 nt, synthetic construct
  source 1..20: mol_type = other RNA
tggagaagtggcacattctc

SEQ ID NO: 9623 - RNA, 20 nt, synthetic construct
  source 1..20: mol_type = other RNA
aaagacccttcagggtcacc

SEQ ID NO: 9624 - RNA, 20 nt, synthetic construct
  source 1..20: mol_type = other RNA
taactccttttgactatgac

SEQ ID NO: 9625 - RNA, 20 nt, synthetic construct
  source 1..20: mol_type = other RNA
ttttgactatgactgatggc

SEQ ID NO: 9626 - RNA, 20 nt, synthetic construct
  source 1..20: mol_type = other RNA
cttttgtcttctaagaatag

SEQ ID NO: 9627 - RNA, 20 nt, synthetic construct
  source 1..20: mol_type = other RNA
cgtggagcaggagagggaga

SEQ ID NO: 9628 - RNA, 20 nt, synthetic construct
  source 1..20: mol_type = other RNA
ctctcctgctccacgtgagc

SEQ ID NO: 9629 - RNA, 20 nt, synthetic construct
  source 1..20: mol_type = other RNA
agctcacgtggagcaggaga

SEQ ID NO: 9630 - RNA, 20 nt, synthetic construct
  source 1..20: mol_type = other RNA
cctgctccacgtgagctgga

SEQ ID NO: 9631 - RNA, 20 nt, synthetic construct
  source 1..20: mol_type = other RNA
tgctccacgtgagctggagc

SEQ ID NO: 9632 - RNA, 20 nt, synthetic construct
  source 1..20: mol_type = other RNA
acgtgagctggagcttacat

SEQ ID NO: 9633 - RNA, 20 nt, synthetic construct
  source 1..20: mol_type = other RNA
ctgtggtaagttgccttctg

SEQ ID NO: 9634 - RNA, 20 nt, synthetic construct
  source 1..20: mol_type = other RNA
gtggtaagttgccttctgtt

SEQ ID NO: 9635 - RNA, 20 nt, synthetic construct
  source 1..20: mol_type = other RNA
aaagccattttctgtttttt

SEQ ID NO: 9636 - RNA, 20 nt, synthetic construct
  source 1..20: mol_type = other RNA
gctcaaaagccattttctgt

SEQ ID NO: 9637 - RNA, 20 nt, synthetic construct
  source 1..20: mol_type = other RNA
ccagaagcactcagctcaaa

SEQ ID NO: 9638 - RNA, 20 nt, synthetic construct
  source 1..20: mol_type = other RNA
tccccagaagcactcagctc

SEQ ID NO: 9639 - RNA, 20 nt, synthetic construct
  source 1..20: mol_type = other RNA
ggtggagagggcagccatct

SEQ ID NO: 9640 - RNA, 20 nt, synthetic construct
  source 1..20: mol_type = other RNA
ccaccagagcctgcttttca

SEQ ID NO: 9641 - RNA, 20 nt, synthetic construct
  source 1..20: mol_type = other RNA
accagagcctgcttttcatc

SEQ ID NO: 9642 - RNA, 20 nt, synthetic construct
  source 1..20: mol_type = other RNA
caccacacacacataaataa

SEQ ID NO: 9643 - RNA, 20 nt, synthetic construct
  source 1..20: mol_type = other RNA
aagtttgccctttgggaatt

SEQ ID NO: 9644 - RNA, 20 nt, synthetic construct
  source 1..20: mol_type = other RNA
aaatttgtttttcatgcatc

SEQ ID NO: 9645 - RNA, 20 nt, synthetic construct
  source 1..20: mol_type = other RNA
gctgcagaagaggacagttt

SEQ ID NO: 9646 - RNA, 20 nt, synthetic construct
  source 1..20: mol_type = other RNA
tctgcagctgagaagaaaaa

SEQ ID NO: 9647 - RNA, 20 nt, synthetic construct
  source 1..20: mol_type = other RNA
tattttttttttcttctcag

SEQ ID NO: 9648 - RNA, 20 nt, synthetic construct
  source 1..20: mol_type = other RNA
gatggccatcctaggaaatc

SEQ ID NO: 9649 - RNA, 20 nt, synthetic construct
  source 1..20: mol_type = other RNA
ttagccccagatggcctttc

SEQ ID NO: 9650 - RNA, 20 nt, synthetic construct
  source 1..20: mol_type = other RNA
tgagtagtaatcttacgaga

SEQ ID NO: 9651 - RNA, 20 nt, synthetic construct
  source 1..20: mol_type = other RNA
taagattactactcatgagt

SEQ ID NO: 9652 - RNA, 20 nt, synthetic construct
  source 1..20: mol_type = other RNA
tgagtcccattagcgacatt

SEQ ID NO: 9653 - RNA, 20 nt, synthetic construct
  source 1..20: mol_type = other RNA
aagcaatgtcgctaatggga

SEQ ID NO: 9654 - RNA, 20 nt, synthetic construct
  source 1..20: mol_type = other RNA
gagcaatgaggaaggaacct

SEQ ID NO: 9655 - RNA, 20 nt, synthetic construct
  source 1..20: mol_type = other RNA
caataagagtctcagagcaa

SEQ ID NO: 9656 - RNA, 20 nt, synthetic construct
  source 1..20: mol_type = other RNA
ttgctctgagactcttattg

SEQ ID NO: 9657 - RNA, 20 nt, synthetic construct
  source 1..20: mol_type = other RNA
tactcccaataagagtctca

SEQ ID NO: 9658 - RNA, 20 nt, synthetic construct
  source 1..20: mol_type = other RNA
gagactcttattgggagtat

SEQ ID NO: 9659 - RNA, 20 nt, synthetic construct
  source 1..20: mol_type = other RNA
tattgggagtatgaggcttg

SEQ ID NO: 9660 - RNA, 20 nt, synthetic construct
  source 1..20: mol_type = other RNA
gacagacaagttgattggtc

SEQ ID NO: 9661 - RNA, 20 nt, synthetic construct
  source 1..20: mol_type = other RNA
aggtcccttcacatggcaga

SEQ ID NO: 9662 - RNA, 20 nt, synthetic construct
  source 1..20: mol_type = other RNA
aagtccactgaagaccagca

SEQ ID NO: 9663 - RNA, 20 nt, synthetic construct
  source 1..20: mol_type = other RNA
ggatgctggtcttcagtgga

SEQ ID NO: 9664 - RNA, 20 nt, synthetic construct
  source 1..20: mol_type = other RNA
ccaggcaatctcaggatgct

SEQ ID NO: 9665 - RNA, 20 nt, synthetic construct
  source 1..20: mol_type = other RNA
catgatcttcatcactgccc

SEQ ID NO: 9666 - RNA, 20 nt, synthetic construct
  source 1..20: mol_type = other RNA
ccaggagtggcccaaatgtg

SEQ ID NO: 9667 - RNA, 20 nt, synthetic construct
  source 1..20: mol_type = other RNA
ccccaggagtggcccaaatg

SEQ ID NO: 9668 - RNA, 20 nt, synthetic construct
  source 1..20: mol_type = other RNA
tgctctccccaggagtggcc

SEQ ID NO: 9669 - RNA, 20 nt, synthetic construct
  source 1..20: mol_type = other RNA
tggggagagcaagagggaag

SEQ ID NO: 9670 - RNA, 20 nt, synthetic construct
  source 1..20: mol_type = other RNA
ttcttccctcttgctctccc

SEQ ID NO: 9671 - RNA, 20 nt, synthetic construct
  source 1..20: mol_type = other RNA
ccttcttccctcttgctctc

SEQ ID NO: 9672 - RNA, 20 nt, synthetic construct
  source 1..20: mol_type = other RNA
cactaaatccagagaccaca

SEQ ID NO: 9673 - RNA, 20 nt, synthetic construct
  source 1..20: mol_type = other RNA
ggatttagtgtgagttgata

SEQ ID NO: 9674 - RNA, 20 nt, synthetic construct
  source 1..20: mol_type = other RNA
agaaaaaagtcagctatcaa

SEQ ID NO: 9675 - RNA, 20 nt, synthetic construct
  source 1..20: mol_type = other RNA
agtgggtgcttttgttctat

SEQ ID NO: 9676 - RNA, 20 nt, synthetic construct
  source 1..20: mol_type = other RNA
acctcaaagtctcttgatgg

SEQ ID NO: 9677 - RNA, 20 nt, synthetic construct
  source 1..20: mol_type = other RNA
aagtctcttgatggggtcag

SEQ ID NO: 9678 - RNA, 20 nt, synthetic construct
  source 1..20: mol_type = other RNA
tgatggggtcagttccagtt

SEQ ID NO: 9679 - RNA, 20 nt, synthetic construct
  source 1..20: mol_type = other RNA
gcttctggccccatctagta

SEQ ID NO: 9680 - RNA, 20 nt, synthetic construct
  source 1..20: mol_type = other RNA
cactgcctgggctctctatc

SEQ ID NO: 9681 - RNA, 20 nt, synthetic construct
  source 1..20: mol_type = other RNA
ctgcctgggctctctatcct

SEQ ID NO: 9682 - RNA, 20 nt, synthetic construct
  source 1..20: mol_type = other RNA
ctatccttgacaggctgcct

SEQ ID NO: 9683 - RNA, 20 nt, synthetic construct
  source 1..20: mol_type = other RNA
atccttgacaggctgccttg

SEQ ID NO: 9684 - RNA, 20 nt, synthetic construct
  source 1..20: mol_type = other RNA
aacacccacagtagtgcctg

SEQ ID NO: 9685 - RNA, 20 nt, synthetic construct
  source 1..20: mol_type = other RNA
tgcacctttgactcccatgg

SEQ ID NO: 9686 - RNA, 20 nt, synthetic construct
  source 1..20: mol_type = other RNA
catggaagggaagtgcagta

SEQ ID NO: 9687 - RNA, 20 nt, synthetic construct
  source 1..20: mol_type = other RNA
atgtgggtgaggacagcaga

SEQ ID NO: 9688 - RNA, 20 nt, synthetic construct
  source 1..20: mol_type = other RNA
tacatcctcaatgtgggtga

SEQ ID NO: 9689 - RNA, 20 nt, synthetic construct
  source 1..20: mol_type = other RNA
cccacattgaggatgtatga

SEQ ID NO: 9690 - RNA, 20 nt, synthetic construct
  source 1..20: mol_type = other RNA
aagaacctgattctcataca

SEQ ID NO: 9691 - RNA, 20 nt, synthetic construct
  source 1..20: mol_type = other RNA
aatctctaagaacctgattc

SEQ ID NO: 9692 - RNA, 20 nt, synthetic construct
  source 1..20: mol_type = other RNA
cagtccattggaagaaatct

SEQ ID NO: 9693 - RNA, 20 nt, synthetic construct
  source 1..20: mol_type = other RNA
cttgtcttacatcaaagtaa

SEQ ID NO: 9694 - RNA, 20 nt, synthetic construct
  source 1..20: mol_type = other RNA
ccaggcttggggttaacctc

SEQ ID NO: 9695 - RNA, 20 nt, synthetic construct
  source 1..20: mol_type = other RNA
tcaccaggcttggggttaac

SEQ ID NO: 9696 - RNA, 20 nt, synthetic construct
  source 1..20: mol_type = other RNA
ggatttccaagtgtctgatg

SEQ ID NO: 9697 - RNA, 20 nt, synthetic construct
  source 1..20: mol_type = other RNA
atcatgagtcaaacctgaat

SEQ ID NO: 9698 - RNA, 20 nt, synthetic construct
  source 1..20: mol_type = other RNA
aactttctcaatcatgagtc

SEQ ID NO: 9699 - RNA, 20 nt, synthetic construct
  source 1..20: mol_type = other RNA
tgattgagaaagttagagcc

SEQ ID NO: 9700 - RNA, 20 nt, synthetic construct
  source 1..20: mol_type = other RNA
aaccagaggctctaactttc

SEQ ID NO: 9701 - RNA, 20 nt, synthetic construct
  source 1..20: mol_type = other RNA
ttctccaaccagaggctcta

SEQ ID NO: 9702 - RNA, 20 nt, synthetic construct
  source 1..20: mol_type = other RNA
ggttggagaaagagtttaat

SEQ ID NO: 9703 - RNA, 20 nt, synthetic construct
  source 1..20: mol_type = other RNA
tactattcaaaataaaactg

SEQ ID NO: 9704 - RNA, 20 nt, synthetic construct
  source 1..20: mol_type = other RNA
tttagtacaatgatgcatgt

SEQ ID NO: 9705 - RNA, 20 nt, synthetic construct
  source 1..20: mol_type = other RNA
atttctgctagtatgcctta

SEQ ID NO: 9706 - RNA, 20 nt, synthetic construct
  source 1..20: mol_type = other RNA
gcactagaaaagatgattgc

SEQ ID NO: 9707 - RNA, 20 nt, synthetic construct
  source 1..20: mol_type = other RNA
aaacaacccacagcaaatga

SEQ ID NO: 9708 - RNA, 20 nt, synthetic construct
  source 1..20: mol_type = other RNA
agtgaatctggaacctgagt

SEQ ID NO: 9709 - RNA, 20 nt, synthetic construct
  source 1..20: mol_type = other RNA
ggttccagattcactggagt

SEQ ID NO: 9710 - RNA, 20 nt, synthetic construct
  source 1..20: mol_type = other RNA
ccaaccaaccagagattcta

SEQ ID NO: 9711 - RNA, 20 nt, synthetic construct
  source 1..20: mol_type = other RNA
ggttggttggggaggaattt

SEQ ID NO: 9712 - RNA, 20 nt, synthetic construct
  source 1..20: mol_type = other RNA
tgcagttgttattaataatt

SEQ ID NO: 9713 - RNA, 20 nt, synthetic construct
  source 1..20: mol_type = other RNA
agcccttcaaggtcttcaaa

SEQ ID NO: 9714 - RNA, 20 nt, synthetic construct
  source 1..20: mol_type = other RNA
gttgtctccagcccttcaag

SEQ ID NO: 9715 - RNA, 20 nt, synthetic construct
  source 1..20: mol_type = other RNA
gtagcccctgcactgttgta

SEQ ID NO: 9716 - RNA, 20 nt, synthetic construct
  source 1..20: mol_type = other RNA
ggaggtagggaaagtgtccc

SEQ ID NO: 9717 - RNA, 20 nt, synthetic construct
  source 1..20: mol_type = other RNA
agagaccttgtgggcttgct

SEQ ID NO: 9718 - RNA, 20 nt, synthetic construct
  source 1..20: mol_type = other RNA
gcagcaagcccacaaggtct

SEQ ID NO: 9719 - RNA, 20 nt, synthetic construct
  source 1..20: mol_type = other RNA
ctgcagcaagcccacaaggt

SEQ ID NO: 9720 - RNA, 20 nt, synthetic construct
  source 1..20: mol_type = other RNA
ctgccttctctctgcagcaa

SEQ ID NO: 9721 - RNA, 20 nt, synthetic construct
  source 1..20: mol_type = other RNA
tccctgccttctctctgcag

SEQ ID NO: 9722 - RNA, 20 nt, synthetic construct
  source 1..20: mol_type = other RNA
attcttcttttcctcctccc

SEQ ID NO: 9723 - RNA, 20 nt, synthetic construct
  source 1..20: mol_type = other RNA
catgactaactgactgctgt

SEQ ID NO: 9724 - RNA, 20 nt, synthetic construct
  source 1..20: mol_type = other RNA
ccagaagaactgtcctgaag

SEQ ID NO: 9725 - RNA, 20 nt, synthetic construct
  source 1..20: mol_type = other RNA
gccagcttcaggacagttct

SEQ ID NO: 9726 - RNA, 20 nt, synthetic construct
  source 1..20: mol_type = other RNA
cagccagcttcaggacagtt

SEQ ID NO: 9727 - RNA, 20 nt, synthetic construct
  source 1..20: mol_type = other RNA
gtgtgtggacatatgtgcat

SEQ ID NO: 9728 - RNA, 20 nt, synthetic construct
  source 1..20: mol_type = other RNA
catgcaaaagaatcctttgt

SEQ ID NO: 9729 - RNA, 20 nt, synthetic construct
  source 1..20: mol_type = other RNA
tttcaaggaaatataagttc

SEQ ID NO: 9730 - RNA, 20 nt, synthetic construct
  source 1..20: mol_type = other RNA
cctttcaaggaaatataagt

SEQ ID NO: 9731 - RNA, 20 nt, synthetic construct
  source 1..20: mol_type = other RNA
ttagatttttctttctaagt

SEQ ID NO: 9732 - RNA, 20 nt, synthetic construct
  source 1..20: mol_type = other RNA
aaggtgaaattaaatggtaa

SEQ ID NO: 9733 - RNA, 20 nt, synthetic construct
  source 1..20: mol_type = other RNA
aatgcgacttcttttcccac

SEQ ID NO: 9734 - RNA, 20 nt, synthetic construct
  source 1..20: mol_type = other RNA
tcatttgattgtgggaagcc

SEQ ID NO: 9735 - RNA, 20 nt, synthetic construct
  source 1..20: mol_type = other RNA
acttgaggcttcccacaatc

SEQ ID NO: 9736 - RNA, 20 nt, synthetic construct
  source 1..20: mol_type = other RNA
agtggagccgaagaaatgtc

SEQ ID NO: 9737 - RNA, 20 nt, synthetic construct
  source 1..20: mol_type = other RNA
gaacaaggtaagaacaggcc

SEQ ID NO: 9738 - RNA, 20 nt, synthetic construct
  source 1..20: mol_type = other RNA
ttcagaaaacagagaggcag

SEQ ID NO: 9739 - RNA, 20 nt, synthetic construct
  source 1..20: mol_type = other RNA
ctgttttctgaaggaggaaa

SEQ ID NO: 9740 - RNA, 20 nt, synthetic construct
  source 1..20: mol_type = other RNA
gttttctgaaggaggaaaaa

SEQ ID NO: 9741 - RNA, 20 nt, synthetic construct
  source 1..20: mol_type = other RNA
acttggaaaatagccaaaat

SEQ ID NO: 9742 - RNA, 20 nt, synthetic construct
  source 1..20: mol_type = other RNA
gagcatcttcaatattttcc

SEQ ID NO: 9743 - RNA, 20 nt, synthetic construct
  source 1..20: mol_type = other RNA
gagggtttctatggatatcc

SEQ ID NO: 9744 - RNA, 20 nt, synthetic construct
  source 1..20: mol_type = other RNA
ctgtcagatgaaaagaaagg

SEQ ID NO: 9745 - RNA, 20 nt, synthetic construct
  source 1..20: mol_type = other RNA
ctgcaaagtgtcacatttct

SEQ ID NO: 9746 - RNA, 20 nt, synthetic construct
  source 1..20: mol_type = other RNA
ctcactgcaaagtgtcacat

SEQ ID NO: 9747 - RNA, 20 nt, synthetic construct
  source 1..20: mol_type = other RNA
tgtcctccctcactgcaaag

SEQ ID NO: 9748 - RNA, 20 nt, synthetic construct
  source 1..20: mol_type = other RNA
gcattgaattcaatgattca

SEQ ID NO: 9749 - RNA, 20 nt, synthetic construct
  source 1..20: mol_type = other RNA
tcatttatggggatcacaac

SEQ ID NO: 9750 - RNA, 20 nt, synthetic construct
  source 1..20: mol_type = other RNA
taggaagaacacataggaca

SEQ ID NO: 9751 - RNA, 20 nt, synthetic construct
  source 1..20: mol_type = other RNA
tctcctttctacaccagggc

SEQ ID NO: 9752 - RNA, 20 nt, synthetic construct
  source 1..20: mol_type = other RNA
tttctacaccagggcacctg

SEQ ID NO: 9753 - RNA, 20 nt, synthetic construct
  source 1..20: mol_type = other RNA
ttagaggagaacagcaattg

SEQ ID NO: 9754 - RNA, 20 nt, synthetic construct
  source 1..20: mol_type = other RNA
attgctgttctcctctaaag

SEQ ID NO: 9755 - RNA, 20 nt, synthetic construct
  source 1..20: mol_type = other RNA
tctaaagagacttccttctg

SEQ ID NO: 9756 - RNA, 20 nt, synthetic construct
  source 1..20: mol_type = other RNA
aaagagacttccttctgtaa

SEQ ID NO: 9757 - RNA, 20 nt, synthetic construct
  source 1..20: mol_type = other RNA
acagcagagtgaaatgcgat

SEQ ID NO: 9758 - RNA, 20 nt, synthetic construct
  source 1..20: mol_type = other RNA
gctgttgagttgatttttct

SEQ ID NO: 9759 - RNA, 20 nt, synthetic construct
  source 1..20: mol_type = other RNA
gtagagcaagaagttacaaa

SEQ ID NO: 9760 - RNA, 20 nt, synthetic construct
  source 1..20: mol_type = other RNA
acagagctttcaccttccac

SEQ ID NO: 9761 - RNA, 20 nt, synthetic construct
  source 1..20: mol_type = other RNA
ctgactatcaacatactgcc

SEQ ID NO: 9762 - RNA, 20 nt, synthetic construct
  source 1..20: mol_type = other RNA
attcctcttcgttgcaatct

SEQ ID NO: 9763 - RNA, 20 nt, synthetic construct
  source 1..20: mol_type = other RNA
tcgttgcaatctggctccaa

SEQ ID NO: 9764 - RNA, 20 nt, synthetic construct
  source 1..20: mol_type = other RNA
aagtggctcacaccattatt

SEQ ID NO: 9765 - RNA, 20 nt, synthetic construct
  source 1..20: mol_type = other RNA
caccattattctgatctatc

SEQ ID NO: 9766 - RNA, 20 nt, synthetic construct
  source 1..20: mol_type = other RNA
cttactttctaggactgtgt

SEQ ID NO: 9767 - RNA, 20 nt, synthetic construct
  source 1..20: mol_type = other RNA
tgagggtcttctgatcttac

SEQ ID NO: 9768 - RNA, 20 nt, synthetic construct
  source 1..20: mol_type = other RNA
tgagtcactgctgctcagga

SEQ ID NO: 9769 - RNA, 20 nt, synthetic construct
  source 1..20: mol_type = other RNA
ggatcgtatctggctccttg

SEQ ID NO: 9770 - RNA, 20 nt, synthetic construct
  source 1..20: mol_type = other RNA
tcaaggagccagatacgatc

SEQ ID NO: 9771 - RNA, 20 nt, synthetic construct
  source 1..20: mol_type = other RNA
ttgaagagtgaccttgcata

SEQ ID NO: 9772 - RNA, 20 nt, synthetic construct
  source 1..20: mol_type = other RNA
ttcattttttatgacaagat

SEQ ID NO: 9773 - RNA, 20 nt, synthetic construct
  source 1..20: mol_type = other RNA
gacaaaagtgaccagcccaa

SEQ ID NO: 9774 - RNA, 20 nt, synthetic construct
  source 1..20: mol_type = other RNA
atagctgtggctttcacccc

SEQ ID NO: 9775 - RNA, 20 nt, synthetic construct
  source 1..20: mol_type = other RNA
agaatgaagctctatagctg

SEQ ID NO: 9776 - RNA, 20 nt, synthetic construct
  source 1..20: mol_type = other RNA
cctggggacaggctgtgcct

SEQ ID NO: 9777 - RNA, 20 nt, synthetic construct
  source 1..20: mol_type = other RNA
tggggacaggctgtgcctat

SEQ ID NO: 9778 - RNA, 20 nt, synthetic construct
  source 1..20: mol_type = other RNA
ggcatcaaaaaaagtggcac

SEQ ID NO: 9779 - RNA, 20 nt, synthetic construct
  source 1..20: mol_type = other RNA
agtagtgagatttttcagaa

SEQ ID NO: 9780 - RNA, 20 nt, synthetic construct
  source 1..20: mol_type = other RNA
ctactggagcacagctcgaa

SEQ ID NO: 9781 - RNA, 20 nt, synthetic construct
  source 1..20: mol_type = other RNA
aagtttctactatcctgacg

SEQ ID NO: 9782 - RNA, 20 nt, synthetic construct
  source 1..20: mol_type = other RNA
gttttgatcatgttcatatt

SEQ ID NO: 9783 - RNA, 20 nt, synthetic construct
  source 1..20: mol_type = other RNA
acagaagtgctttccaaacc

SEQ ID NO: 9784 - RNA, 20 nt, synthetic construct
  source 1..20: mol_type = other RNA
ggggatattaaggtgcctcc

SEQ ID NO: 9785 - RNA, 20 nt, synthetic construct
  source 1..20: mol_type = other RNA
ctctcttcctccatcccttc

SEQ ID NO: 9786 - RNA, 20 nt, synthetic construct
  source 1..20: mol_type = other RNA
cttcctccatcccttctttc

SEQ ID NO: 9787 - RNA, 20 nt, synthetic construct
  source 1..20: mol_type = other RNA
tcctccatcccttctttctt

SEQ ID NO: 9788 - RNA, 20 nt, synthetic construct
  source 1..20: mol_type = other RNA
atcccttctttcttcccacc

SEQ ID NO: 9789 - RNA, 20 nt, synthetic construct
  source 1..20: mol_type = other RNA
ccttccttcctccccacctc

SEQ ID NO: 9790 - RNA, 20 nt, synthetic construct
  source 1..20: mol_type = other RNA
ccacctctcttccttttctg

SEQ ID NO: 9791 - RNA, 20 nt, synthetic construct
  source 1..20: mol_type = other RNA
cttccttttctggaaggaac

SEQ ID NO: 9792 - RNA, 20 nt, synthetic construct
  source 1..20: mol_type = other RNA
tccttttctggaaggaacac

SEQ ID NO: 9793 - RNA, 20 nt, synthetic construct
  source 1..20: mol_type = other RNA
ggattctgcatgcattccct

SEQ ID NO: 9794 - RNA, 20 nt, synthetic construct
  source 1..20: mol_type = other RNA
tccaattgccctggaaattc

SEQ ID NO: 9795 - RNA, 20 nt, synthetic construct
  source 1..20: mol_type = other RNA
catccaattgccctggaaat

SEQ ID NO: 9796 - RNA, 20 nt, synthetic construct
  source 1..20: mol_type = other RNA
ctcatccaattgccctggaa

SEQ ID NO: 9797 - RNA, 20 nt, synthetic construct
  source 1..20: mol_type = other RNA
tctctcatccaattgccctg

SEQ ID NO: 9798 - RNA, 20 nt, synthetic construct
  source 1..20: mol_type = other RNA
agaaacacttccctcctctc

SEQ ID NO: 9799 - RNA, 20 nt, synthetic construct
  source 1..20: mol_type = other RNA
gcagattccctctagaaaca

SEQ ID NO: 9800 - RNA, 20 nt, synthetic construct
  source 1..20: mol_type = other RNA
gtcctgcggtttatacaggt

SEQ ID NO: 9801 - RNA, 20 nt, synthetic construct
  source 1..20: mol_type = other RNA
ggtagtgaacagctctgtcc

SEQ ID NO: 9802 - RNA, 20 nt, synthetic construct
  source 1..20: mol_type = other RNA
agagcaatgcaatacagatt

SEQ ID NO: 9803 - RNA, 20 nt, synthetic construct
  source 1..20: mol_type = other RNA
gatattgctctagagcaatg

SEQ ID NO: 9804 - RNA, 20 nt, synthetic construct
  source 1..20: mol_type = other RNA
agagcaatatctgaggctga

SEQ ID NO: 9805 - RNA, 20 nt, synthetic construct
  source 1..20: mol_type = other RNA
tttctttataaattattcag

SEQ ID NO: 9806 - RNA, 20 nt, synthetic construct
  source 1..20: mol_type = other RNA
tctgcttctgtgtgggccta

SEQ ID NO: 9807 - RNA, 20 nt, synthetic construct
  source 1..20: mol_type = other RNA
gcttctgtgtgggcctaagg

SEQ ID NO: 9808 - RNA, 20 nt, synthetic construct
  source 1..20: mol_type = other RNA
accatgattgtaatcttcct

SEQ ID NO: 9809 - RNA, 20 nt, synthetic construct
  source 1..20: mol_type = other RNA
cactttgccctccaccatga

SEQ ID NO: 9810 - RNA, 20 nt, synthetic construct
  source 1..20: mol_type = other RNA
ggccatgtgacatgcctgct

SEQ ID NO: 9811 - RNA, 20 nt, synthetic construct
  source 1..20: mol_type = other RNA
tgctctggccatgtgacatg

SEQ ID NO: 9812 - RNA, 20 nt, synthetic construct
  source 1..20: mol_type = other RNA
tgctcctgctctggccatgt

SEQ ID NO: 9813 - RNA, 20 nt, synthetic construct
  source 1..20: mol_type = other RNA
gtctcttgctcctgctctgg

SEQ ID NO: 9814 - RNA, 20 nt, synthetic construct
  source 1..20: mol_type = other RNA
ctgtctcttgctcctgctct

SEQ ID NO: 9815 - RNA, 20 nt, synthetic construct
  source 1..20: mol_type = other RNA
ctctgtctcttgctcctgct

SEQ ID NO: 9816 - RNA, 20 nt, synthetic construct
  source 1..20: mol_type = other RNA
tagttcttgcaaagtctggt

SEQ ID NO: 9817 - RNA, 20 nt, synthetic construct
  source 1..20: mol_type = other RNA
ctcttagttcttgcaaagtc

SEQ ID NO: 9818 - RNA, 20 nt, synthetic construct
  source 1..20: mol_type = other RNA
cactcttagttcttgcaaag

SEQ ID NO: 9819 - RNA, 20 nt, synthetic construct
  source 1..20: mol_type = other RNA
ctgatcaccatgaagatgtg

SEQ ID NO: 9820 - RNA, 20 nt, synthetic construct
  source 1..20: mol_type = other RNA
tgaatggcttgggccacatc

SEQ ID NO: 9821 - RNA, 20 nt, synthetic construct
  source 1..20: mol_type = other RNA
atgatccaaacccctttcac

SEQ ID NO: 9822 - RNA, 20 nt, synthetic construct
  source 1..20: mol_type = other RNA
atcactggggactacagttg

SEQ ID NO: 9823 - RNA, 20 nt, synthetic construct
  source 1..20: mol_type = other RNA
tgttcaactgtagtccccag

SEQ ID NO: 9824 - RNA, 20 nt, synthetic construct
  source 1..20: mol_type = other RNA
atctgtttcatcagagactg

SEQ ID NO: 9825 - RNA, 20 nt, synthetic construct
  source 1..20: mol_type = other RNA
gatgaaacagattgagaaca

SEQ ID NO: 9826 - RNA, 20 nt, synthetic construct
  source 1..20: mol_type = other RNA
taagtcactgattctgggtg

SEQ ID NO: 9827 - RNA, 20 nt, synthetic construct
  source 1..20: mol_type = other RNA
gccacccagaatcagtgact

SEQ ID NO: 9828 - RNA, 20 nt, synthetic construct
  source 1..20: mol_type = other RNA
gacaccctcggccacccaga

SEQ ID NO: 9829 - RNA, 20 nt, synthetic construct
  source 1..20: mol_type = other RNA
gtgccatgaacttggcgctg

SEQ ID NO: 9830 - RNA, 20 nt, synthetic construct
  source 1..20: mol_type = other RNA
tgacatcctcatcttttcta

SEQ ID NO: 9831 - RNA, 20 nt, synthetic construct
  source 1..20: mol_type = other RNA
tcttttctaggtcctcaagg

SEQ ID NO: 9832 - RNA, 20 nt, synthetic construct
  source 1..20: mol_type = other RNA
tgttcaggaaatagaagtgt

SEQ ID NO: 9833 - RNA, 20 nt, synthetic construct
  source 1..20: mol_type = other RNA
aagaacagcctagacacttc

SEQ ID NO: 9834 - RNA, 20 nt, synthetic construct
  source 1..20: mol_type = other RNA
ctcacctgtggtcttcaccc

SEQ ID NO: 9835 - RNA, 20 nt, synthetic construct
  source 1..20: mol_type = other RNA
cctgtggtcttcaccccacg

SEQ ID NO: 9836 - RNA, 20 nt, synthetic construct
  source 1..20: mol_type = other RNA
ccactgccatgcagtggcca

SEQ ID NO: 9837 - RNA, 20 nt, synthetic construct
  source 1..20: mol_type = other RNA
agggctttggggacagcatc

SEQ ID NO: 9838 - RNA, 20 nt, synthetic construct
  source 1..20: mol_type = other RNA
ttaaaaaggcagaaggattc

SEQ ID NO: 9839 - RNA, 20 nt, synthetic construct
  source 1..20: mol_type = other RNA
ttttccacgtgaggaaacga

SEQ ID NO: 9840 - RNA, 20 nt, synthetic construct
  source 1..20: mol_type = other RNA
cgtggaaaaagagataccct

SEQ ID NO: 9841 - RNA, 20 nt, synthetic construct
  source 1..20: mol_type = other RNA
agcatattattatgaaagga

SEQ ID NO: 9842 - RNA, 20 nt, synthetic construct
  source 1..20: mol_type = other RNA
ccagcatattattatgaaag

SEQ ID NO: 9843 - RNA, 20 nt, synthetic construct
  source 1..20: mol_type = other RNA
tttcataataatatgctgga

SEQ ID NO: 9844 - RNA, 20 nt, synthetic construct
  source 1..20: mol_type = other RNA
tttgattctctccagcatat

SEQ ID NO: 9845 - RNA, 20 nt, synthetic construct
  source 1..20: mol_type = other RNA
atatggtggtttttcaagcg

SEQ ID NO: 9846 - RNA, 20 nt, synthetic construct
  source 1..20: mol_type = other RNA
tgaatagcagtgattagagg

SEQ ID NO: 9847 - RNA, 20 nt, synthetic construct
  source 1..20: mol_type = other RNA
aatcactgctattcaggagg

SEQ ID NO: 9848 - RNA, 20 nt, synthetic construct
  source 1..20: mol_type = other RNA
tcagcctcctgaatagcagt

SEQ ID NO: 9849 - RNA, 20 nt, synthetic construct
  source 1..20: mol_type = other RNA
agcaattcttcctcgtcagc

SEQ ID NO: 9850 - RNA, 20 nt, synthetic construct
  source 1..20: mol_type = other RNA
aggctgggtgacagatcaag

SEQ ID NO: 9851 - RNA, 20 nt, synthetic construct
  source 1..20: mol_type = other RNA
acaaaagaaaagaaaacaaa

SEQ ID NO: 9852 - RNA, 20 nt, synthetic construct
  source 1..20: mol_type = other RNA
ttcctggtgaaattttgttt

SEQ ID NO: 9853 - RNA, 20 nt, synthetic construct
  source 1..20: mol_type = other RNA
tacaaatactgtttcttagc

SEQ ID NO: 9854 - RNA, 20 nt, synthetic construct
  source 1..20: mol_type = other RNA
cctacaaatactgtttctta

SEQ ID NO: 9855 - RNA, 20 nt, synthetic construct
  source 1..20: mol_type = other RNA
ctgtgctggtggctctggaa

SEQ ID NO: 9856 - RNA, 20 nt, synthetic construct
  source 1..20: mol_type = other RNA
ggaaggcagggtgtcaatgc

SEQ ID NO: 9857 - RNA, 20 nt, synthetic construct
  source 1..20: mol_type = other RNA
tccctgtctgcattgacacc

SEQ ID NO: 9858 - RNA, 20 nt, synthetic construct
  source 1..20: mol_type = other RNA
tgcctgccccatgccttccc

SEQ ID NO: 9859 - RNA, 20 nt, synthetic construct
  source 1..20: mol_type = other RNA
ggctcctgcctgccccatgc

SEQ ID NO: 9860 - RNA, 20 nt, synthetic construct
  source 1..20: mol_type = other RNA
cctgggcctggtcacaagcc

SEQ ID NO: 9861 - RNA, 20 nt, synthetic construct
  source 1..20: mol_type = other RNA
tgggcctggtcacaagccca

SEQ ID NO: 9862 - RNA, 20 nt, synthetic construct
  source 1..20: mol_type = other RNA
gttcacagacccagagaagc

SEQ ID NO: 9863 - RNA, 20 nt, synthetic construct
  source 1..20: mol_type = other RNA
gggtctgtgaactgaggggt

SEQ ID NO: 9864 - RNA, 20 nt, synthetic construct
  source 1..20: mol_type = other RNA
ttcctagagtgtcagaggat

SEQ ID NO: 9865 - RNA, 20 nt, synthetic construct
  source 1..20: mol_type = other RNA
ccttcctagagtgtcagagg

SEQ ID NO: 9866 - RNA, 20 nt, synthetic construct
  source 1..20: mol_type = other RNA
gacactctaggaaggagaga

SEQ ID NO: 9867 - RNA, 20 nt, synthetic construct
  source 1..20: mol_type = other RNA
aggaaggagagaagggcctt

SEQ ID NO: 9868 - RNA, 20 nt, synthetic construct
  source 1..20: mol_type = other RNA
gcctttataaacagtagctg

SEQ ID NO: 9869 - RNA, 20 nt, synthetic construct
  source 1..20: mol_type = other RNA
ctcttgctccccagggtcct

SEQ ID NO: 9870 - RNA, 20 nt, synthetic construct
  source 1..20: mol_type = other RNA
tgctccccagggtcctcccc

SEQ ID NO: 9871 - RNA, 20 nt, synthetic construct
  source 1..20: mol_type = other RNA
ccagggtcctccccaccatc

SEQ ID NO: 9872 - RNA, 20 nt, synthetic construct
  source 1..20: mol_type = other RNA
ccaccatcccagcaaatgtg

SEQ ID NO: 9873 - RNA, 20 nt, synthetic construct
  source 1..20: mol_type = other RNA
gaggaccatgaggagcagag

SEQ ID NO: 9874 - RNA, 20 nt, synthetic construct
  source 1..20: mol_type = other RNA
ctgaggaccatgaggagcag

SEQ ID NO: 9875 - RNA, 20 nt, synthetic construct
  source 1..20: mol_type = other RNA
gctcctcatggtcctcagag

SEQ ID NO: 9876 - RNA, 20 nt, synthetic construct
  source 1..20: mol_type = other RNA
tcatggtcctcagagagctg

SEQ ID NO: 9877 - RNA, 20 nt, synthetic construct
  source 1..20: mol_type = other RNA
tggtcctcagagagctgggg

SEQ ID NO: 9878 - RNA, 20 nt, synthetic construct
  source 1..20: mol_type = other RNA
gagagctggggtgttctgat

SEQ ID NO: 9879 - RNA, 20 nt, synthetic construct
  source 1..20: mol_type = other RNA
aaaaccccacatttcctaag

SEQ ID NO: 9880 - RNA, 20 nt, synthetic construct
  source 1..20: mol_type = other RNA
aaacgtatcagcctatcaga

SEQ ID NO: 9881 - RNA, 20 nt, synthetic construct
  source 1..20: mol_type = other RNA
gataggctgatacgttttga

SEQ ID NO: 9882 - RNA, 20 nt, synthetic construct
  source 1..20: mol_type = other RNA
aaactcaaaacgtatcagcc

SEQ ID NO: 9883 - RNA, 20 nt, synthetic construct
  source 1..20: mol_type = other RNA
aggggtgtggggatgtgcgg

SEQ ID NO: 9884 - RNA, 20 nt, synthetic construct
  source 1..20: mol_type = other RNA
tggagcactaaatgccctag

SEQ ID NO: 9885 - RNA, 20 nt, synthetic construct
  source 1..20: mol_type = other RNA
acaggttccctcatggagca

SEQ ID NO: 9886 - RNA, 20 nt, synthetic construct
  source 1..20: mol_type = other RNA
ctctacaggttccctcatgg

SEQ ID NO: 9887 - RNA, 20 nt, synthetic construct
  source 1..20: mol_type = other RNA
atgagggaacctgtagagtg

SEQ ID NO: 9888 - RNA, 20 nt, synthetic construct
  source 1..20: mol_type = other RNA
tttccattcctttatcccct

SEQ ID NO: 9889 - RNA, 20 nt, synthetic construct
  source 1..20: mol_type = other RNA
ggtttttagacctgattcta

SEQ ID NO: 9890 - RNA, 20 nt, synthetic construct
  source 1..20: mol_type = other RNA
taaagattagaactctggtt

SEQ ID NO: 9891 - RNA, 20 nt, synthetic construct
  source 1..20: mol_type = other RNA
ttcatttgatgtctagcatt

SEQ ID NO: 9892 - RNA, 20 nt, synthetic construct
  source 1..20: mol_type = other RNA
tgaatgttactaaaccgtgg

SEQ ID NO: 9893 - RNA, 20 nt, synthetic construct
  source 1..20: mol_type = other RNA
tcgtgaatgttactaaaccg

SEQ ID NO: 9894 - RNA, 20 nt, synthetic construct
  source 1..20: mol_type = other RNA
acttcctcctcgtgaatgtt

SEQ ID NO: 9895 - RNA, 20 nt, synthetic construct
  source 1..20: mol_type = other RNA
atctggatcctccacttcct

SEQ ID NO: 9896 - RNA, 20 nt, synthetic construct
  source 1..20: mol_type = other RNA
gggcacacaaggcatttgca

SEQ ID NO: 9897 - RNA, 20 nt, synthetic construct
  source 1..20: mol_type = other RNA
tgatgatgtctcagccagac

SEQ ID NO: 9898 - RNA, 20 nt, synthetic construct
  source 1..20: mol_type = other RNA
gccagacattctgcccagtc

SEQ ID NO: 9899 - RNA, 20 nt, synthetic construct
  source 1..20: mol_type = other RNA
tcaattaatatgaaaggaca

SEQ ID NO: 9900 - RNA, 20 nt, synthetic construct
  source 1..20: mol_type = other RNA
tgccaagtgtgtcctttcat

SEQ ID NO: 9901 - RNA, 20 nt, synthetic construct
  source 1..20: mol_type = other RNA
tgtatattctgtgcacgatt

SEQ ID NO: 9902 - RNA, 20 nt, synthetic construct
  source 1..20: mol_type = other RNA
gtttcttgcatgcaactgat

SEQ ID NO: 9903 - RNA, 20 nt, synthetic construct
  source 1..20: mol_type = other RNA
catttgcctgtggttgccta

SEQ ID NO: 9904 - RNA, 20 nt, synthetic construct
  source 1..20: mol_type = other RNA
gagctggcactgccttgctt

SEQ ID NO: 9905 - RNA, 20 nt, synthetic construct
  source 1..20: mol_type = other RNA
gagggctctggggcttcaag

SEQ ID NO: 9906 - RNA, 20 nt, synthetic construct
  source 1..20: mol_type = other RNA
ggggcttcaaggcagggatg

SEQ ID NO: 9907 - RNA, 20 nt, synthetic construct
  source 1..20: mol_type = other RNA
ccagccagtgatgtaacatt

SEQ ID NO: 9908 - RNA, 20 nt, synthetic construct
  source 1..20: mol_type = other RNA
ccttgggtttctccccagcc

SEQ ID NO: 9909 - RNA, 20 nt, synthetic construct
  source 1..20: mol_type = other RNA
ttttgtaacatgcactgaag

SEQ ID NO: 9910 - RNA, 20 nt, synthetic construct
  source 1..20: mol_type = other RNA
aaaatgctcattttgtaaca

SEQ ID NO: 9911 - RNA, 20 nt, synthetic construct
  source 1..20: mol_type = other RNA
tgactttgcctggacacctg

SEQ ID NO: 9912 - RNA, 20 nt, synthetic construct
  source 1..20: mol_type = other RNA
ataatcagtcttcaagggac

SEQ ID NO: 9913 - RNA, 20 nt, synthetic construct
  source 1..20: mol_type = other RNA
ccttgcccaagtcccttgaa

SEQ ID NO: 9914 - RNA, 20 nt, synthetic construct
  source 1..20: mol_type = other RNA
aggaaatggcaccgctcccc

SEQ ID NO: 9915 - RNA, 20 nt, synthetic construct
  source 1..20: mol_type = other RNA
ctcttttttgttttcagaat

SEQ ID NO: 9916 - RNA, 20 nt, synthetic construct
  source 1..20: mol_type = other RNA
cttttttgttttcagaatct

SEQ ID NO: 9917 - RNA, 20 nt, synthetic construct
  source 1..20: mol_type = other RNA
tttttgttttcagaatcttt

SEQ ID NO: 9918 - RNA, 20 nt, synthetic construct
  source 1..20: mol_type = other RNA
actggtgtttgtttttgttg

SEQ ID NO: 9919 - RNA, 20 nt, synthetic construct
  source 1..20: mol_type = other RNA
aagacctctactggtgtttg

SEQ ID NO: 9920 - RNA, 20 nt, synthetic construct
  source 1..20: mol_type = other RNA
taatcataatttcagcattc

SEQ ID NO: 9921 - RNA, 20 nt, synthetic construct
  source 1..20: mol_type = other RNA
agttaagggtgttagattat

SEQ ID NO: 9922 - RNA, 20 nt, synthetic construct
  source 1..20: mol_type = other RNA
cacacacattagacatgtgg

SEQ ID NO: 9923 - RNA, 20 nt, synthetic construct
  source 1..20: mol_type = other RNA
cccagcttcaggtcccctgc

SEQ ID NO: 9924 - RNA, 20 nt, synthetic construct
  source 1..20: mol_type = other RNA
cccccagcttcaggtcccct

SEQ ID NO: 9925 - RNA, 20 nt, synthetic construct
  source 1..20: mol_type = other RNA
cccatcaaccaataccaaat

SEQ ID NO: 9926 - RNA, 20 nt, synthetic construct
  source 1..20: mol_type = other RNA
cacccatcaaccaataccaa

SEQ ID NO: 9927 - RNA, 20 nt, synthetic construct
  source 1..20: mol_type = other RNA
tgctctcacccatcaaccaa

SEQ ID NO: 9928 - RNA, 20 nt, synthetic construct
  source 1..20: mol_type = other RNA
cttgctctcacccatcaacc

SEQ ID NO: 9929 - RNA, 20 nt, synthetic construct
  source 1..20: mol_type = other RNA
ttgcggtatgccctgacaat

SEQ ID NO: 9930 - RNA, 20 nt, synthetic construct
  source 1..20: mol_type = other RNA
gagaaagtagagctgagact

SEQ ID NO: 9931 - RNA, 20 nt, synthetic construct
  source 1..20: mol_type = other RNA
gctctactttctcagaggtg

SEQ ID NO: 9932 - RNA, 20 nt, synthetic construct
  source 1..20: mol_type = other RNA
actttctcagaggtgcaggc

SEQ ID NO: 9933 - RNA, 20 nt, synthetic construct
  source 1..20: mol_type = other RNA
gaggtgcaggcaagggcact

SEQ ID NO: 9934 - RNA, 20 nt, synthetic construct
  source 1..20: mol_type = other RNA
cagtgcccttgcctgcacct

SEQ ID NO: 9935 - RNA, 20 nt, synthetic construct
  source 1..20: mol_type = other RNA
gccacttgccagatagacct

SEQ ID NO: 9936 - RNA, 20 nt, synthetic construct
  source 1..20: mol_type = other RNA
ttgtaccacttggctctaat

SEQ ID NO: 9937 - RNA, 20 nt, synthetic construct
  source 1..20: mol_type = other RNA
aatcccttatctgtaaaacc

SEQ ID NO: 9938 - RNA, 20 nt, synthetic construct
  source 1..20: mol_type = other RNA
cctccttgactccttgttcc

SEQ ID NO: 9939 - RNA, 20 nt, synthetic construct
  source 1..20: mol_type = other RNA
ttgactccttgttccctttt

SEQ ID NO: 9940 - RNA, 20 nt, synthetic construct
  source 1..20: mol_type = other RNA
ttgttccctttttctgcact

SEQ ID NO: 9941 - RNA, 20 nt, synthetic construct
  source 1..20: mol_type = other RNA
gcagtgcagaaaaagggaac

SEQ ID NO: 9942 - RNA, 20 nt, synthetic construct
  source 1..20: mol_type = other RNA
cagactcagcagtgcagaaa

SEQ ID NO: 9943 - RNA, 20 nt, synthetic construct
  source 1..20: mol_type = other RNA
gtgctcccagactcagcagt

SEQ ID NO: 9944 - RNA, 20 nt, synthetic construct
  source 1..20: mol_type = other RNA
tttgccaagtttccttttac

SEQ ID NO: 9945 - RNA, 20 nt, synthetic construct
  source 1..20: mol_type = other RNA
cacacccataggtgcccctc

SEQ ID NO: 9946 - RNA, 20 nt, synthetic construct
  source 1..20: mol_type = other RNA
tggtgtttgcatattttaaa

SEQ ID NO: 9947 - RNA, 20 nt, synthetic construct
  source 1..20: mol_type = other RNA
cagtggtttgtagcatttaa

SEQ ID NO: 9948 - RNA, 20 nt, synthetic construct
  source 1..20: mol_type = other RNA
atggtaaaataggaacaata

SEQ ID NO: 9949 - RNA, 20 nt, synthetic construct
  source 1..20: mol_type = other RNA
gagccccagcttcctcaatg

SEQ ID NO: 9950 - RNA, 20 nt, synthetic construct
  source 1..20: mol_type = other RNA
accttctctgagccccagct

SEQ ID NO: 9951 - RNA, 20 nt, synthetic construct
  source 1..20: mol_type = other RNA
gagaaggtggagggtggtac

SEQ ID NO: 9952 - RNA, 20 nt, synthetic construct
  source 1..20: mol_type = other RNA
tgcctatgggctgtcaggac

SEQ ID NO: 9953 - RNA, 20 nt, synthetic construct
  source 1..20: mol_type = other RNA
cgacttttctaagtcctgac

SEQ ID NO: 9954 - RNA, 20 nt, synthetic construct
  source 1..20: mol_type = other RNA
cgctgattgtttcctcagct

SEQ ID NO: 9955 - RNA, 20 nt, synthetic construct
  source 1..20: mol_type = other RNA
ctgattgtttcctcagctga

SEQ ID NO: 9956 - RNA, 20 nt, synthetic construct
  source 1..20: mol_type = other RNA
gctgatgtgggctgcagggc

SEQ ID NO: 9957 - RNA, 20 nt, synthetic construct
  source 1..20: mol_type = other RNA
gcacttgatgcactttctta

SEQ ID NO: 9958 - RNA, 20 nt, synthetic construct
  source 1..20: mol_type = other RNA
atcatggcagctcctactac

SEQ ID NO: 9959 - RNA, 20 nt, synthetic construct
  source 1..20: mol_type = other RNA
tactactaataaagaataga

SEQ ID NO: 9960 - RNA, 20 nt, synthetic construct
  source 1..20: mol_type = other RNA
aattggattaagcaaaacaa

SEQ ID NO: 9961 - RNA, 20 nt, synthetic construct
  source 1..20: mol_type = other RNA
ctaagaatttcccttgtttt

SEQ ID NO: 9962 - RNA, 20 nt, synthetic construct
  source 1..20: mol_type = other RNA
catgatggccccaaatccca

SEQ ID NO: 9963 - RNA, 20 nt, synthetic construct
  source 1..20: mol_type = other RNA
atgattgggaggacctggga

SEQ ID NO: 9964 - RNA, 20 nt, synthetic construct
  source 1..20: mol_type = other RNA
caatcatggagtaggcacta

SEQ ID NO: 9965 - RNA, 20 nt, synthetic construct
  source 1..20: mol_type = other RNA
cccaattatgtgaacaatag

SEQ ID NO: 9966 - RNA, 20 nt, synthetic construct
  source 1..20: mol_type = other RNA
caattatgtgaacaatagtc

SEQ ID NO: 9967 - RNA, 20 nt, synthetic construct
  source 1..20: mol_type = other RNA
gagtgggcagactattgttc

SEQ ID NO: 9968 - RNA, 20 nt, synthetic construct
  source 1..20: mol_type = other RNA
gagaagtcaaacttgggtca

SEQ ID NO: 9969 - RNA, 20 nt, synthetic construct
  source 1..20: mol_type = other RNA
gacctgcaccaattgttcca

SEQ ID NO: 9970 - RNA, 20 nt, synthetic construct
  source 1..20: mol_type = other RNA
aacatggaacaattggtgca

SEQ ID NO: 9971 - RNA, 20 nt, synthetic construct
  source 1..20: mol_type = other RNA
tgaaggatctatctaacttt

SEQ ID NO: 9972 - RNA, 20 nt, synthetic construct
  source 1..20: mol_type = other RNA
cataatcctcttgaaggatc

SEQ ID NO: 9973 - RNA, 20 nt, synthetic construct
  source 1..20: mol_type = other RNA
gtttgctttctggctgccca

SEQ ID NO: 9974 - RNA, 20 nt, synthetic construct
  source 1..20: mol_type = other RNA
atgatacctcaactgatgaa

SEQ ID NO: 9975 - RNA, 20 nt, synthetic construct
  source 1..20: mol_type = other RNA
actgatgaaagcatgaagct

SEQ ID NO: 9976 - RNA, 20 nt, synthetic construct
  source 1..20: mol_type = other RNA
cacccagatccttatgattt

SEQ ID NO: 9977 - RNA, 20 nt, synthetic construct
  source 1..20: mol_type = other RNA
cccatcttccatgtgacatt

SEQ ID NO: 9978 - RNA, 20 nt, synthetic construct
  source 1..20: mol_type = other RNA
catcttccatgtgacattgg

SEQ ID NO: 9979 - RNA, 20 nt, synthetic construct
  source 1..20: mol_type = other RNA
tttagcctccgctttctcat

SEQ ID NO: 9980 - RNA, 20 nt, synthetic construct
  source 1..20: mol_type = other RNA
tatgtaagatgagaaagcgg

SEQ ID NO: 9981 - RNA, 20 nt, synthetic construct
  source 1..20: mol_type = other RNA
gctttctcatcttacatatg

SEQ ID NO: 9982 - RNA, 20 nt, synthetic construct
  source 1..20: mol_type = other RNA
caattatctcatatgtaaga

SEQ ID NO: 9983 - RNA, 20 nt, synthetic construct
  source 1..20: mol_type = other RNA
tcttacatatgagataattg

SEQ ID NO: 9984 - RNA, 20 nt, synthetic construct
  source 1..20: mol_type = other RNA
caacatcatcaccatcacca

SEQ ID NO: 9985 - RNA, 20 nt, synthetic construct
  source 1..20: mol_type = other RNA
acatcatcaccatcaccatc

SEQ ID NO: 9986 - RNA, 20 nt, synthetic construct
  source 1..20: mol_type = other RNA
atatttcctcatctgtatta

SEQ ID NO: 9987 - RNA, 20 nt, synthetic construct
  source 1..20: mol_type = other RNA
tctgtattatcattactacc

SEQ ID NO: 9988 - RNA, 20 nt, synthetic construct
  source 1..20: mol_type = other RNA
aataccaccatcactgtaac

SEQ ID NO: 9989 - RNA, 20 nt, synthetic construct
  source 1..20: mol_type = other RNA
accaccatcaccattatcat

SEQ ID NO: 9990 - RNA, 20 nt, synthetic construct
  source 1..20: mol_type = other RNA
ggggtcaacacccagctaca

SEQ ID NO: 9991 - RNA, 20 nt, synthetic construct
  source 1..20: mol_type = other RNA
ctgtttcctctctcccaccc

SEQ ID NO: 9992 - RNA, 20 nt, synthetic construct
  source 1..20: mol_type = other RNA
ctcccacccccatccacaca

SEQ ID NO: 9993 - RNA, 20 nt, synthetic construct
  source 1..20: mol_type = other RNA
cccacccccatccacacatt

SEQ ID NO: 9994 - RNA, 20 nt, synthetic construct
  source 1..20: mol_type = other RNA
cacccccatccacacatttc

SEQ ID NO: 9995 - RNA, 20 nt, synthetic construct
  source 1..20: mol_type = other RNA
cagtctcctctggtctcacc

SEQ ID NO: 9996 - RNA, 20 nt, synthetic construct
  source 1..20: mol_type = other RNA
tctggtctcacccacatgtc

SEQ ID NO: 9997 - RNA, 20 nt, synthetic construct
  source 1..20: mol_type = other RNA
gtggacatgtgggtgagacc

SEQ ID NO: 9998 - RNA, 20 nt, synthetic construct
  source 1..20: mol_type = other RNA
ggtctcacccacatgtccac

SEQ ID NO: 9999 - RNA, 20 nt, synthetic construct
  source 1..20: mol_type = other RNA
cccacatgtccactgagaaa

SEQ ID NO: 10000 - RNA, 20 nt, synthetic construct
  source 1..20: mol_type = other RNA
tggtctagttggtgttctga

SEQ ID NO: 10001 - RNA, 20 nt, synthetic construct
  source 1..20: mol_type = other RNA
tcctggtctagttggtgttc

SEQ ID NO: 10002 - RNA, 20 nt, synthetic construct
  source 1..20: mol_type = other RNA
ggcctgcttatcaactttct

SEQ ID NO: 10003 - RNA, 20 nt, synthetic construct
  source 1..20: mol_type = other RNA
ttctgagaagctgagaacac

SEQ ID NO: 10004 - RNA, 20 nt, synthetic construct
  source 1..20: mol_type = other RNA
gcttctcagaaggaggtcaa

SEQ ID NO: 10005 - RNA, 20 nt, synthetic construct
  source 1..20: mol_type = other RNA
gaaggaggtcaaaattctcc

SEQ ID NO: 10006 - RNA, 20 nt, synthetic construct
  source 1..20: mol_type = other RNA
ccctctccccttcatgtgtc

SEQ ID NO: 10007 - RNA, 20 nt, synthetic construct
  source 1..20: mol_type = other RNA
ccccttcatgtgtccagacc

SEQ ID NO: 10008 - RNA, 20 nt, synthetic construct
  source 1..20: mol_type = other RNA
ccttcatgtgtccagacctt

SEQ ID NO: 10009 - RNA, 20 nt, synthetic construct
  source 1..20: mol_type = other RNA
gcacttggtacatccaaatc

SEQ ID NO: 10010 - RNA, 20 nt, synthetic construct
  source 1..20: mol_type = other RNA
acaccactctgcacttggta

SEQ ID NO: 10011 - RNA, 20 nt, synthetic construct
  source 1..20: mol_type = other RNA
tccatgtaagtctcatctgc

SEQ ID NO: 10012 - RNA, 20 nt, synthetic construct
  source 1..20: mol_type = other RNA
tctgcaatcactgggctgat

SEQ ID NO: 10013 - RNA, 20 nt, synthetic construct
  source 1..20: mol_type = other RNA
gatggcgccctggagacagg

SEQ ID NO: 10014 - RNA, 20 nt, synthetic construct
  source 1..20: mol_type = other RNA
ctgatggcgccctggagaca

SEQ ID NO: 10015 - RNA, 20 nt, synthetic construct
  source 1..20: mol_type = other RNA
agggcgccatcagagagggc

SEQ ID NO: 10016 - RNA, 20 nt, synthetic construct
  source 1..20: mol_type = other RNA
ggttacctgtggcccaccct

SEQ ID NO: 10017 - RNA, 20 nt, synthetic construct
  source 1..20: mol_type = other RNA
gagggcagggtgggccacag

SEQ ID NO: 10018 - RNA, 20 nt, synthetic construct
  source 1..20: mol_type = other RNA
gaggtgccatctctacattg

SEQ ID NO: 10019 - RNA, 20 nt, synthetic construct
  source 1..20: mol_type = other RNA
tggccaatgtagagatggca

SEQ ID NO: 10020 - RNA, 20 nt, synthetic construct
  source 1..20: mol_type = other RNA
tagactgcattaatttccca

SEQ ID NO: 10021 - RNA, 20 nt, synthetic construct
  source 1..20: mol_type = other RNA
tggtgggttttccctcttat

SEQ ID NO: 10022 - RNA, 20 nt, synthetic construct
  source 1..20: mol_type = other RNA
tatcaggatgtttgccttgc

SEQ ID NO: 10023 - RNA, 20 nt, synthetic construct
  source 1..20: mol_type = other RNA
gagcaaggcaaacatcctga

SEQ ID NO: 10024 - RNA, 20 nt, synthetic construct
  source 1..20: mol_type = other RNA
ctgagcaaggcaaacatcct

SEQ ID NO: 10025 - RNA, 20 nt, synthetic construct
  source 1..20: mol_type = other RNA
gatttgctctctgagcaagg

SEQ ID NO: 10026 - RNA, 20 nt, synthetic construct
  source 1..20: mol_type = other RNA
cagatttgctctctgagcaa

SEQ ID NO: 10027 - RNA, 20 nt, synthetic construct
  source 1..20: mol_type = other RNA
gagagcaaatctgagagcag

SEQ ID NO: 10028 - RNA, 20 nt, synthetic construct
  source 1..20: mol_type = other RNA
aaatattttgctgaaagtta

SEQ ID NO: 10029 - RNA, 20 nt, synthetic construct
  source 1..20: mol_type = other RNA
tgactaccgagcattgggca

SEQ ID NO: 10030 - RNA, 20 nt, synthetic construct
  source 1..20: mol_type = other RNA
tcctgactaccgagcattgg

SEQ ID NO: 10031 - RNA, 20 nt, synthetic construct
  source 1..20: mol_type = other RNA
gtagtcaggaggagcttcct

SEQ ID NO: 10032 - RNA, 20 nt, synthetic construct
  source 1..20: mol_type = other RNA
tccgcagagctgcatggagg

SEQ ID NO: 10033 - RNA, 20 nt, synthetic construct
  source 1..20: mol_type = other RNA
atgcagctctgcggaagaga

SEQ ID NO: 10034 - RNA, 20 nt, synthetic construct
  source 1..20: mol_type = other RNA
gcggaagagactcttccacg

SEQ ID NO: 10035 - RNA, 20 nt, synthetic construct
  source 1..20: mol_type = other RNA
tccacgctgctcatgtaaac

SEQ ID NO: 10036 - RNA, 20 nt, synthetic construct
  source 1..20: mol_type = other RNA
tgtaaactccagattcggtg

SEQ ID NO: 10037 - RNA, 20 nt, synthetic construct
  source 1..20: mol_type = other RNA
agattcggtgtcagttttct

SEQ ID NO: 10038 - RNA, 20 nt, synthetic construct
  source 1..20: mol_type = other RNA
tgctttccccaaagcccttg

SEQ ID NO: 10039 - RNA, 20 nt, synthetic construct
  source 1..20: mol_type = other RNA
cctgctttccccaaagccct

SEQ ID NO: 10040 - RNA, 20 nt, synthetic construct
  source 1..20: mol_type = other RNA
ctcctgctttccccaaagcc

SEQ ID NO: 10041 - RNA, 20 nt, synthetic construct
  source 1..20: mol_type = other RNA
gttctagcctgtgccatgct

SEQ ID NO: 10042 - RNA, 20 nt, synthetic construct
  source 1..20: mol_type = other RNA
ttagaattttgcaaaacttt

SEQ ID NO: 10043 - RNA, 20 nt, synthetic construct
  source 1..20: mol_type = other RNA
cattagaattttgcaaaact

SEQ ID NO: 10044 - RNA, 20 nt, synthetic construct
  source 1..20: mol_type = other RNA
caaataatccaagtttccaa

SEQ ID NO: 10045 - RNA, 20 nt, synthetic construct
  source 1..20: mol_type = other RNA
cacaaataatccaagtttcc

SEQ ID NO: 10046 - RNA, 20 nt, synthetic construct
  source 1..20: mol_type = other RNA
gtgctctcacaaataatcca

SEQ ID NO: 10047 - RNA, 20 nt, synthetic construct
  source 1..20: mol_type = other RNA
gctaaagtgccagaggaaat

SEQ ID NO: 10048 - RNA, 20 nt, synthetic construct
  source 1..20: mol_type = other RNA
ggcactttagcagaggttct

SEQ ID NO: 10049 - RNA, 20 nt, synthetic construct
  source 1..20: mol_type = other RNA
ttgtagttcttcttttgtga

SEQ ID NO: 10050 - RNA, 20 nt, synthetic construct
  source 1..20: mol_type = other RNA
tcgttgtagttcttcttttg

SEQ ID NO: 10051 - RNA, 20 nt, synthetic construct
  source 1..20: mol_type = other RNA
ctaattgtcaaggaagtgta

SEQ ID NO: 10052 - RNA, 20 nt, synthetic construct
  source 1..20: mol_type = other RNA
cccttgtgatattcaatttt

SEQ ID NO: 10053 - RNA, 20 nt, synthetic construct
  source 1..20: mol_type = other RNA
aaaagggtgtgacagtggaa

SEQ ID NO: 10054 - RNA, 20 nt, synthetic construct
  source 1..20: mol_type = other RNA
cagtaacattgccaaattat

SEQ ID NO: 10055 - RNA, 20 nt, synthetic construct
  source 1..20: mol_type = other RNA
gttcccataattatatagac

SEQ ID NO: 10056 - RNA, 20 nt, synthetic construct
  source 1..20: mol_type = other RNA
tgcttccaaccttccacatg

SEQ ID NO: 10057 - RNA, 20 nt, synthetic construct
  source 1..20: mol_type = other RNA
ccatgcgtgttggccccact

SEQ ID NO: 10058 - RNA, 20 nt, synthetic construct
  source 1..20: mol_type = other RNA
gcttgagtctgggtctgcgg

SEQ ID NO: 10059 - RNA, 20 nt, synthetic construct
  source 1..20: mol_type = other RNA
gcagacccagactcaagctg

SEQ ID NO: 10060 - RNA, 20 nt, synthetic construct
  source 1..20: mol_type = other RNA
agctgagctatacaacctcc

SEQ ID NO: 10061 - RNA, 20 nt, synthetic construct
  source 1..20: mol_type = other RNA
ttacgcctcagtttcctcaa

SEQ ID NO: 10062 - RNA, 20 nt, synthetic construct
  source 1..20: mol_type = other RNA
gtttcctcaactgaagaaca

SEQ ID NO: 10063 - RNA, 20 nt, synthetic construct
  source 1..20: mol_type = other RNA
actgaagaacaggaatgaca

SEQ ID NO: 10064 - RNA, 20 nt, synthetic construct
  source 1..20: mol_type = other RNA
caacggtcctatgaaacagg

SEQ ID NO: 10065 - RNA, 20 nt, synthetic construct
  source 1..20: mol_type = other RNA
cttaatcctcacaacggtcc

SEQ ID NO: 10066 - RNA, 20 nt, synthetic construct
  source 1..20: mol_type = other RNA
taatgtggtatatctcactt

SEQ ID NO: 10067 - RNA, 20 nt, synthetic construct
  source 1..20: mol_type = other RNA
atgttgtataaattttattg

SEQ ID NO: 10068 - RNA, 20 nt, synthetic construct
  source 1..20: mol_type = other RNA
gtggtacctgcaaaaatggt

SEQ ID NO: 10069 - RNA, 20 nt, synthetic construct
  source 1..20: mol_type = other RNA
tccccaaaggaaacctcatg

SEQ ID NO: 10070 - RNA, 20 nt, synthetic construct
  source 1..20: mol_type = other RNA
tgcccattaagcagtcactc

SEQ ID NO: 10071 - RNA, 20 nt, synthetic construct
  source 1..20: mol_type = other RNA
tcattaaaatattagttatg

SEQ ID NO: 10072 - RNA, 20 nt, synthetic construct
  source 1..20: mol_type = other RNA
ttaaaatattagttatgaag

SEQ ID NO: 10073 - RNA, 20 nt, synthetic construct
  source 1..20: mol_type = other RNA
tgatataacattgattgaaa

SEQ ID NO: 10074 - RNA, 20 nt, synthetic construct
  source 1..20: mol_type = other RNA
gactctctttacattgtaaa

SEQ ID NO: 10075 - RNA, 20 nt, synthetic construct
  source 1..20: mol_type = other RNA
ctttacattgtaaaaatcat

SEQ ID NO: 10076 - RNA, 20 nt, synthetic construct
  source 1..20: mol_type = other RNA
ttacattgtaaaaatcattt

SEQ ID NO: 10077 - RNA, 20 nt, synthetic construct
  source 1..20: mol_type = other RNA
gacccattaaagtgcaaatg

SEQ ID NO: 10078 - RNA, 20 nt, synthetic construct
  source 1..20: mol_type = other RNA
ctgacccattaaagtgcaaa

SEQ ID NO: 10079 - RNA, 20 nt, synthetic construct
  source 1..20: mol_type = other RNA
caatgccactggactctctg

SEQ ID NO: 10080 - RNA, 20 nt, synthetic construct
  source 1..20: mol_type = other RNA
tgtctgtccgtgaggctgca

SEQ ID NO: 10081 - RNA, 20 nt, synthetic construct
  source 1..20: mol_type = other RNA
cggacagacaggaggtccag

SEQ ID NO: 10082 - RNA, 20 nt, synthetic construct
  source 1..20: mol_type = other RNA
gttcttctggaatttcctcg

SEQ ID NO: 10083 - RNA, 20 nt, synthetic construct
  source 1..20: mol_type = other RNA
tgaacaagctttggcctcag

SEQ ID NO: 10084 - RNA, 20 nt, synthetic construct
  source 1..20: mol_type = other RNA
gtaaccatttctttcatctt

SEQ ID NO: 10085 - RNA, 20 nt, synthetic construct
  source 1..20: mol_type = other RNA
ggccaaatgctcagcacaaa

SEQ ID NO: 10086 - RNA, 20 nt, synthetic construct
  source 1..20: mol_type = other RNA
cccgtctcagtctcagtccc

SEQ ID NO: 10087 - RNA, 20 nt, synthetic construct
  source 1..20: mol_type = other RNA
cgtctcagtctcagtccctt

SEQ ID NO: 10088 - RNA, 20 nt, synthetic construct
  source 1..20: mol_type = other RNA
gtctcagtcccttagacgtc

SEQ ID NO: 10089 - RNA, 20 nt, synthetic construct
  source 1..20: mol_type = other RNA
gtcccttagacgtcagtccc

SEQ ID NO: 10090 - RNA, 20 nt, synthetic construct
  source 1..20: mol_type = other RNA
gaaactccccagatctgtcc

SEQ ID NO: 10091 - RNA, 20 nt, synthetic construct
  source 1..20: mol_type = other RNA
ccagatctgtccctgaatgc

SEQ ID NO: 10092 - RNA, 20 nt, synthetic construct
  source 1..20: mol_type = other RNA
ttagatgatctgaatatgca

SEQ ID NO: 10093 - RNA, 20 nt, synthetic construct
  source 1..20: mol_type = other RNA
agccccaagacgtctcctta

SEQ ID NO: 10094 - RNA, 20 nt, synthetic construct
  source 1..20: mol_type = other RNA
cttgctatggatctggaact

SEQ ID NO: 10095 - RNA, 20 nt, synthetic construct
  source 1..20: mol_type = other RNA
ggccactcaccttcctggtg

SEQ ID NO: 10096 - RNA, 20 nt, synthetic construct
  source 1..20: mol_type = other RNA
ccttcctggtgtgtgctggt

SEQ ID NO: 10097 - RNA, 20 nt, synthetic construct
  source 1..20: mol_type = other RNA
actggaaaagccaccacttc

SEQ ID NO: 10098 - RNA, 20 nt, synthetic construct
  source 1..20: mol_type = other RNA
ctactggaaaagccaccact

SEQ ID NO: 10099 - RNA, 20 nt, synthetic construct
  source 1..20: mol_type = other RNA
accttcctctctactggaaa

SEQ ID NO: 10100 - RNA, 20 nt, synthetic construct
  source 1..20: mol_type = other RNA
gtcctgtaccctctaccttc

SEQ ID NO: 10101 - RNA, 20 nt, synthetic construct
  source 1..20: mol_type = other RNA
agcatctgcagtgcttaagt

SEQ ID NO: 10102 - RNA, 20 nt, synthetic construct
  source 1..20: mol_type = other RNA
taagttcctttctgatttga

SEQ ID NO: 10103 - RNA, 20 nt, synthetic construct
  source 1..20: mol_type = other RNA
tatccatatgtacattttcc

SEQ ID NO: 10104 - RNA, 20 nt, synthetic construct
  source 1..20: mol_type = other RNA
catgaattttcccctacctc

SEQ ID NO: 10105 - RNA, 20 nt, synthetic construct
  source 1..20: mol_type = other RNA
actgtcaccctaaacagagg

SEQ ID NO: 10106 - RNA, 20 nt, synthetic construct
  source 1..20: mol_type = other RNA
gtttagggtgacagtggagg

SEQ ID NO: 10107 - RNA, 20 nt, synthetic construct
  source 1..20: mol_type = other RNA
aagcaaaccagaggccctcc

SEQ ID NO: 10108 - RNA, 20 nt, synthetic construct
  source 1..20: mol_type = other RNA
ggtttgcttcgagaaggaca

SEQ ID NO: 10109 - RNA, 20 nt, synthetic construct
  source 1..20: mol_type = other RNA
ttgtaaaatgtatttgtcct

SEQ ID NO: 10110 - RNA, 20 nt, synthetic construct
  source 1..20: mol_type = other RNA
tgtttcaaggtttgttactt

SEQ ID NO: 10111 - RNA, 20 nt, synthetic construct
  source 1..20: mol_type = other RNA
atccaagtaacaaaccttga

SEQ ID NO: 10112 - RNA, 20 nt, synthetic construct
  source 1..20: mol_type = other RNA
tcattccctcaatccaagta

SEQ ID NO: 10113 - RNA, 20 nt, synthetic construct
  source 1..20: mol_type = other RNA
cgtccaattaattatttctc

SEQ ID NO: 10114 - RNA, 20 nt, synthetic construct
  source 1..20: mol_type = other RNA
gtctcccgtccaattaatta

SEQ ID NO: 10115 - RNA, 20 nt, synthetic construct
  source 1..20: mol_type = other RNA
tttcatcccatctattttta

SEQ ID NO: 10116 - RNA, 20 nt, synthetic construct
  source 1..20: mol_type = other RNA
cctagccctccaccccttga

SEQ ID NO: 10117 - RNA, 20 nt, synthetic construct
  source 1..20: mol_type = other RNA
accccttgacaggcccaggt

SEQ ID NO: 10118 - RNA, 20 nt, synthetic construct
  source 1..20: mol_type = other RNA
ctgtgtccatgtgttctcat

SEQ ID NO: 10119 - RNA, 20 nt, synthetic construct
  source 1..20: mol_type = other RNA
taagtgtgagttgaacaatg

SEQ ID NO: 10120 - RNA, 20 nt, synthetic construct
  source 1..20: mol_type = other RNA
ttgttcaactcacacttatg

SEQ ID NO: 10121 - RNA, 20 nt, synthetic construct
  source 1..20: mol_type = other RNA
ctcataagtgtgagttgaac

SEQ ID NO: 10122 - RNA, 20 nt, synthetic construct
  source 1..20: mol_type = other RNA
cacttatgagtgagaacatg

SEQ ID NO: 10123 - RNA, 20 nt, synthetic construct
  source 1..20: mol_type = other RNA
gcaaactaacacaagaacag

SEQ ID NO: 10124 - RNA, 20 nt, synthetic construct
  source 1..20: mol_type = other RNA
tccttttttatggctgcata

SEQ ID NO: 10125 - RNA, 20 nt, synthetic construct
  source 1..20: mol_type = other RNA
ttgctattgtgaatagtgcc

SEQ ID NO: 10126 - RNA, 20 nt, synthetic construct
  source 1..20: mol_type = other RNA
gggtatatacccagtaatgg

SEQ ID NO: 10127 - RNA, 20 nt, synthetic construct
  source 1..20: mol_type = other RNA
aagatctagcaccagaaaca

SEQ ID NO: 10128 - RNA, 20 nt, synthetic construct
  source 1..20: mol_type = other RNA
caccaacaatatcaaggcat

SEQ ID NO: 10129 - RNA, 20 nt, synthetic construct
  source 1..20: mol_type = other RNA
acatcctctccagcatctgt

SEQ ID NO: 10130 - RNA, 20 nt, synthetic construct
  source 1..20: mol_type = other RNA
ccagcatctgttgtttcctg

SEQ ID NO: 10131 - RNA, 20 nt, synthetic construct
  source 1..20: mol_type = other RNA
agcatctgttgtttcctgac

SEQ ID NO: 10132 - RNA, 20 nt, synthetic construct
  source 1..20: mol_type = other RNA
tgccagttagaatggcgatc

SEQ ID NO: 10133 - RNA, 20 nt, synthetic construct
  source 1..20: mol_type = other RNA
ttgtggttttgatttgcatt

SEQ ID NO: 10134 - RNA, 20 nt, synthetic construct
  source 1..20: mol_type = other RNA
tcatcactgatcattagaga

SEQ ID NO: 10135 - RNA, 20 nt, synthetic construct
  source 1..20: mol_type = other RNA
aatgatcagtgatgatgagc

SEQ ID NO: 10136 - RNA, 20 nt, synthetic construct
  source 1..20: mol_type = other RNA
tatgtttgttggctgcataa

SEQ ID NO: 10137 - RNA, 20 nt, synthetic construct
  source 1..20: mol_type = other RNA
aaaaaaggcatttatgcagc

SEQ ID NO: 10138 - RNA, 20 nt, synthetic construct
  source 1..20: mol_type = other RNA
gatgatagtttcttttgctg

SEQ ID NO: 10139 - RNA, 20 nt, synthetic construct
  source 1..20: mol_type = other RNA
ttggtttaattagatctcat

SEQ ID NO: 10140 - RNA, 20 nt, synthetic construct
  source 1..20: mol_type = other RNA
tttgtctattttggcttttg

SEQ ID NO: 10141 - RNA, 20 nt, synthetic construct
  source 1..20: mol_type = other RNA
catgctatgtcctgaatggt

SEQ ID NO: 10142 - RNA, 20 nt, synthetic construct
  source 1..20: mol_type = other RNA
agatggattaaagacttaaa

SEQ ID NO: 10143 - RNA, 20 nt, synthetic construct
  source 1..20: mol_type = other RNA
tttgatctttgttggcttaa

SEQ ID NO: 10144 - RNA, 20 nt, synthetic construct
  source 1..20: mol_type = other RNA
gataaaatatactttaagcc

SEQ ID NO: 10145 - RNA, 20 nt, synthetic construct
  source 1..20: mol_type = other RNA
aaataaagggatggaagaat

SEQ ID NO: 10146 - RNA, 20 nt, synthetic construct
  source 1..20: mol_type = other RNA
tgtgcagacatacataggct

SEQ ID NO: 10147 - RNA, 20 nt, synthetic construct
  source 1..20: mol_type = other RNA
ttattcaatttgccagtctg

SEQ ID NO: 10148 - RNA, 20 nt, synthetic construct
  source 1..20: mol_type = other RNA
tgaacgaagcactaaacatg

SEQ ID NO: 10149 - RNA, 20 nt, synthetic construct
  source 1..20: mol_type = other RNA
caagagctcctgaacgaagc

SEQ ID NO: 10150 - RNA, 20 nt, synthetic construct
  source 1..20: mol_type = other RNA
tgtgaggcaggccttgtggt

SEQ ID NO: 10151 - RNA, 20 nt, synthetic construct
  source 1..20: mol_type = other RNA
tttgcttatgaagcttagtt

SEQ ID NO: 10152 - RNA, 20 nt, synthetic construct
  source 1..20: mol_type = other RNA
cttcgggcttgttgggtttc

SEQ ID NO: 10153 - RNA, 20 nt, synthetic construct
  source 1..20: mol_type = other RNA
tcgggcttgttgggtttctg

SEQ ID NO: 10154 - RNA, 20 nt, synthetic construct
  source 1..20: mol_type = other RNA
gcagaaacccaacaagcccg

SEQ ID NO: 10155 - RNA, 20 nt, synthetic construct
  source 1..20: mol_type = other RNA
ctgcagaaacccaacaagcc

SEQ ID NO: 10156 - RNA, 20 nt, synthetic construct
  source 1..20: mol_type = other RNA
ctggctgcccttagaaattt

SEQ ID NO: 10157 - RNA, 20 nt, synthetic construct
  source 1..20: mol_type = other RNA
ggctgcccttagaaattttt

SEQ ID NO: 10158 - RNA, 20 nt, synthetic construct
  source 1..20: mol_type = other RNA
agacataatcgtcagattca

SEQ ID NO: 10159 - RNA, 20 nt, synthetic construct
  source 1..20: mol_type = other RNA
agaagagccacctcaagaca

SEQ ID NO: 10160 - RNA, 20 nt, synthetic construct
  source 1..20: mol_type = other RNA
tcgagaagagccacctcaag

SEQ ID NO: 10161 - RNA, 20 nt, synthetic construct
  source 1..20: mol_type = other RNA
tctcgaggagtatctttgtg

SEQ ID NO: 10162 - RNA, 20 nt, synthetic construct
  source 1..20: mol_type = other RNA
aggagtatctttgtggtgtt

SEQ ID NO: 10163 - RNA, 20 nt, synthetic construct
  source 1..20: mol_type = other RNA
gtatttcctgaatttgaatg

SEQ ID NO: 10164 - RNA, 20 nt, synthetic construct
  source 1..20: mol_type = other RNA
tcaggatattatcaaggaga

SEQ ID NO: 10165 - RNA, 20 nt, synthetic construct
  source 1..20: mol_type = other RNA
ccttgataatatcctgaaga

SEQ ID NO: 10166 - RNA, 20 nt, synthetic construct
  source 1..20: mol_type = other RNA
ttgataatatcctgaagagt

SEQ ID NO: 10167 - RNA, 20 nt, synthetic construct
  source 1..20: mol_type = other RNA
ccatcactttcaggtacatc

SEQ ID NO: 10168 - RNA, 20 nt, synthetic construct
  source 1..20: mol_type = other RNA
aagaaatatgggactatgtg

SEQ ID NO: 10169 - RNA, 20 nt, synthetic construct
  source 1..20: mol_type = other RNA
attcttgtcttcttgcttta

SEQ ID NO: 10170 - RNA, 20 nt, synthetic construct
  source 1..20: mol_type = other RNA
gatatcctttcttttgcttg

SEQ ID NO: 10171 - RNA, 20 nt, synthetic construct
  source 1..20: mol_type = other RNA
aaactggttattctacttag

SEQ ID NO: 10172 - RNA, 20 nt, synthetic construct
  source 1..20: mol_type = other RNA
gagctaaagcagcatgttct

SEQ ID NO: 10173 - RNA, 20 nt, synthetic construct
  source 1..20: mol_type = other RNA
gaggattttgttattataca

SEQ ID NO: 10174 - RNA, 20 nt, synthetic construct
  source 1..20: mol_type = other RNA
agtggtatgctttgattcct

SEQ ID NO: 10175 - RNA, 20 nt, synthetic construct
  source 1..20: mol_type = other RNA
tcgtatctttatttgtgatt

SEQ ID NO: 10176 - RNA, 20 nt, synthetic construct
  source 1..20: mol_type = other RNA
cttcacctgtaaggactcaa

SEQ ID NO: 10177 - RNA, 20 nt, synthetic construct
  source 1..20: mol_type = other RNA
aacagactgaaagtaaaggg

SEQ ID NO: 10178 - RNA, 20 nt, synthetic construct
  source 1..20: mol_type = other RNA
atcttcttgtttccatttgc

SEQ ID NO: 10179 - RNA, 20 nt, synthetic construct
  source 1..20: mol_type = other RNA
atctgtataactacccctct

SEQ ID NO: 10180 - RNA, 20 nt, synthetic construct
  source 1..20: mol_type = other RNA
aaaattaaaaatgtttaagt

SEQ ID NO: 10181 - RNA, 20 nt, synthetic construct
  source 1..20: mol_type = other RNA
gaagaacatttcctttgaac

SEQ ID NO: 10182 - RNA, 20 nt, synthetic construct
  source 1..20: mol_type = other RNA
cactgctataaagaatacta

SEQ ID NO: 10183 - RNA, 20 nt, synthetic construct
  source 1..20: mol_type = other RNA
ttgtagtattctttatagca

SEQ ID NO: 10184 - RNA, 20 nt, synthetic construct
  source 1..20: mol_type = other RNA
gtctctttgtagtattcttt

SEQ ID NO: 10185 - RNA, 20 nt, synthetic construct
  source 1..20: mol_type = other RNA
gagttaattaaacatctttc

SEQ ID NO: 10186 - RNA, 20 nt, synthetic construct
  source 1..20: mol_type = other RNA
gagttccacaggcttaacag

SEQ ID NO: 10187 - RNA, 20 nt, synthetic construct
  source 1..20: mol_type = other RNA
ttagccatgcttcctgttaa

SEQ ID NO: 10188 - RNA, 20 nt, synthetic construct
  source 1..20: mol_type = other RNA
ttcatcttccgccatgatta

SEQ ID NO: 10189 - RNA, 20 nt, synthetic construct
  source 1..20: mol_type = other RNA
gtcctgccaccttgtgaaga

SEQ ID NO: 10190 - RNA, 20 nt, synthetic construct
  source 1..20: mol_type = other RNA
cactccgtcctgccaccttg

SEQ ID NO: 10191 - RNA, 20 nt, synthetic construct
  source 1..20: mol_type = other RNA
ttcacacactcacactccgt

SEQ ID NO: 10192 - RNA, 20 nt, synthetic construct
  source 1..20: mol_type = other RNA
ctcactctcacaagaacagc

SEQ ID NO: 10193 - RNA, 20 nt, synthetic construct
  source 1..20: mol_type = other RNA
ctctcacaagaacagcatag

SEQ ID NO: 10194 - RNA, 20 nt, synthetic construct
  source 1..20: mol_type = other RNA
cacaagaacagcatagggaa

SEQ ID NO: 10195 - RNA, 20 nt, synthetic construct
  source 1..20: mol_type = other RNA
caagaacagcatagggaaaa

SEQ ID NO: 10196 - RNA, 20 nt, synthetic construct
  source 1..20: mol_type = other RNA
cactgggctcctcccttgac

SEQ ID NO: 10197 - RNA, 20 nt, synthetic construct
  source 1..20: mol_type = other RNA
tcccttgacacatggggatc

SEQ ID NO: 10198 - RNA, 20 nt, synthetic construct
  source 1..20: mol_type = other RNA
tgatccccatgtgtcaaggg

SEQ ID NO: 10199 - RNA, 20 nt, synthetic construct
  source 1..20: mol_type = other RNA
cttgacacatggggatcatg

SEQ ID NO: 10200 - RNA, 20 nt, synthetic construct
  source 1..20: mol_type = other RNA
tcgtgaattgtaaccctcat

SEQ ID NO: 10201 - RNA, 20 nt, synthetic construct
  source 1..20: mol_type = other RNA
tgttgagttgagtttccctt

SEQ ID NO: 10202 - RNA, 20 nt, synthetic construct
  source 1..20: mol_type = other RNA
actcaacatgaggtaaagca

SEQ ID NO: 10203 - RNA, 20 nt, synthetic construct
  source 1..20: mol_type = other RNA
acatgaggtaaagcagactt

SEQ ID NO: 10204 - RNA, 20 nt, synthetic construct
  source 1..20: mol_type = other RNA
ttttacagtttttgacttaa

SEQ ID NO: 10205 - RNA, 20 nt, synthetic construct
  source 1..20: mol_type = other RNA
ttattattacattcttcttc

SEQ ID NO: 10206 - RNA, 20 nt, synthetic construct
  source 1..20: mol_type = other RNA
tgtgagatctattaatgttt

SEQ ID NO: 10207 - RNA, 20 nt, synthetic construct
  source 1..20: mol_type = other RNA
cctgtgagatctattaatgt

SEQ ID NO: 10208 - RNA, 20 nt, synthetic construct
  source 1..20: mol_type = other RNA
caggagagctacactgtaat

SEQ ID NO: 10209 - RNA, 20 nt, synthetic construct
  source 1..20: mol_type = other RNA
actttcactaatggacagat

SEQ ID NO: 10210 - RNA, 20 nt, synthetic construct
  source 1..20: mol_type = other RNA
gtctggatgatctgtccatt

SEQ ID NO: 10211 - RNA, 20 nt, synthetic construct
  source 1..20: mol_type = other RNA
tgtttccatattgattctct

SEQ ID NO: 10212 - RNA, 20 nt, synthetic construct
  source 1..20: mol_type = other RNA
agtgcacagggaatattctc

SEQ ID NO: 10213 - RNA, 20 nt, synthetic construct
  source 1..20: mol_type = other RNA
agaatagatcatatgttagg

SEQ ID NO: 10214 - RNA, 20 nt, synthetic construct
  source 1..20: mol_type = other RNA
ttgattgttcaggagcatat

SEQ ID NO: 10215 - RNA, 20 nt, synthetic construct
  source 1..20: mol_type = other RNA
tgaacaatcaatgagtcgaa

SEQ ID NO: 10216 - RNA, 20 nt, synthetic construct
  source 1..20: mol_type = other RNA
tttaatatcttcttcgactc

SEQ ID NO: 10217 - RNA, 20 nt, synthetic construct
  source 1..20: mol_type = other RNA
tgtcttgattttttaaaatt

SEQ ID NO: 10218 - RNA, 20 nt, synthetic construct
  source 1..20: mol_type = other RNA
gcaaactatcataaggacag

SEQ ID NO: 10219 - RNA, 20 nt, synthetic construct
  source 1..20: mol_type = other RNA
ctcataggtaggaattgaac

SEQ ID NO: 10220 - RNA, 20 nt, synthetic construct
  source 1..20: mol_type = other RNA
ttgttcaattcctacctatg

SEQ ID NO: 10221 - RNA, 20 nt, synthetic construct
  source 1..20: mol_type = other RNA
taggtaggaattgaacaatg

SEQ ID NO: 10222 - RNA, 20 nt, synthetic construct
  source 1..20: mol_type = other RNA
taatgctatcccttcaccag

SEQ ID NO: 10223 - RNA, 20 nt, synthetic construct
  source 1..20: mol_type = other RNA
tcatttacattagatatttc

SEQ ID NO: 10224 - RNA, 20 nt, synthetic construct
  source 1..20: mol_type = other RNA
aattaaagctacattgttaa

SEQ ID NO: 10225 - RNA, 20 nt, synthetic construct
  source 1..20: mol_type = other RNA
ttccaaatgatagctttctc

SEQ ID NO: 10226 - RNA, 20 nt, synthetic construct
  source 1..20: mol_type = other RNA
agacaaaggaaaatggacac

SEQ ID NO: 10227 - RNA, 20 nt, synthetic construct
  source 1..20: mol_type = other RNA
taaaaccacttttgctgcat

SEQ ID NO: 10228 - RNA, 20 nt, synthetic construct
  source 1..20: mol_type = other RNA
aataagcaacctaagattac

SEQ ID NO: 10229 - RNA, 20 nt, synthetic construct
  source 1..20: mol_type = other RNA
acaaactagacaaagaacta

SEQ ID NO: 10230 - RNA, 20 nt, synthetic construct
  source 1..20: mol_type = other RNA
gtttttcttaatctagctaa

SEQ ID NO: 10231 - RNA, 20 nt, synthetic construct
  source 1..20: mol_type = other RNA
ttagtcacatttatgtgatg

SEQ ID NO: 10232 - RNA, 20 nt, synthetic construct
  source 1..20: mol_type = other RNA
catttatgtgatgagtcaca

SEQ ID NO: 10233 - RNA, 20 nt, synthetic construct
  source 1..20: mol_type = other RNA
cattttattgatttacatat

SEQ ID NO: 10234 - RNA, 20 nt, synthetic construct
  source 1..20: mol_type = other RNA
tcatccctgggatgtaagat

SEQ ID NO: 10235 - RNA, 20 nt, synthetic construct
  source 1..20: mol_type = other RNA
tgctggattaggtttgcaag

SEQ ID NO: 10236 - RNA, 20 nt, synthetic construct
  source 1..20: mol_type = other RNA
ctttcaggttttggtatcag

SEQ ID NO: 10237 - RNA, 20 nt, synthetic construct
  source 1..20: mol_type = other RNA
aaaaaaattgaggaagaggg

SEQ ID NO: 10238 - RNA, 20 nt, synthetic construct
  source 1..20: mol_type = other RNA
ctcttcctcaattttttttg

SEQ ID NO: 10239 - RNA, 20 nt, synthetic construct
  source 1..20: mol_type = other RNA
tggccttttgtttcttagta

SEQ ID NO: 10240 - RNA, 20 nt, synthetic construct
  source 1..20: mol_type = other RNA
tgggagggtgtatgtgtcca

SEQ ID NO: 10241 - RNA, 20 nt, synthetic construct
  source 1..20: mol_type = other RNA
agtaatttatccatctcttc

SEQ ID NO: 10242 - RNA, 20 nt, synthetic construct
  source 1..20: mol_type = other RNA
gtagtagtttctgatggtta

SEQ ID NO: 10243 - RNA, 20 nt, synthetic construct
  source 1..20: mol_type = other RNA
gtgctaacatcccccttgtc

SEQ ID NO: 10244 - RNA, 20 nt, synthetic construct
  source 1..20: mol_type = other RNA
tttgtaattgtgttactttg

SEQ ID NO: 10245 - RNA, 20 nt, synthetic construct
  source 1..20: mol_type = other RNA
tctctctcttttcttcttta

SEQ ID NO: 10246 - RNA, 20 nt, synthetic construct
  source 1..20: mol_type = other RNA
tattaatgttttcaaaaaac

SEQ ID NO: 10247 - RNA, 20 nt, synthetic construct
  source 1..20: mol_type = other RNA
agacatgaaaaaacattcaa

SEQ ID NO: 10248 - RNA, 20 nt, synthetic construct
  source 1..20: mol_type = other RNA
tgactttcttcatttcaact

SEQ ID NO: 10249 - RNA, 20 nt, synthetic construct
  source 1..20: mol_type = other RNA
cagagattccagtatgttgt

SEQ ID NO: 10250 - RNA, 20 nt, synthetic construct
  source 1..20: mol_type = other RNA
ttcaggagcatgttgtttaa

SEQ ID NO: 10251 - RNA, 20 nt, synthetic construct
  source 1..20: mol_type = other RNA
tggcttctatttttattgag

SEQ ID NO: 10252 - RNA, 20 nt, synthetic construct
  source 1..20: mol_type = other RNA
tctgagggtgtttttggtat

SEQ ID NO: 10253 - RNA, 20 nt, synthetic construct
  source 1..20: mol_type = other RNA
gagggtgtttttggtataat

SEQ ID NO: 10254 - RNA, 20 nt, synthetic construct
  source 1..20: mol_type = other RNA
aattatgtggttgattttta

SEQ ID NO: 10255 - RNA, 20 nt, synthetic construct
  source 1..20: mol_type = other RNA
atcagatccatttgatccaa

SEQ ID NO: 10256 - RNA, 20 nt, synthetic construct
  source 1..20: mol_type = other RNA
tgaatatctttgtaagtttt

SEQ ID NO: 10257 - RNA, 20 nt, synthetic construct
  source 1..20: mol_type = other RNA
aatactgtcagtgaactgct

SEQ ID NO: 10258 - RNA, 20 nt, synthetic construct
  source 1..20: mol_type = other RNA
gtgaactgctgaagtctccc

SEQ ID NO: 10259 - RNA, 20 nt, synthetic construct
  source 1..20: mol_type = other RNA
cccactattattgtgtgggc

SEQ ID NO: 10260 - RNA, 20 nt, synthetic construct
  source 1..20: mol_type = other RNA
ctttgtaggtctctaagaac

SEQ ID NO: 10261 - RNA, 20 nt, synthetic construct
  source 1..20: mol_type = other RNA
ctaagaactttctttatgaa

SEQ ID NO: 10262 - RNA, 20 nt, synthetic construct
  source 1..20: mol_type = other RNA
tgttgaattgaaccctttac

SEQ ID NO: 10263 - RNA, 20 nt, synthetic construct
  source 1..20: mol_type = other RNA
tttttggtctttgttggttt

SEQ ID NO: 10264 - RNA, 20 nt, synthetic construct
  source 1..20: mol_type = other RNA
ttgttggtttaaagtctgtt

SEQ ID NO: 10265 - RNA, 20 nt, synthetic construct
  source 1..20: mol_type = other RNA
gttttgtctgaaattaggat

SEQ ID NO: 10266 - RNA, 20 nt, synthetic construct
  source 1..20: mol_type = other RNA
gaaattaggattgccacccc

SEQ ID NO: 10267 - RNA, 20 nt, synthetic construct
  source 1..20: mol_type = other RNA
ttacatgtgagatggttctc

SEQ ID NO: 10268 - RNA, 20 nt, synthetic construct
  source 1..20: mol_type = other RNA
agagaaccatctcacatgta

SEQ ID NO: 10269 - RNA, 20 nt, synthetic construct
  source 1..20: mol_type = other RNA
tgcttttttatcgagcttgc

SEQ ID NO: 10270 - RNA, 20 nt, synthetic construct
  source 1..20: mol_type = other RNA
ctggtttgtgaatttaattg

SEQ ID NO: 10271 - RNA, 20 nt, synthetic construct
  source 1..20: mol_type = other RNA
ggtggtaacaaactccctca

SEQ ID NO: 10272 - RNA, 20 nt, synthetic construct
  source 1..20: mol_type = other RNA
tctacaaagggaaccccatc

SEQ ID NO: 10273 - RNA, 20 nt, synthetic construct
  source 1..20: mol_type = other RNA
aaatgaaagacagaatgtta

SEQ ID NO: 10274 - RNA, 20 nt, synthetic construct
  source 1..20: mol_type = other RNA
ttcattttgaccttggaaaa

SEQ ID NO: 10275 - RNA, 20 nt, synthetic construct
  source 1..20: mol_type = other RNA
tgggatgatcttcttgtgta

SEQ ID NO: 10276 - RNA, 20 nt, synthetic construct
  source 1..20: mol_type = other RNA
aattcagaaaatacagagaa

SEQ ID NO: 10277 - RNA, 20 nt, synthetic construct
  source 1..20: mol_type = other RNA
actgtctgattgcagagagc

SEQ ID NO: 10278 - RNA, 20 nt, synthetic construct
  source 1..20: mol_type = other RNA
gattgcagagagctagtctt

SEQ ID NO: 10279 - RNA, 20 nt, synthetic construct
  source 1..20: mol_type = other RNA
tccatttctgagatcctttc

SEQ ID NO: 10280 - RNA, 20 nt, synthetic construct
  source 1..20: mol_type = other RNA
attctcctattaatacttgg

SEQ ID NO: 10281 - RNA, 20 nt, synthetic construct
  source 1..20: mol_type = other RNA
gatccgttaggttctttttt

SEQ ID NO: 10282 - RNA, 20 nt, synthetic construct
  source 1..20: mol_type = other RNA
gaattatatttctgtcattt

SEQ ID NO: 10283 - RNA, 20 nt, synthetic construct
  source 1..20: mol_type = other RNA
tttgagttagctcagtcttg

SEQ ID NO: 10284 - RNA, 20 nt, synthetic construct
  source 1..20: mol_type = other RNA
tgttaagaacccttgttgga

SEQ ID NO: 10285 - RNA, 20 nt, synthetic construct
  source 1..20: mol_type = other RNA
tccaaacaactgcaccagtt

SEQ ID NO: 10286 - RNA, 20 nt, synthetic construct
  source 1..20: mol_type = other RNA
tatgtcctccaaacaactgc

SEQ ID NO: 10287 - RNA, 20 nt, synthetic construct
  source 1..20: mol_type = other RNA
ctgtgtgggtgtttctttaa

SEQ ID NO: 10288 - RNA, 20 nt, synthetic construct
  source 1..20: mol_type = other RNA
attggctgtactcaatctac

SEQ ID NO: 10289 - RNA, 20 nt, synthetic construct
  source 1..20: mol_type = other RNA
gctacaaataaagaccctgt

SEQ ID NO: 10290 - RNA, 20 nt, synthetic construct
  source 1..20: mol_type = other RNA
ttatttgtagctgacttctt

SEQ ID NO: 10291 - RNA, 20 nt, synthetic construct
  source 1..20: mol_type = other RNA
ttggtttcatagtggggcat

SEQ ID NO: 10292 - RNA, 20 nt, synthetic construct
  source 1..20: mol_type = other RNA
ttgagtctctgaattcataa

SEQ ID NO: 10293 - RNA, 20 nt, synthetic construct
  source 1..20: mol_type = other RNA
ctgaattcataactccagca

SEQ ID NO: 10294 - RNA, 20 nt, synthetic construct
  source 1..20: mol_type = other RNA
ttattgttttacatcatgtt

SEQ ID NO: 10295 - RNA, 20 nt, synthetic construct
  source 1..20: mol_type = other RNA
aatgtgtgtgggagggtgtt

SEQ ID NO: 10296 - RNA, 20 nt, synthetic construct
  source 1..20: mol_type = other RNA
cctgcctaacaccctcccac

SEQ ID NO: 10297 - RNA, 20 nt, synthetic construct
  source 1..20: mol_type = other RNA
gcctctcccttagctgcagg

SEQ ID NO: 10298 - RNA, 20 nt, synthetic construct
  source 1..20: mol_type = other RNA
aggtgctgataccacatcct

SEQ ID NO: 10299 - RNA, 20 nt, synthetic construct
  source 1..20: mol_type = other RNA
gggcatactgaaaaatgaag

SEQ ID NO: 10300 - RNA, 20 nt, synthetic construct
  source 1..20: mol_type = other RNA
gatagatataattattgtca

SEQ ID NO: 10301 - RNA, 20 nt, synthetic construct
  source 1..20: mol_type = other RNA
agggggtaagtctgatagat

SEQ ID NO: 10302 - RNA, 20 nt, synthetic construct
  source 1..20: mol_type = other RNA
tagtgttccagtggtcaagg

SEQ ID NO: 10303 - RNA, 20 nt, synthetic construct
  source 1..20: mol_type = other RNA
ggcagagatcccaaaacagt

SEQ ID NO: 10304 - RNA, 20 nt, synthetic construct
  source 1..20: mol_type = other RNA
tcaccagcacctctgagaaa

SEQ ID NO: 10305 - RNA, 20 nt, synthetic construct
  source 1..20: mol_type = other RNA
gaacgcttttctaggttcca

SEQ ID NO: 10306 - RNA, 20 nt, synthetic construct
  source 1..20: mol_type = other RNA
ggaacctagaaaagcgttct

SEQ ID NO: 10307 - RNA, 20 nt, synthetic construct
  source 1..20: mol_type = other RNA
gcagagtcagaacgcttttc

SEQ ID NO: 10308 - RNA, 20 nt, synthetic construct
  source 1..20: mol_type = other RNA
tcaccagcacctctgagaaa

SEQ ID NO: 10309 - RNA, 20 nt, synthetic construct
  source 1..20: mol_type = other RNA
gaacgcttttctagggctcc

SEQ ID NO: 10310 - RNA, 20 nt, synthetic construct
  source 1..20: mol_type = other RNA
ggagccctagaaaagcgttc

SEQ ID NO: 10311 - RNA, 20 nt, synthetic construct
  source 1..20: mol_type = other RNA
ggctagtggcagagtcagaa

SEQ ID NO: 10312 - RNA, 20 nt, synthetic construct
  source 1..20: mol_type = other RNA
gtctggctagtggcagagtc

SEQ ID NO: 10313 - RNA, 20 nt, synthetic construct
  source 1..20: mol_type = other RNA
aggtctgtctggctagtggc

SEQ ID NO: 10314 - RNA, 20 nt, synthetic construct
  source 1..20: mol_type = other RNA
tacaaagagttaacgtgcct

SEQ ID NO: 10315 - RNA, 20 nt, synthetic construct
  source 1..20: mol_type = other RNA
agtcatacaaagagttaacg

SEQ ID NO: 10316 - RNA, 20 nt, synthetic construct
  source 1..20: mol_type = other RNA
tttgaagaaaggtttttgtt

SEQ ID NO: 10317 - RNA, 20 nt, synthetic construct
  source 1..20: mol_type = other RNA
agataattgcaaagtttgct

SEQ ID NO: 10318 - RNA, 20 nt, synthetic construct
  source 1..20: mol_type = other RNA
tcctccttggtttcttgatc

SEQ ID NO: 10319 - RNA, 20 nt, synthetic construct
  source 1..20: mol_type = other RNA
gggaacactgaggccaacta

SEQ ID NO: 10320 - RNA, 20 nt, synthetic construct
  source 1..20: mol_type = other RNA
tagaggtttgcagcatttaa

SEQ ID NO: 10321 - RNA, 20 nt, synthetic construct
  source 1..20: mol_type = other RNA
ccctgtgccatcctgcacct

SEQ ID NO: 10322 - RNA, 20 nt, synthetic construct
  source 1..20: mol_type = other RNA
cgacagccagtaagtgggaa

SEQ ID NO: 10323 - RNA, 20 nt, synthetic construct
  source 1..20: mol_type = other RNA
ggacttagaaaagtcatgaa

SEQ ID NO: 10324 - RNA, 20 nt, synthetic construct
  source 1..20: mol_type = other RNA
tgaactctcattgattgttt

SEQ ID NO: 10325 - RNA, 20 nt, synthetic construct
  source 1..20: mol_type = other RNA
ggggagaaacaataagaatg

SEQ ID NO: 10326 - RNA, 20 nt, synthetic construct
  source 1..20: mol_type = other RNA
agcacgtgctacgcactcca

SEQ ID NO: 10327 - RNA, 20 nt, synthetic construct
  source 1..20: mol_type = other RNA
tgttagatacaactctattc

SEQ ID NO: 10328 - RNA, 20 nt, synthetic construct
  source 1..20: mol_type = other RNA
cttgcaagaaagagtcatgt

SEQ ID NO: 10329 - RNA, 20 nt, synthetic construct
  source 1..20: mol_type = other RNA
ttaggctcacatgatggccc

SEQ ID NO: 10330 - RNA, 20 nt, synthetic construct
  source 1..20: mol_type = other RNA
agccatgcagtaggcatcat

SEQ ID NO: 10331 - RNA, 20 nt, synthetic construct
  source 1..20: mol_type = other RNA
ttcctggcaaagcaagagct

SEQ ID NO: 10332 - RNA, 20 nt, synthetic construct
  source 1..20: mol_type = other RNA
ccattaagtgaacaatagtt

SEQ ID NO: 10333 - RNA, 20 nt, synthetic construct
  source 1..20: mol_type = other RNA
gagaggttgaacttgggtca

SEQ ID NO: 10334 - RNA, 20 nt, synthetic construct
  source 1..20: mol_type = other RNA
caggcctgtccctgaaccca

SEQ ID NO: 10335 - RNA, 20 nt, synthetic construct
  source 1..20: mol_type = other RNA
ctgaacccatcactgattgg

SEQ ID NO: 10336 - RNA, 20 nt, synthetic construct
  source 1..20: mol_type = other RNA
tgcctccacctctagcatgt

SEQ ID NO: 10337 - RNA, 20 nt, synthetic construct
  source 1..20: mol_type = other RNA
atcaccctacatcccataat

SEQ ID NO: 10338 - RNA, 20 nt, synthetic construct
  source 1..20: mol_type = other RNA
catggaagatggtagagcca

SEQ ID NO: 10339 - RNA, 20 nt, synthetic construct
  source 1..20: mol_type = other RNA
acatcatcatcaccatccac

SEQ ID NO: 10340 - RNA, 20 nt, synthetic construct
  source 1..20: mol_type = other RNA
ctattatcatcaccctcaac

SEQ ID NO: 10341 - RNA, 20 nt, synthetic construct
  source 1..20: mol_type = other RNA
tggtgatggtgatagtgata

SEQ ID NO: 10342 - RNA, 20 nt, synthetic construct
  source 1..20: mol_type = other RNA
actgatgatgatagtgatgg

SEQ ID NO: 10343 - RNA, 20 nt, synthetic construct
  source 1..20: mol_type = other RNA
cacctgcaggtccactgaga

SEQ ID NO: 10344 - RNA, 20 nt, synthetic construct
  source 1..20: mol_type = other RNA
actgagaaaatgattctcag

SEQ ID NO: 10345 - RNA, 20 nt, synthetic construct
  source 1..20: mol_type = other RNA
agttagtgttctgagaatca

SEQ ID NO: 10346 - RNA, 20 nt, synthetic construct
  source 1..20: mol_type = other RNA
ttattgacatgtagaaaatt

SEQ ID NO: 10347 - RNA, 20 nt, synthetic construct
  source 1..20: mol_type = other RNA
ataatgacatcaggtcaatt

SEQ ID NO: 10348 - RNA, 20 nt, synthetic construct
  source 1..20: mol_type = other RNA
attggcgttctcagcctctg

SEQ ID NO: 10349 - RNA, 20 nt, synthetic construct
  source 1..20: mol_type = other RNA
aagttttcctgctctcccct

SEQ ID NO: 10350 - RNA, 20 nt, synthetic construct
  source 1..20: mol_type = other RNA
gggaacacctggaaacatga

SEQ ID NO: 10351 - RNA, 20 nt, synthetic construct
  source 1..20: mol_type = other RNA
attgattgtggatgacgact

SEQ ID NO: 10352 - RNA, 20 nt, synthetic construct
  source 1..20: mol_type = other RNA
gtcgtcatccacaatcaatg

SEQ ID NO: 10353 - RNA, 20 nt, synthetic construct
  source 1..20: mol_type = other RNA
tcatccacaatcaatggact

SEQ ID NO: 10354 - RNA, 20 nt, synthetic construct
  source 1..20: mol_type = other RNA
tccacaatcaatggactgat

SEQ ID NO: 10355 - RNA, 20 nt, synthetic construct
  source 1..20: mol_type = other RNA
agcggcaggatcagtccatt

SEQ ID NO: 10356 - RNA, 20 nt, synthetic construct
  source 1..20: mol_type = other RNA
cctgtggcctacctgccctc

SEQ ID NO: 10357 - RNA, 20 nt, synthetic construct
  source 1..20: mol_type = other RNA
tctctgagggcaggtaggcc

SEQ ID NO: 10358 - RNA, 20 nt, synthetic construct
  source 1..20: mol_type = other RNA
gccactggatggcagcacct

SEQ ID NO: 10359 - RNA, 20 nt, synthetic construct
  source 1..20: mol_type = other RNA
aggtgatgcaccctctgccc

SEQ ID NO: 10360 - RNA, 20 nt, synthetic construct
  source 1..20: mol_type = other RNA
gaaacttccatcatgcagct

SEQ ID NO: 10361 - RNA, 20 nt, synthetic construct
  source 1..20: mol_type = other RNA
cagcacctcactccagaggc

SEQ ID NO: 10362 - RNA, 20 nt, synthetic construct
  source 1..20: mol_type = other RNA
actccagatgcagtcaggtt

SEQ ID NO: 10363 - RNA, 20 nt, synthetic construct
  source 1..20: mol_type = other RNA
ggtttctgaaccaaagtcaa

SEQ ID NO: 10364 - RNA, 20 nt, synthetic construct
  source 1..20: mol_type = other RNA
atgatctaagtgcagtcaaa

SEQ ID NO: 10365 - RNA, 20 nt, synthetic construct
  source 1..20: mol_type = other RNA
aaggctctgggggaagaaag

SEQ ID NO: 10366 - RNA, 20 nt, synthetic construct
  source 1..20: mol_type = other RNA
atctggaaaaacagcatttc

SEQ ID NO: 10367 - RNA, 20 nt, synthetic construct
  source 1..20: mol_type = other RNA
aagaagtataaattagaaaa

SEQ ID NO: 10368 - RNA, 20 nt, synthetic construct
  source 1..20: mol_type = other RNA
tgattcattttctaatttat

SEQ ID NO: 10369 - RNA, 20 nt, synthetic construct
  source 1..20: mol_type = other RNA
ctagaaaacaatcacttcac

SEQ ID NO: 10370 - RNA, 20 nt, synthetic construct
  source 1..20: mol_type = other RNA
taaccttctagaaaataaat

SEQ ID NO: 10371 - RNA, 20 nt, synthetic construct
  source 1..20: mol_type = other RNA
cccaataacactgccaattt

SEQ ID NO: 10372 - RNA, 20 nt, synthetic construct
  source 1..20: mol_type = other RNA
atataatttatgggaactta

SEQ ID NO: 10373 - RNA, 20 nt, synthetic construct
  source 1..20: mol_type = other RNA
ctgcccaaatgcttcctccc

SEQ ID NO: 10374 - RNA, 20 nt, synthetic construct
  source 1..20: mol_type = other RNA
gcggagtcactgcccaaatg

SEQ ID NO: 10375 - RNA, 20 nt, synthetic construct
  source 1..20: mol_type = other RNA
agttcaacctgagcctgggt

SEQ ID NO: 10376 - RNA, 20 nt, synthetic construct
  source 1..20: mol_type = other RNA
tatgaaacaggcagttccat

SEQ ID NO: 10377 - RNA, 20 nt, synthetic construct
  source 1..20: mol_type = other RNA
tcatttactaagcattatcc

SEQ ID NO: 10378 - RNA, 20 nt, synthetic construct
  source 1..20: mol_type = other RNA
gaaaatataaaaacaatagc

SEQ ID NO: 10379 - RNA, 20 nt, synthetic construct
  source 1..20: mol_type = other RNA
gagaaatgcaattgctattg

SEQ ID NO: 10380 - RNA, 20 nt, synthetic construct
  source 1..20: mol_type = other RNA
tggtgctttgcggttggttg

SEQ ID NO: 10381 - RNA, 20 nt, synthetic construct
  source 1..20: mol_type = other RNA
atgttccaaaaacctggatt

SEQ ID NO: 10382 - RNA, 20 nt, synthetic construct
  source 1..20: mol_type = other RNA
tataagagtctatgttccaa

SEQ ID NO: 10383 - RNA, 20 nt, synthetic construct
  source 1..20: mol_type = other RNA
ggcagcattgggagctgcct

SEQ ID NO: 10384 - RNA, 20 nt, synthetic construct
  source 1..20: mol_type = other RNA
gtgaggctgtagaacacaag

SEQ ID NO: 10385 - RNA, 20 nt, synthetic construct
  source 1..20: mol_type = other RNA
gtccgtgaggctgtagaaca

SEQ ID NO: 10386 - RNA, 20 nt, synthetic construct
  source 1..20: mol_type = other RNA
atcaccactgctctgttctt

SEQ ID NO: 10387 - RNA, 20 nt, synthetic construct
  source 1..20: mol_type = other RNA
acaacatgttcacaaggaaa

SEQ ID NO: 10388 - RNA, 20 nt, synthetic construct
  source 1..20: mol_type = other RNA
aatccactgagctctgtgct

SEQ ID NO: 10389 - RNA, 20 nt, synthetic construct
  source 1..20: mol_type = other RNA
cttgatcttttcttaccttg

SEQ ID NO: 10390 - RNA, 20 nt, synthetic construct
  source 1..20: mol_type = other RNA
tgtgctctcctgtctcagtc

SEQ ID NO: 10391 - RNA, 20 nt, synthetic construct
  source 1..20: mol_type = other RNA
aagggactgagactgagaca

SEQ ID NO: 10392 - RNA, 20 nt, synthetic construct
  source 1..20: mol_type = other RNA
cagtctcagtcccttagact

SEQ ID NO: 10393 - RNA, 20 nt, synthetic construct
  source 1..20: mol_type = other RNA
cagtcccttagacttgagtc

SEQ ID NO: 10394 - RNA, 20 nt, synthetic construct
  source 1..20: mol_type = other RNA
cttagacttgagtcccaaag

SEQ ID NO: 10395 - RNA, 20 nt, synthetic construct
  source 1..20: mol_type = other RNA
caaagtagcgaattcaagta

SEQ ID NO: 10396 - RNA, 20 nt, synthetic construct
  source 1..20: mol_type = other RNA
tccattgattaaatcctact

SEQ ID NO: 10397 - RNA, 20 nt, synthetic construct
  source 1..20: mol_type = other RNA
aagtgttgctcagaaactcc

SEQ ID NO: 10398 - RNA, 20 nt, synthetic construct
  source 1..20: mol_type = other RNA
caaatgtatattcagatcat

SEQ ID NO: 10399 - RNA, 20 nt, synthetic construct
  source 1..20: mol_type = other RNA
ccttggatgatctgaatata

SEQ ID NO: 10400 - RNA, 20 nt, synthetic construct
  source 1..20: mol_type = other RNA
gaggtagttatggcacttat

SEQ ID NO: 10401 - RNA, 20 nt, synthetic construct
  source 1..20: mol_type = other RNA
ctggccaccgggacacccca

SEQ ID NO: 10402 - RNA, 20 nt, synthetic construct
  source 1..20: mol_type = other RNA
cggtggccagggactaaagt

SEQ ID NO: 10403 - RNA, 20 nt, synthetic construct
  source 1..20: mol_type = other RNA
tgtaccctctacctccttcc

SEQ ID NO: 10404 - RNA, 20 nt, synthetic construct
  source 1..20: mol_type = other RNA
ctgtcctgtaccctctacct

SEQ ID NO: 10405 - RNA, 20 nt, synthetic construct
  source 1..20: mol_type = other RNA
cagatattgtgtgcagttag

SEQ ID NO: 10406 - RNA, 20 nt, synthetic construct
  source 1..20: mol_type = other RNA
ccccaattgatttacaactg

SEQ ID NO: 10407 - RNA, 20 nt, synthetic construct
  source 1..20: mol_type = other RNA
agatggttaggaggctcctc

SEQ ID NO: 10408 - RNA, 20 nt, synthetic construct
  source 1..20: mol_type = other RNA
gtggttgtgtcaagatggtt

SEQ ID NO: 10409 - RNA, 20 nt, synthetic construct
  source 1..20: mol_type = other RNA
cgtcagtggttgtgtcaaga

SEQ ID NO: 10410 - RNA, 20 nt, synthetic construct
  source 1..20: mol_type = other RNA
atctctagtgtagtcacgtc

SEQ ID NO: 10411 - RNA, 20 nt, synthetic construct
  source 1..20: mol_type = other RNA
caataaaataaaataaaata

SEQ ID NO: 10412 - RNA, 20 nt, synthetic construct
  source 1..20: mol_type = other RNA
gtgcacttcaaccggggtga

SEQ ID NO: 10413 - RNA, 20 nt, synthetic construct
  source 1..20: mol_type = other RNA
ggagtttgagaccagccagg

SEQ ID NO: 10414 - RNA, 20 nt, synthetic construct
  source 1..20: mol_type = other RNA
caaactcctgaccttgtgat

SEQ ID NO: 10415 - RNA, 20 nt, synthetic construct
  source 1..20: mol_type = other RNA
tggcctcccaaagtgctggg

SEQ ID NO: 10416 - RNA, 20 nt, synthetic construct
  source 1..20: mol_type = other RNA
agtgcggtggctcaactctg

SEQ ID NO: 10417 - RNA, 20 nt, synthetic construct
  source 1..20: mol_type = other RNA
caggaaagaaaaaaaaataa

SEQ ID NO: 10418 - RNA, 20 nt, synthetic construct
  source 1..20: mol_type = other RNA
cccaggctggagtgcagtgg

SEQ ID NO: 10419 - RNA, 20 nt, synthetic construct
  source 1..20: mol_type = other RNA
tcccagctactaagtaggct

SEQ ID NO: 10420 - RNA, 20 nt, synthetic construct
  source 1..20: mol_type = other RNA
ctacaaaaaatacaaaaatt

SEQ ID NO: 10421 - RNA, 20 nt, synthetic construct
  source 1..20: mol_type = other RNA
caaactcctggcctcaggtg

SEQ ID NO: 10422 - RNA, 20 nt, synthetic construct
  source 1..20: mol_type = other RNA
tttcggcacagtttggtata

SEQ ID NO: 10423 - RNA, 20 nt, synthetic construct
  source 1..20: mol_type = other RNA
tagtttacgagcaagctagg

SEQ ID NO: 10424 - RNA, 20 nt, synthetic construct
  source 1..20: mol_type = other RNA
atcagctgcacccctgggta

SEQ ID NO: 10425 - RNA, 20 nt, synthetic construct
  source 1..20: mol_type = other RNA
ctacccaggggtgcagctga

SEQ ID NO: 10426 - RNA, 20 nt, synthetic construct
  source 1..20: mol_type = other RNA
ggtcatggaagttaccagca

SEQ ID NO: 10427 - RNA, 20 nt, synthetic construct
  source 1..20: mol_type = other RNA
tggaagttaccagcaaatat

SEQ ID NO: 10428 - RNA, 20 nt, synthetic construct
  source 1..20: mol_type = other RNA
tgtttcctcccctcttcttt

SEQ ID NO: 10429 - RNA, 20 nt, synthetic construct
  source 1..20: mol_type = other RNA
ccttactccttccctcaccc

SEQ ID NO: 10430 - RNA, 20 nt, synthetic construct
  source 1..20: mol_type = other RNA
ctgagagaatcattaactta

SEQ ID NO: 10431 - RNA, 20 nt, synthetic construct
  source 1..20: mol_type = other RNA
aattaagttaatgattctct

SEQ ID NO: 10432 - RNA, 20 nt, synthetic construct
  source 1..20: mol_type = other RNA
caatcccaggacattgttga

SEQ ID NO: 10433 - RNA, 20 nt, synthetic construct
  source 1..20: mol_type = other RNA
acaatgtcctgggattggga

SEQ ID NO: 10434 - RNA, 20 nt, synthetic construct
  source 1..20: mol_type = other RNA
tgggattgggacacactttc

SEQ ID NO: 10435 - RNA, 20 nt, synthetic construct
  source 1..20: mol_type = other RNA
caaaatggaacataaggaag

SEQ ID NO: 10436 - RNA, 20 nt, synthetic construct
  source 1..20: mol_type = other RNA
tacctgatttcagaaataaa

SEQ ID NO: 10437 - RNA, 20 nt, synthetic construct
  source 1..20: mol_type = other RNA
cggtgctggaatgaatgggc

SEQ ID NO: 10438 - RNA, 20 nt, synthetic construct
  source 1..20: mol_type = other RNA
ggctgaaaaataaatagcca

SEQ ID NO: 10439 - RNA, 20 nt, synthetic construct
  source 1..20: mol_type = other RNA
aggaaccaaacatattcaaa

SEQ ID NO: 10440 - RNA, 20 nt, synthetic construct
  source 1..20: mol_type = other RNA
cactccatgaacaggtcaag

SEQ ID NO: 10441 - RNA, 20 nt, synthetic construct
  source 1..20: mol_type = other RNA
ccacatttttatacatacat

SEQ ID NO: 10442 - RNA, 20 nt, synthetic construct
  source 1..20: mol_type = other RNA
tttacaaatactagcttatt

SEQ ID NO: 10443 - RNA, 20 nt, synthetic construct
  source 1..20: mol_type = other RNA
tccccattttataaacaaag

SEQ ID NO: 10444 - RNA, 20 nt, synthetic construct
  source 1..20: mol_type = other RNA
agatttctttgtttataaaa

SEQ ID NO: 10445 - RNA, 20 nt, synthetic construct
  source 1..20: mol_type = other RNA
cgagacaaataacatgattt

SEQ ID NO: 10446 - RNA, 20 nt, synthetic construct
  source 1..20: mol_type = other RNA
cgtgaccaaattcccaaatc

SEQ ID NO: 10447 - RNA, 20 nt, synthetic construct
  source 1..20: mol_type = other RNA
ggtataaagaaagtgatttg

SEQ ID NO: 10448 - RNA, 20 nt, synthetic construct
  source 1..20: mol_type = other RNA
tgccgtactacttcacttta

SEQ ID NO: 10449 - RNA, 20 nt, synthetic construct
  source 1..20: mol_type = other RNA
atgctagcttgggcacctta

SEQ ID NO: 10450 - RNA, 20 nt, synthetic construct
  source 1..20: mol_type = other RNA
cttgaggcaaatctctggag

SEQ ID NO: 10451 - RNA, 20 nt, synthetic construct
  source 1..20: mol_type = other RNA
gatgaaagggaggtagatgc

SEQ ID NO: 10452 - RNA, 20 nt, synthetic construct
  source 1..20: mol_type = other RNA
acttgtaaaattttatctgg

SEQ ID NO: 10453 - RNA, 20 nt, synthetic construct
  source 1..20: mol_type = other RNA
aacacatttgaatttagtgg

SEQ ID NO: 10454 - RNA, 20 nt, synthetic construct
  source 1..20: mol_type = other RNA
atgtctgtgtgtgtagggag

SEQ ID NO: 10455 - RNA, 20 nt, synthetic construct
  source 1..20: mol_type = other RNA
gtgtgtgtagggagtgcagg

SEQ ID NO: 10456 - RNA, 20 nt, synthetic construct
  source 1..20: mol_type = other RNA
attaaaacatatgttaatcc

SEQ ID NO: 10457 - RNA, 20 nt, synthetic construct
  source 1..20: mol_type = other RNA
acagaaagcctggctttcca

SEQ ID NO: 10458 - RNA, 20 nt, synthetic construct
  source 1..20: mol_type = other RNA
tttacacatgcaaatatgca

SEQ ID NO: 10459 - RNA, 20 nt, synthetic construct
  source 1..20: mol_type = other RNA
ttttattatgcttcatagag

SEQ ID NO: 10460 - RNA, 20 nt, synthetic construct
  source 1..20: mol_type = other RNA
cactgtgagctatagaattt

SEQ ID NO: 10461 - RNA, 20 nt, synthetic construct
  source 1..20: mol_type = other RNA
tcaccccgcactgtttctca

SEQ ID NO: 10462 - RNA, 20 nt, synthetic construct
  source 1..20: mol_type = other RNA
ttcctcaatttaatatgctc

SEQ ID NO: 10463 - RNA, 20 nt, synthetic construct
  source 1..20: mol_type = other RNA
acctgctccccacctctgtg

SEQ ID NO: 10464 - RNA, 20 nt, synthetic construct
  source 1..20: mol_type = other RNA
cagaggtggggagcaggtgg

SEQ ID NO: 10465 - RNA, 20 nt, synthetic construct
  source 1..20: mol_type = other RNA
ttggccacagtccacctgct

SEQ ID NO: 10466 - RNA, 20 nt, synthetic construct
  source 1..20: mol_type = other RNA
tgacctcctgagagtacaca

SEQ ID NO: 10467 - RNA, 20 nt, synthetic construct
  source 1..20: mol_type = other RNA
gtgtactctcaggaggtcag

SEQ ID NO: 10468 - RNA, 20 nt, synthetic construct
  source 1..20: mol_type = other RNA
ggacaggcctttctgagaat

SEQ ID NO: 10469 - RNA, 20 nt, synthetic construct
  source 1..20: mol_type = other RNA
tcggcatacaaacacatgtt

SEQ ID NO: 10470 - RNA, 20 nt, synthetic construct
  source 1..20: mol_type = other RNA
ggggaggttctgaaagatga

SEQ ID NO: 10471 - RNA, 20 nt, synthetic construct
  source 1..20: mol_type = other RNA
tctttcagaacctcccctga

SEQ ID NO: 10472 - RNA, 20 nt, synthetic construct
  source 1..20: mol_type = other RNA
cgctgctttcagagccaggc

SEQ ID NO: 10473 - RNA, 20 nt, synthetic construct
  source 1..20: mol_type = other RNA
ctctttaacccactccatct

SEQ ID NO: 10474 - RNA, 20 nt, synthetic construct
  source 1..20: mol_type = other RNA
aggttgtcctgttgcttaat

SEQ ID NO: 10475 - RNA, 20 nt, synthetic construct
  source 1..20: mol_type = other RNA
tgttgcttaattccatggaa

SEQ ID NO: 10476 - RNA, 20 nt, synthetic construct
  source 1..20: mol_type = other RNA
tgaggctccttaggacacct

SEQ ID NO: 10477 - RNA, 20 nt, synthetic construct
  source 1..20: mol_type = other RNA
taaggagcctcaggacaggg

SEQ ID NO: 10478 - RNA, 20 nt, synthetic construct
  source 1..20: mol_type = other RNA
caggttctgcttttttacaa

SEQ ID NO: 10479 - RNA, 20 nt, synthetic construct
  source 1..20: mol_type = other RNA
ctgtagtaagcctagtacaa

SEQ ID NO: 10480 - RNA, 20 nt, synthetic construct
  source 1..20: mol_type = other RNA
ctcctttagttacaaaaatg

SEQ ID NO: 10481 - RNA, 20 nt, synthetic construct
  source 1..20: mol_type = other RNA
ctttgacagttgataagcat

SEQ ID NO: 10482 - RNA, 20 nt, synthetic construct
  source 1..20: mol_type = other RNA
aagtgacagtgttacaacca

SEQ ID NO: 10483 - RNA, 20 nt, synthetic construct
  source 1..20: mol_type = other RNA
tgataaaaaaaataagacac

SEQ ID NO: 10484 - RNA, 20 nt, synthetic construct
  source 1..20: mol_type = other RNA
tattttttttatcatgacat

SEQ ID NO: 10485 - RNA, 20 nt, synthetic construct
  source 1..20: mol_type = other RNA
aaccataaaatcttaaataa

SEQ ID NO: 10486 - RNA, 20 nt, synthetic construct
  source 1..20: mol_type = other RNA
ggagaatctgaaaccccaga

SEQ ID NO: 10487 - RNA, 20 nt, synthetic construct
  source 1..20: mol_type = other RNA
agcatgcaggacttgggtaa

SEQ ID NO: 10488 - RNA, 20 nt, synthetic construct
  source 1..20: mol_type = other RNA
tgcatgctagacatgagtgg

SEQ ID NO: 10489 - RNA, 20 nt, synthetic construct
  source 1..20: mol_type = other RNA
ctcactgtgcagttaacttt

SEQ ID NO: 10490 - RNA, 20 nt, synthetic construct
  source 1..20: mol_type = other RNA
atgcgtagaagtaattccaa

SEQ ID NO: 10491 - RNA, 20 nt, synthetic construct
  source 1..20: mol_type = other RNA
tgaagctcctcgctccctcc

SEQ ID NO: 10492 - RNA, 20 nt, synthetic construct
  source 1..20: mol_type = other RNA
gtgagagtcctgaagctcct

SEQ ID NO: 10493 - RNA, 20 nt, synthetic construct
  source 1..20: mol_type = other RNA
ctgcccctactattcctcac

SEQ ID NO: 10494 - RNA, 20 nt, synthetic construct
  source 1..20: mol_type = other RNA
gtgttggctctgtgcttctc

SEQ ID NO: 10495 - RNA, 20 nt, synthetic construct
  source 1..20: mol_type = other RNA
cttggatttcctccccagag

SEQ ID NO: 10496 - RNA, 20 nt, synthetic construct
  source 1..20: mol_type = other RNA
cttctttctcaagcccaagg

SEQ ID NO: 10497 - RNA, 20 nt, synthetic construct
  source 1..20: mol_type = other RNA
gggaagtggccaggtccctt

SEQ ID NO: 10498 - RNA, 20 nt, synthetic construct
  source 1..20: mol_type = other RNA
cctctgggagcttcacccca

SEQ ID NO: 10499 - RNA, 20 nt, synthetic construct
  source 1..20: mol_type = other RNA
ttctgccactaacactgcag

SEQ ID NO: 10500 - RNA, 20 nt, synthetic construct
  source 1..20: mol_type = other RNA
aagtacagcaagggcagtat

SEQ ID NO: 10501 - RNA, 20 nt, synthetic construct
  source 1..20: mol_type = other RNA
tactgcccttgctgtacttg

SEQ ID NO: 10502 - RNA, 20 nt, synthetic construct
  source 1..20: mol_type = other RNA
tccctgcaagcaccctgagg

SEQ ID NO: 10503 - RNA, 20 nt, synthetic construct
  source 1..20: mol_type = other RNA
agcctttttacatttttctg

SEQ ID NO: 10504 - RNA, 20 nt, synthetic construct
  source 1..20: mol_type = other RNA
gatgttcaagagcaggaagg

SEQ ID NO: 10505 - RNA, 20 nt, synthetic construct
  source 1..20: mol_type = other RNA
cacagctgaagaacttggag

SEQ ID NO: 10506 - RNA, 20 nt, synthetic construct
  source 1..20: mol_type = other RNA
aagtcccacagctgaagaac

SEQ ID NO: 10507 - RNA, 20 nt, synthetic construct
  source 1..20: mol_type = other RNA
tccttgctcctcagattgca

SEQ ID NO: 10508 - RNA, 20 nt, synthetic construct
  source 1..20: mol_type = other RNA
cataataggccacctgcaat

SEQ ID NO: 10509 - RNA, 20 nt, synthetic construct
  source 1..20: mol_type = other RNA
gggttctctagagggacaga

SEQ ID NO: 10510 - RNA, 20 nt, synthetic construct
  source 1..20: mol_type = other RNA
ctctagagaaccccgactaa

SEQ ID NO: 10511 - RNA, 20 nt, synthetic construct
  source 1..20: mol_type = other RNA
caaaaccaatgaaagaattc

SEQ ID NO: 10512 - RNA, 20 nt, synthetic construct
  source 1..20: mol_type = other RNA
aatcatattaatcagccaac

SEQ ID NO: 10513 - RNA, 20 nt, synthetic construct
  source 1..20: mol_type = other RNA
ttagcattttttggtctaat

SEQ ID NO: 10514 - RNA, 20 nt, synthetic construct
  source 1..20: mol_type = other RNA
aatgcatttattttgcataa

SEQ ID NO: 10515 - RNA, 20 nt, synthetic construct
  source 1..20: mol_type = other RNA
ctaaactccttgcctctcat

SEQ ID NO: 10516 - RNA, 20 nt, synthetic construct
  source 1..20: mol_type = other RNA
aaggtattatgtatagagtc

SEQ ID NO: 10517 - RNA, 20 nt, synthetic construct
  source 1..20: mol_type = other RNA
cccaccttcagaagcagata

SEQ ID NO: 10518 - RNA, 20 nt, synthetic construct
  source 1..20: mol_type = other RNA
ctgttttttcacaatttcaa

SEQ ID NO: 10519 - RNA, 20 nt, synthetic construct
  source 1..20: mol_type = other RNA
atgccctcactttaacagta

SEQ ID NO: 10520 - RNA, 20 nt, synthetic construct
  source 1..20: mol_type = other RNA
catttttttccagtcaatgc

SEQ ID NO: 10521 - RNA, 20 nt, synthetic construct
  source 1..20: mol_type = other RNA
tcagcttcatcagggttctc

SEQ ID NO: 10522 - RNA, 20 nt, synthetic construct
  source 1..20: mol_type = other RNA
gggaggggatgttaccacta

SEQ ID NO: 10523 - RNA, 20 nt, synthetic construct
  source 1..20: mol_type = other RNA
gaggatgtaaaccctgcact

SEQ ID NO: 10524 - RNA, 20 nt, synthetic construct
  source 1..20: mol_type = other RNA
agaagcattcaggggcatta

SEQ ID NO: 10525 - RNA, 20 nt, synthetic construct
  source 1..20: mol_type = other RNA
cactctgaacctcacctctg

SEQ ID NO: 10526 - RNA, 20 nt, synthetic construct
  source 1..20: mol_type = other RNA
cttccaccattatcccttac

SEQ ID NO: 10527 - RNA, 20 nt, synthetic construct
  source 1..20: mol_type = other RNA
ccgagctgcaacattaaatg

SEQ ID NO: 10528 - RNA, 20 nt, synthetic construct
  source 1..20: mol_type = other RNA
caatctcctgatctcgtgat

SEQ ID NO: 10529 - RNA, 20 nt, synthetic construct
  source 1..20: mol_type = other RNA
tgctctgttaccaggctgga

SEQ ID NO: 10530 - RNA, 20 nt, synthetic construct
  source 1..20: mol_type = other RNA
aatgttagtgagctggaaat

SEQ ID NO: 10531 - RNA, 20 nt, synthetic construct
  source 1..20: mol_type = other RNA
aaagtgactaatccactcca

SEQ ID NO: 10532 - RNA, 20 nt, synthetic construct
  source 1..20: mol_type = other RNA
ctttagacctactcatccca

SEQ ID NO: 10533 - RNA, 20 nt, synthetic construct
  source 1..20: mol_type = other RNA
agaagatacacccttggccg

SEQ ID NO: 10534 - RNA, 20 nt, synthetic construct
  source 1..20: mol_type = other RNA
gatctaacagtaggaaccac

SEQ ID NO: 10535 - RNA, 20 nt, synthetic construct
  source 1..20: mol_type = other RNA
ctcaactacaaaatttaaat

SEQ ID NO: 10536 - RNA, 20 nt, synthetic construct
  source 1..20: mol_type = other RNA
attatggtagttatgcccac

SEQ ID NO: 10537 - RNA, 20 nt, synthetic construct
  source 1..20: mol_type = other RNA
gactattctgatggctgctt

SEQ ID NO: 10538 - RNA, 20 nt, synthetic construct
  source 1..20: mol_type = other RNA
gactcatgtagagctctggc

SEQ ID NO: 10539 - RNA, 20 nt, synthetic construct
  source 1..20: mol_type = other RNA
attctacctggcagtttttt

SEQ ID NO: 10540 - RNA, 20 nt, synthetic construct
  source 1..20: mol_type = other RNA
ttagtccattctacctggca

SEQ ID NO: 10541 - RNA, 20 nt, synthetic construct
  source 1..20: mol_type = other RNA
ggaaattgattgagggccca

SEQ ID NO: 10542 - RNA, 20 nt, synthetic construct
  source 1..20: mol_type = other RNA
ttcctcaaggggatccagcc

SEQ ID NO: 10543 - RNA, 20 nt, synthetic construct
  source 1..20: mol_type = other RNA
gtagcctagtggtgtccttc

SEQ ID NO: 10544 - RNA, 20 nt, synthetic construct
  source 1..20: mol_type = other RNA
ccttagggaaggatgggaga

SEQ ID NO: 10545 - RNA, 20 nt, synthetic construct
  source 1..20: mol_type = other RNA
cattacttccctttctccag

SEQ ID NO: 10546 - RNA, 20 nt, synthetic construct
  source 1..20: mol_type = other RNA
agtactttctgaaatgtctc

SEQ ID NO: 10547 - RNA, 20 nt, synthetic construct
  source 1..20: mol_type = other RNA
gctcagagccagtgtccagt

SEQ ID NO: 10548 - RNA, 20 nt, synthetic construct
  source 1..20: mol_type = other RNA
gaaatgagctaaaactccat

SEQ ID NO: 10549 - RNA, 20 nt, synthetic construct
  source 1..20: mol_type = other RNA
agggacccactggaaccact

SEQ ID NO: 10550 - RNA, 20 nt, synthetic construct
  source 1..20: mol_type = other RNA
ctggacttatcctctggtca

SEQ ID NO: 10551 - RNA, 20 nt, synthetic construct
  source 1..20: mol_type = other RNA
ttttcccagtgccaaaatgc

SEQ ID NO: 10552 - RNA, 20 nt, synthetic construct
  source 1..20: mol_type = other RNA
atacaaattatgcattttgg

SEQ ID NO: 10553 - RNA, 20 nt, synthetic construct
  source 1..20: mol_type = other RNA
gggagccaatgtggcatttc

SEQ ID NO: 10554 - RNA, 20 nt, synthetic construct
  source 1..20: mol_type = other RNA
ctacctagaaaaataaaaaa

SEQ ID NO: 10555 - RNA, 20 nt, synthetic construct
  source 1..20: mol_type = other RNA
ctccagggatgggatattgt

SEQ ID NO: 10556 - RNA, 20 nt, synthetic construct
  source 1..20: mol_type = other RNA
ttgatggtgacactaatcac

SEQ ID NO: 10557 - RNA, 20 nt, synthetic construct
  source 1..20: mol_type = other RNA
ttcaagtccttgatggtgac

SEQ ID NO: 10558 - RNA, 20 nt, synthetic construct
  source 1..20: mol_type = other RNA
ccatcaaggacttgaaagac

SEQ ID NO: 10559 - RNA, 20 nt, synthetic construct
  source 1..20: mol_type = other RNA
aatgggagagttgaacaggg

SEQ ID NO: 10560 - RNA, 20 nt, synthetic construct
  source 1..20: mol_type = other RNA
tctgcacaggtcaaatggga

SEQ ID NO: 10561 - RNA, 20 nt, synthetic construct
  source 1..20: mol_type = other RNA
ccacttggttaagcttaaaa

SEQ ID NO: 10562 - RNA, 20 nt, synthetic construct
  source 1..20: mol_type = other RNA
tatggacaggaatggagaaa

SEQ ID NO: 10563 - RNA, 20 nt, synthetic construct
  source 1..20: mol_type = other RNA
ataagacccaccagaagcaa

SEQ ID NO: 10564 - RNA, 20 nt, synthetic construct
  source 1..20: mol_type = other RNA
gctgaaggcaaattgcttct

SEQ ID NO: 10565 - RNA, 20 nt, synthetic construct
  source 1..20: mol_type = other RNA
ctccaaataagattatgaca

SEQ ID NO: 10566 - RNA, 20 nt, synthetic construct
  source 1..20: mol_type = other RNA
taatcttatttggagagacc

SEQ ID NO: 10567 - RNA, 20 nt, synthetic construct
  source 1..20: mol_type = other RNA
tgaatgtaatggaccagtgt

SEQ ID NO: 10568 - RNA, 20 nt, synthetic construct
  source 1..20: mol_type = other RNA
attacattcatgacattatg

SEQ ID NO: 10569 - RNA, 20 nt, synthetic construct
  source 1..20: mol_type = other RNA
caccaataagttcagtgtgt

SEQ ID NO: 10570 - RNA, 20 nt, synthetic construct
  source 1..20: mol_type = other RNA
ctaaattttagctggattta

SEQ ID NO: 10571 - RNA, 20 nt, synthetic construct
  source 1..20: mol_type = other RNA
catgccactggaaccctaga

SEQ ID NO: 10572 - RNA, 20 nt, synthetic construct
  source 1..20: mol_type = other RNA
ctcgataaatgggccagagt

SEQ ID NO: 10573 - RNA, 20 nt, synthetic construct
  source 1..20: mol_type = other RNA
agaacaaaagaaggctctga

SEQ ID NO: 10574 - RNA, 20 nt, synthetic construct
  source 1..20: mol_type = other RNA
aggctgctgtgaaagctgct

SEQ ID NO: 10575 - RNA, 20 nt, synthetic construct
  source 1..20: mol_type = other RNA
tgtggcccaaatggcagagc

SEQ ID NO: 10576 - RNA, 20 nt, synthetic construct
  source 1..20: mol_type = other RNA
gtggcagatagggatgctgt

SEQ ID NO: 10577 - RNA, 20 nt, synthetic construct
  source 1..20: mol_type = other RNA
ccactgtgattcacctatgg

SEQ ID NO: 10578 - RNA, 20 nt, synthetic construct
  source 1..20: mol_type = other RNA
ctcaaaaggagagtagttat

SEQ ID NO: 10579 - RNA, 20 nt, synthetic construct
  source 1..20: mol_type = other RNA
gttattgggctttggtggta

SEQ ID NO: 10580 - RNA, 20 nt, synthetic construct
  source 1..20: mol_type = other RNA
aacgttcagttaccaccaaa

SEQ ID NO: 10581 - RNA, 20 nt, synthetic construct
  source 1..20: mol_type = other RNA
taaagtcaccatgctacctg

SEQ ID NO: 10582 - RNA, 20 nt, synthetic construct
  source 1..20: mol_type = other RNA
ccatgctacctgaacctgcc

SEQ ID NO: 10583 - RNA, 20 nt, synthetic construct
  source 1..20: mol_type = other RNA
gaaagcaaccagttcatgat

SEQ ID NO: 10584 - RNA, 20 nt, synthetic construct
  source 1..20: mol_type = other RNA
gcacagcggcatttcatcat

SEQ ID NO: 10585 - RNA, 20 nt, synthetic construct
  source 1..20: mol_type = other RNA
tgaaggcacaagtaagttac

SEQ ID NO: 10586 - RNA, 20 nt, synthetic construct
  source 1..20: mol_type = other RNA
actgatcatagggaactccc

SEQ ID NO: 10587 - RNA, 20 nt, synthetic construct
  source 1..20: mol_type = other RNA
tcccttcctctgtcaactga

SEQ ID NO: 10588 - RNA, 20 nt, synthetic construct
  source 1..20: mol_type = other RNA
ttagtcttcccttcctctgt

SEQ ID NO: 10589 - RNA, 20 nt, synthetic construct
  source 1..20: mol_type = other RNA
actttcgggtggtgcctgca

SEQ ID NO: 10590 - RNA, 20 nt, synthetic construct
  source 1..20: mol_type = other RNA
catgataaaggaaaaataaa

SEQ ID NO: 10591 - RNA, 20 nt, synthetic construct
  source 1..20: mol_type = other RNA
ataaatctaaggtcacatga

SEQ ID NO: 10592 - RNA, 20 nt, synthetic construct
  source 1..20: mol_type = other RNA
taattatgcctaatataata

SEQ ID NO: 10593 - RNA, 20 nt, synthetic construct
  source 1..20: mol_type = other RNA
ttatttgaagattatgtatg

SEQ ID NO: 10594 - RNA, 20 nt, synthetic construct
  source 1..20: mol_type = other RNA
acttgaacccatacacacat

SEQ ID NO: 10595 - RNA, 20 nt, synthetic construct
  source 1..20: mol_type = other RNA
aactccttgtcaacttgaac

SEQ ID NO: 10596 - RNA, 20 nt, synthetic construct
  source 1..20: mol_type = other RNA
acttgattggattgaaagat

SEQ ID NO: 10597 - RNA, 20 nt, synthetic construct
  source 1..20: mol_type = other RNA
gtgagggtgtggcaaaagga

SEQ ID NO: 10598 - RNA, 20 nt, synthetic construct
  source 1..20: mol_type = other RNA
gccttcccagcccactgact

SEQ ID NO: 10599 - RNA, 20 nt, synthetic construct
  source 1..20: mol_type = other RNA
gtgggctgggaaggcagacc

SEQ ID NO: 10600 - RNA, 20 nt, synthetic construct
  source 1..20: mol_type = other RNA
tttcacatttttctccctgc

SEQ ID NO: 10601 - RNA, 20 nt, synthetic construct
  source 1..20: mol_type = other RNA
agtcttttcacatttttctc

SEQ ID NO: 10602 - RNA, 20 nt, synthetic construct
  source 1..20: mol_type = other RNA
gatgttcaagagcaggaagc

SEQ ID NO: 10603 - RNA, 20 nt, synthetic construct
  source 1..20: mol_type = other RNA
aactcccaacgctgaagaac

SEQ ID NO: 10604 - RNA, 20 nt, synthetic construct
  source 1..20: mol_type = other RNA
gggttctctagagggacaga

SEQ ID NO: 10605 - RNA, 20 nt, synthetic construct
  source 1..20: mol_type = other RNA
ctctagagaaccctgactaa

SEQ ID NO: 10606 - RNA, 20 nt, synthetic construct
  source 1..20: mol_type = other RNA
ttaatctcatttattgattt

SEQ ID NO: 10607 - RNA, 20 nt, synthetic construct
  source 1..20: mol_type = other RNA
tcattctgatatggaacaac

SEQ ID NO: 10608 - RNA, 20 nt, synthetic construct
  source 1..20: mol_type = other RNA
tcatcattctgatatggaac

SEQ ID NO: 10609 - RNA, 20 nt, synthetic construct
  source 1..20: mol_type = other RNA
gtcctcttttatcttttgga

SEQ ID NO: 10610 - RNA, 20 nt, synthetic construct
  source 1..20: mol_type = other RNA
tcttttatcttttggaattg

SEQ ID NO: 10611 - RNA, 20 nt, synthetic construct
  source 1..20: mol_type = other RNA
tataaagaagagctgatatc

SEQ ID NO: 10612 - RNA, 20 nt, synthetic construct
  source 1..20: mol_type = other RNA
aggggtttttctggtgtagg

SEQ ID NO: 10613 - RNA, 20 nt, synthetic construct
  source 1..20: mol_type = other RNA
tttgaagagtacatgaaagt

SEQ ID NO: 10614 - RNA, 20 nt, synthetic construct
  source 1..20: mol_type = other RNA
tcttctgttgttgagcgggg

SEQ ID NO: 10615 - RNA, 20 nt, synthetic construct
  source 1..20: mol_type = other RNA
tttaggtgaaggtggttgct

SEQ ID NO: 10616 - RNA, 20 nt, synthetic construct
  source 1..20: mol_type = other RNA
ataaaaaaagagaaagacaa

SEQ ID NO: 10617 - RNA, 20 nt, synthetic construct
  source 1..20: mol_type = other RNA
ttctctttttttattgacta

SEQ ID NO: 10618 - RNA, 20 nt, synthetic construct
  source 1..20: mol_type = other RNA
aactttaactctagattagt

SEQ ID NO: 10619 - RNA, 20 nt, synthetic construct
  source 1..20: mol_type = other RNA
atttctcttttagattgtaa

SEQ ID NO: 10620 - RNA, 20 nt, synthetic construct
  source 1..20: mol_type = other RNA
tcatcaagaagacctaacaa

SEQ ID NO: 10621 - RNA, 20 nt, synthetic construct
  source 1..20: mol_type = other RNA
tcttgatgatgacctttatc

SEQ ID NO: 10622 - RNA, 20 nt, synthetic construct
  source 1..20: mol_type = other RNA
atttgtgctgatatgaatac

SEQ ID NO: 10623 - RNA, 20 nt, synthetic construct
  source 1..20: mol_type = other RNA
gaacatctcaatttaaaagc

SEQ ID NO: 10624 - RNA, 20 nt, synthetic construct
  source 1..20: mol_type = other RNA
catttaaactttgttccttt

SEQ ID NO: 10625 - RNA, 20 nt, synthetic construct
  source 1..20: mol_type = other RNA
tggagataaactcaatataa

SEQ ID NO: 10626 - RNA, 20 nt, synthetic construct
  source 1..20: mol_type = other RNA
tttgaaggtggaatgtgaaa

SEQ ID NO: 10627 - RNA, 20 nt, synthetic construct
  source 1..20: mol_type = other RNA
atgtattatgagagctataa

SEQ ID NO: 10628 - RNA, 20 nt, synthetic construct
  source 1..20: mol_type = other RNA
taatcactttaaaaaacaac

SEQ ID NO: 10629 - RNA, 20 nt, synthetic construct
  source 1..20: mol_type = other RNA
cattctttctgtgaaaaaca

SEQ ID NO: 10630 - RNA, 20 nt, synthetic construct
  source 1..20: mol_type = other RNA
cgtgctataagaaatgctaa

SEQ ID NO: 10631 - RNA, 20 nt, synthetic construct
  source 1..20: mol_type = other RNA
ttcagcttttctttgtctga

SEQ ID NO: 10632 - RNA, 20 nt, synthetic construct
  source 1..20: mol_type = other RNA
gaagaagtctttattttgcc

SEQ ID NO: 10633 - RNA, 20 nt, synthetic construct
  source 1..20: mol_type = other RNA
ttattttgccttcagttttt

SEQ ID NO: 10634 - RNA, 20 nt, synthetic construct
  source 1..20: mol_type = other RNA
gaaactattcaaaacggaat

SEQ ID NO: 10635 - RNA, 20 nt, synthetic construct
  source 1..20: mol_type = other RNA
gagaaaaaggaactattgaa

SEQ ID NO: 10636 - RNA, 20 nt, synthetic construct
  source 1..20: mol_type = other RNA
aactgttgaaaaacaaagat

SEQ ID NO: 10637 - RNA, 20 nt, synthetic construct
  source 1..20: mol_type = other RNA
aaaaagaagaatacagagag

SEQ ID NO: 10638 - RNA, 20 nt, synthetic construct
  source 1..20: mol_type = other RNA
ggaactctttttttgtatct

SEQ ID NO: 10639 - RNA, 20 nt, synthetic construct
  source 1..20: mol_type = other RNA
actagaacttatccaaacca

SEQ ID NO: 10640 - RNA, 20 nt, synthetic construct
  source 1..20: mol_type = other RNA
attagacacaactaacaaaa

SEQ ID NO: 10641 - RNA, 20 nt, synthetic construct
  source 1..20: mol_type = other RNA
aattgactcctcagtgcatt

SEQ ID NO: 10642 - RNA, 20 nt, synthetic construct
  source 1..20: mol_type = other RNA
acctttaccacaagattctt

SEQ ID NO: 10643 - RNA, 20 nt, synthetic construct
  source 1..20: mol_type = other RNA
tttctgagtctgtctgtctt

SEQ ID NO: 10644 - RNA, 20 nt, synthetic construct
  source 1..20: mol_type = other RNA
gtctgtcttgattgctttat

SEQ ID NO: 10645 - RNA, 20 nt, synthetic construct
  source 1..20: mol_type = other RNA
gtcttgattgctttattatt

SEQ ID NO: 10646 - RNA, 20 nt, synthetic construct
  source 1..20: mol_type = other RNA
tgattgctttattatttaac

SEQ ID NO: 10647 - RNA, 20 nt, synthetic construct
  source 1..20: mol_type = other RNA
ctgttaaataataaagcaat

SEQ ID NO: 10648 - RNA, 20 nt, synthetic construct
  source 1..20: mol_type = other RNA
tgtaattgtttaatcaaaca

SEQ ID NO: 10649 - RNA, 20 nt, synthetic construct
  source 1..20: mol_type = other RNA
attgagtcaacctagtaact

SEQ ID NO: 10650 - RNA, 20 nt, synthetic construct
  source 1..20: mol_type = other RNA
acctagtaactggttgaact

SEQ ID NO: 10651 - RNA, 20 nt, synthetic construct
  source 1..20: mol_type = other RNA
ctgcatgcctgcactacaga

SEQ ID NO: 10652 - RNA, 20 nt, synthetic construct
  source 1..20: mol_type = other RNA
tagtcaggttctgcagggct

SEQ ID NO: 10653 - RNA, 20 nt, synthetic construct
  source 1..20: mol_type = other RNA
ggttctgcagggctttgaag

SEQ ID NO: 10654 - RNA, 20 nt, synthetic construct
  source 1..20: mol_type = other RNA
gctactctttctctccaaac

SEQ ID NO: 10655 - RNA, 20 nt, synthetic construct
  source 1..20: mol_type = other RNA
gctatgttgcaatgcaggat

SEQ ID NO: 10656 - RNA, 20 nt, synthetic construct
  source 1..20: mol_type = other RNA
ctcctccaaggaaataagat

SEQ ID NO: 10657 - RNA, 20 nt, synthetic construct
  source 1..20: mol_type = other RNA
agggaattgtgcaaggtttt

SEQ ID NO: 10658 - RNA, 20 nt, synthetic construct
  source 1..20: mol_type = other RNA
aatatgaaaaccttgcacaa

SEQ ID NO: 10659 - RNA, 20 nt, synthetic construct
  source 1..20: mol_type = other RNA
gggtcaaatatgaaaacctt

SEQ ID NO: 10660 - RNA, 20 nt, synthetic construct
  source 1..20: mol_type = other RNA
tgtggtcctcatgaacatta

SEQ ID NO: 10661 - RNA, 20 nt, synthetic construct
  source 1..20: mol_type = other RNA
tcatgaacattaagaagaga

SEQ ID NO: 10662 - RNA, 20 nt, synthetic construct
  source 1..20: mol_type = other RNA
gtctgcctgctaatcaagag

SEQ ID NO: 10663 - RNA, 20 nt, synthetic construct
  source 1..20: mol_type = other RNA
gcctgctaatcaagagaaga

SEQ ID NO: 10664 - RNA, 20 nt, synthetic construct
  source 1..20: mol_type = other RNA
ctgagaattacgaccattct

SEQ ID NO: 10665 - RNA, 20 nt, synthetic construct
  source 1..20: mol_type = other RNA
taattctcagagactttttc

SEQ ID NO: 10666 - RNA, 20 nt, synthetic construct
  source 1..20: mol_type = other RNA
tttatgacacaaacaggaaa

SEQ ID NO: 10667 - RNA, 20 nt, synthetic construct
  source 1..20: mol_type = other RNA
taaatgacttcacatttttt

SEQ ID NO: 10668 - RNA, 20 nt, synthetic construct
  source 1..20: mol_type = other RNA
atcaccatggtagcaatcct

SEQ ID NO: 10669 - RNA, 20 nt, synthetic construct
  source 1..20: mol_type = other RNA
aggattgctaccatggtgat

SEQ ID NO: 10670 - RNA, 20 nt, synthetic construct
  source 1..20: mol_type = other RNA
ttcctgtgacagtggtggag

SEQ ID NO: 10671 - RNA, 20 nt, synthetic construct
  source 1..20: mol_type = other RNA
caggaaggacctgccaagct

SEQ ID NO: 10672 - RNA, 20 nt, synthetic construct
  source 1..20: mol_type = other RNA
tagatgaccaagcttggcag

SEQ ID NO: 10673 - RNA, 20 nt, synthetic construct
  source 1..20: mol_type = other RNA
ttaatcttacagtaagcaaa

SEQ ID NO: 10674 - RNA, 20 nt, synthetic construct
  source 1..20: mol_type = other RNA
aagtaaaatttgtcttagaa

SEQ ID NO: 10675 - RNA, 20 nt, synthetic construct
  source 1..20: mol_type = other RNA
tagaaaaggtgtgcgtcaag

SEQ ID NO: 10676 - RNA, 20 nt, synthetic construct
  source 1..20: mol_type = other RNA
agctaacttcttatgattaa

SEQ ID NO: 10677 - RNA, 20 nt, synthetic construct
  source 1..20: mol_type = other RNA
gagaaacattactttgagca

SEQ ID NO: 10678 - RNA, 20 nt, synthetic construct
  source 1..20: mol_type = other RNA
aaacattctgattttccatt

SEQ ID NO: 10679 - RNA, 20 nt, synthetic construct
  source 1..20: mol_type = other RNA
gcttcaacaacactcactaa

SEQ ID NO: 10680 - RNA, 20 nt, synthetic construct
  source 1..20: mol_type = other RNA
atgtgatctttaccccttga

SEQ ID NO: 10681 - RNA, 20 nt, synthetic construct
  source 1..20: mol_type = other RNA
tggctcacaagtaaatgata

SEQ ID NO: 10682 - RNA, 20 nt, synthetic construct
  source 1..20: mol_type = other RNA
attccaacgggtagaaacac

SEQ ID NO: 10683 - RNA, 20 nt, synthetic construct
  source 1..20: mol_type = other RNA
tgagcaccagtggtctgaag

SEQ ID NO: 10684 - RNA, 20 nt, synthetic construct
  source 1..20: mol_type = other RNA
gaaggaatacgggttgccag

SEQ ID NO: 10685 - RNA, 20 nt, synthetic construct
  source 1..20: mol_type = other RNA
catttcttactttcatctgc

SEQ ID NO: 10686 - RNA, 20 nt, synthetic construct
  source 1..20: mol_type = other RNA
atcttcccgcactttttatt

SEQ ID NO: 10687 - RNA, 20 nt, synthetic construct
  source 1..20: mol_type = other RNA
gaccccagcttctgtctatc

SEQ ID NO: 10688 - RNA, 20 nt, synthetic construct
  source 1..20: mol_type = other RNA
gaccacaccatggccagtct

SEQ ID NO: 10689 - RNA, 20 nt, synthetic construct
  source 1..20: mol_type = other RNA
cttatgtgtgaaagactggc

SEQ ID NO: 10690 - RNA, 20 nt, synthetic construct
  source 1..20: mol_type = other RNA
ttcacacataagtgactacc

SEQ ID NO: 10691 - RNA, 20 nt, synthetic construct
  source 1..20: mol_type = other RNA
ttggtagtcacttatgtgtg

SEQ ID NO: 10692 - RNA, 20 nt, synthetic construct
  source 1..20: mol_type = other RNA
aacaagcggaaatcattttt

SEQ ID NO: 10693 - RNA, 20 nt, synthetic construct
  source 1..20: mol_type = other RNA
tctaccatctattgtccaac

SEQ ID NO: 10694 - RNA, 20 nt, synthetic construct
  source 1..20: mol_type = other RNA
ccaggaagaaaaccagtgca

SEQ ID NO: 10695 - RNA, 20 nt, synthetic construct
  source 1..20: mol_type = other RNA
ctcctctgttcagcaagatg

SEQ ID NO: 10696 - RNA, 20 nt, synthetic construct
  source 1..20: mol_type = other RNA
ttggctaaacatgaagctgc

SEQ ID NO: 10697 - RNA, 20 nt, synthetic construct
  source 1..20: mol_type = other RNA
tgtttattgagctcactgtt

SEQ ID NO: 10698 - RNA, 20 nt, synthetic construct
  source 1..20: mol_type = other RNA
aaactccaatatcccttagt

SEQ ID NO: 10699 - RNA, 20 nt, synthetic construct
  source 1..20: mol_type = other RNA
ctctcctctgtgtggtccaa

SEQ ID NO: 10700 - RNA, 20 nt, synthetic construct
  source 1..20: mol_type = other RNA
ctactgaatgcccaagatgt

SEQ ID NO: 10701 - RNA, 20 nt, synthetic construct
  source 1..20: mol_type = other RNA
ccaagcatcagaatgatgtc

SEQ ID NO: 10702 - RNA, 20 nt, synthetic construct
  source 1..20: mol_type = other RNA
aagtcaatgaactgcctctg

SEQ ID NO: 10703 - RNA, 20 nt, synthetic construct
  source 1..20: mol_type = other RNA
atgaactgcctctgagagga

SEQ ID NO: 10704 - RNA, 20 nt, synthetic construct
  source 1..20: mol_type = other RNA
agtggctcagctatgcagta

SEQ ID NO: 10705 - RNA, 20 nt, synthetic construct
  source 1..20: mol_type = other RNA
agttttatatttaggcctca

SEQ ID NO: 10706 - RNA, 20 nt, synthetic construct
  source 1..20: mol_type = other RNA
cactaaaaggtttctatgtg

SEQ ID NO: 10707 - RNA, 20 nt, synthetic construct
  source 1..20: mol_type = other RNA
gtttgtattggctgattttc

SEQ ID NO: 10708 - RNA, 20 nt, synthetic construct
  source 1..20: mol_type = other RNA
cttctgggtctgtttgtatt

SEQ ID NO: 10709 - RNA, 20 nt, synthetic construct
  source 1..20: mol_type = other RNA
aatttttatgccattctaat

SEQ ID NO: 10710 - RNA, 20 nt, synthetic construct
  source 1..20: mol_type = other RNA
gttgcattctatattcatgt

SEQ ID NO: 10711 - RNA, 20 nt, synthetic construct
  source 1..20: mol_type = other RNA
ctggataaggtgtctgttgc

SEQ ID NO: 10712 - RNA, 20 nt, synthetic construct
  source 1..20: mol_type = other RNA
taaatgaaaaaattactaga

SEQ ID NO: 10713 - RNA, 20 nt, synthetic construct
  source 1..20: mol_type = other RNA
aactagatggggaggccatc

SEQ ID NO: 10714 - RNA, 20 nt, synthetic construct
  source 1..20: mol_type = other RNA
gtgtggctcggttgatttca

SEQ ID NO: 10715 - RNA, 20 nt, synthetic construct
  source 1..20: mol_type = other RNA
cagaaagggggaaggagatt

SEQ ID NO: 10716 - RNA, 20 nt, synthetic construct
  source 1..20: mol_type = other RNA
gtgattttttaatcttcttt

SEQ ID NO: 10717 - RNA, 20 nt, synthetic construct
  source 1..20: mol_type = other RNA
ttttagaaattatttttctg

SEQ ID NO: 10718 - RNA, 20 nt, synthetic construct
  source 1..20: mol_type = other RNA
ttgccctctgacagttgaac

SEQ ID NO: 10719 - RNA, 20 nt, synthetic construct
  source 1..20: mol_type = other RNA
gagggcaaagacataataca

SEQ ID NO: 10720 - RNA, 20 nt, synthetic construct
  source 1..20: mol_type = other RNA
tgctagaggaacagtgatac

SEQ ID NO: 10721 - RNA, 20 nt, synthetic construct
  source 1..20: mol_type = other RNA
cttgtatcactgttcctcta

SEQ ID NO: 10722 - RNA, 20 nt, synthetic construct
  source 1..20: mol_type = other RNA
aggttgcagtgtttctgatg

SEQ ID NO: 10723 - RNA, 20 nt, synthetic construct
  source 1..20: mol_type = other RNA
tacagtttccggtttctttg

SEQ ID NO: 10724 - RNA, 20 nt, synthetic construct
  source 1..20: mol_type = other RNA
cctcttttgttacataagcc

SEQ ID NO: 10725 - RNA, 20 nt, synthetic construct
  source 1..20: mol_type = other RNA
actctcatttaaaaagatat

SEQ ID NO: 10726 - RNA, 20 nt, synthetic construct
  source 1..20: mol_type = other RNA
ttaaagagctctggctctta

SEQ ID NO: 10727 - RNA, 20 nt, synthetic construct
  source 1..20: mol_type = other RNA
cagaccctccattccaggaa

SEQ ID NO: 10728 - RNA, 20 nt, synthetic construct
  source 1..20: mol_type = other RNA
cagtcccagaccctccattc

SEQ ID NO: 10729 - RNA, 20 nt, synthetic construct
  source 1..20: mol_type = other RNA
gggactgagactaggccaca

SEQ ID NO: 10730 - RNA, 20 nt, synthetic construct
  source 1..20: mol_type = other RNA
ctagtggctctacacatgtg

SEQ ID NO: 10731 - RNA, 20 nt, synthetic construct
  source 1..20: mol_type = other RNA
tgaatgtgaggatactgaga

SEQ ID NO: 10732 - RNA, 20 nt, synthetic construct
  source 1..20: mol_type = other RNA
gacagctatggaggagcaaa

SEQ ID NO: 10733 - RNA, 20 nt, synthetic construct
  source 1..20: mol_type = other RNA
gacctcttcagatctcttag

SEQ ID NO: 10734 - RNA, 20 nt, synthetic construct
  source 1..20: mol_type = other RNA
tcctgccatcttcctttatg

SEQ ID NO: 10735 - RNA, 20 nt, synthetic construct
  source 1..20: mol_type = other RNA
catggcataaaggaagatgg

SEQ ID NO: 10736 - RNA, 20 nt, synthetic construct
  source 1..20: mol_type = other RNA
acagccactccagaactggg

SEQ ID NO: 10737 - RNA, 20 nt, synthetic construct
  source 1..20: mol_type = other RNA
atcctctgctgtccacagcc

SEQ ID NO: 10738 - RNA, 20 nt, synthetic construct
  source 1..20: mol_type = other RNA
tgcccaggaacccattctag

SEQ ID NO: 10739 - RNA, 20 nt, synthetic construct
  source 1..20: mol_type = other RNA
agtaggtttgtttctgcaag

SEQ ID NO: 10740 - RNA, 20 nt, synthetic construct
  source 1..20: mol_type = other RNA
tgcagaaacaaacctacttg

SEQ ID NO: 10741 - RNA, 20 nt, synthetic construct
  source 1..20: mol_type = other RNA
gtcaagtaggtttgtttctg

SEQ ID NO: 10742 - RNA, 20 nt, synthetic construct
  source 1..20: mol_type = other RNA
ttcccatatcatgtcggtca

SEQ ID NO: 10743 - RNA, 20 nt, synthetic construct
  source 1..20: mol_type = other RNA
gtcattcccatatcatgtcg

SEQ ID NO: 10744 - RNA, 20 nt, synthetic construct
  source 1..20: mol_type = other RNA
actctcacactccatgtact

SEQ ID NO: 10745 - RNA, 20 nt, synthetic construct
  source 1..20: mol_type = other RNA
ccgtatctctctcggtagga

SEQ ID NO: 10746 - RNA, 20 nt, synthetic construct
  source 1..20: mol_type = other RNA
taccgagagagatacggaga

SEQ ID NO: 10747 - RNA, 20 nt, synthetic construct
  source 1..20: mol_type = other RNA
agtctccgtatctctctcgg

SEQ ID NO: 10748 - RNA, 20 nt, synthetic construct
  source 1..20: mol_type = other RNA
gtattgtgggattgtgtatt

SEQ ID NO: 10749 - RNA, 20 nt, synthetic construct
  source 1..20: mol_type = other RNA
aaacccataccagttattcc

SEQ ID NO: 10750 - RNA, 20 nt, synthetic construct
  source 1..20: mol_type = other RNA
ttaccggtgcctttctaata

SEQ ID NO: 10751 - RNA, 20 nt, synthetic construct
  source 1..20: mol_type = other RNA
caagaggtgggacaacatgc

SEQ ID NO: 10752 - RNA, 20 nt, synthetic construct
  source 1..20: mol_type = other RNA
cacctcttgtgacgtgtatc

SEQ ID NO: 10753 - RNA, 20 nt, synthetic construct
  source 1..20: mol_type = other RNA
ggttgcagtactcccacctg

SEQ ID NO: 10754 - RNA, 20 nt, synthetic construct
  source 1..20: mol_type = other RNA
ggtgggagtactgcaacctg

SEQ ID NO: 10755 - RNA, 20 nt, synthetic construct
  source 1..20: mol_type = other RNA
gagcattgcgtcaggttgca

SEQ ID NO: 10756 - RNA, 20 nt, synthetic construct
  source 1..20: mol_type = other RNA
cttctgcgtctgagcattgc

SEQ ID NO: 10757 - RNA, 20 nt, synthetic construct
  source 1..20: mol_type = other RNA
gaggcgcgacggcagtccct

SEQ ID NO: 10758 - RNA, 20 nt, synthetic construct
  source 1..20: mol_type = other RNA
cgcctccgactgttaccccg

SEQ ID NO: 10759 - RNA, 20 nt, synthetic construct
  source 1..20: mol_type = other RNA
ggccacagactccttacctt

SEQ ID NO: 10760 - RNA, 20 nt, synthetic construct
  source 1..20: mol_type = other RNA
gtggccagacatctacacgc

SEQ ID NO: 10761 - RNA, 20 nt, synthetic construct
  source 1..20: mol_type = other RNA
ttaggatgggcacaaaccct

SEQ ID NO: 10762 - RNA, 20 nt, synthetic construct
  source 1..20: mol_type = other RNA
atccccctggagggtttgtg

SEQ ID NO: 10763 - RNA, 20 nt, synthetic construct
  source 1..20: mol_type = other RNA
cagccaaaatttttattgta

SEQ ID NO: 10764 - RNA, 20 nt, synthetic construct
  source 1..20: mol_type = other RNA
ggtgtgtcactctttccaag

SEQ ID NO: 10765 - RNA, 20 nt, synthetic construct
  source 1..20: mol_type = other RNA
ctctttccaagccagtaagc

SEQ ID NO: 10766 - RNA, 20 nt, synthetic construct
  source 1..20: mol_type = other RNA
ccctcgagaaacctaagagg

SEQ ID NO: 10767 - RNA, 20 nt, synthetic construct
  source 1..20: mol_type = other RNA
atggagcagtacatgagctc

SEQ ID NO: 10768 - RNA, 20 nt, synthetic construct
  source 1..20: mol_type = other RNA
tcagaaagaggtttaagaat

SEQ ID NO: 10769 - RNA, 20 nt, synthetic construct
  source 1..20: mol_type = other RNA
actactctttctctctagac

SEQ ID NO: 10770 - RNA, 20 nt, synthetic construct
  source 1..20: mol_type = other RNA
agagagaaagagtagtagac

SEQ ID NO: 10771 - RNA, 20 nt, synthetic construct
  source 1..20: mol_type = other RNA
ttgtcttcagtcagatacat

SEQ ID NO: 10772 - RNA, 20 nt, synthetic construct
  source 1..20: mol_type = other RNA
tatgtatctgactgaagaca

SEQ ID NO: 10773 - RNA, 20 nt, synthetic construct
  source 1..20: mol_type = other RNA
tcagtcagatacataggacc

SEQ ID NO: 10774 - RNA, 20 nt, synthetic construct
  source 1..20: mol_type = other RNA
gatacataggaccgttttct

SEQ ID NO: 10775 - RNA, 20 nt, synthetic construct
  source 1..20: mol_type = other RNA
agggaaacatgcaaaatttc

SEQ ID NO: 10776 - RNA, 20 nt, synthetic construct
  source 1..20: mol_type = other RNA
ggggcagagtttgggacaga

SEQ ID NO: 10777 - RNA, 20 nt, synthetic construct
  source 1..20: mol_type = other RNA
gtcccaaactctgcccccga

SEQ ID NO: 10778 - RNA, 20 nt, synthetic construct
  source 1..20: mol_type = other RNA
caaactctgcccccgacagc

SEQ ID NO: 10779 - RNA, 20 nt, synthetic construct
  source 1..20: mol_type = other RNA
ggtgaaatatttccaagaac

SEQ ID NO: 10780 - RNA, 20 nt, synthetic construct
  source 1..20: mol_type = other RNA
gttttctcacatccatctgc

SEQ ID NO: 10781 - RNA, 20 nt, synthetic construct
  source 1..20: mol_type = other RNA
atgagaattacgaccgttct

SEQ ID NO: 10782 - RNA, 20 nt, synthetic construct
  source 1..20: mol_type = other RNA
taattctcatagactccttt

SEQ ID NO: 10783 - RNA, 20 nt, synthetic construct
  source 1..20: mol_type = other RNA
caaatggcttcacatgtttc

SEQ ID NO: 10784 - RNA, 20 nt, synthetic construct
  source 1..20: mol_type = other RNA
gtgctgaaatgaaaacacgg

SEQ ID NO: 10785 - RNA, 20 nt, synthetic construct
  source 1..20: mol_type = other RNA
attaccatggtagcactcct

SEQ ID NO: 10786 - RNA, 20 nt, synthetic construct
  source 1..20: mol_type = other RNA
caggaagaacctgccaagct

SEQ ID NO: 10787 - RNA, 20 nt, synthetic construct
  source 1..20: mol_type = other RNA
tagatgaccaagcttggcag

SEQ ID NO: 10788 - RNA, 20 nt, synthetic construct
  source 1..20: mol_type = other RNA
tctatgacaccacactcgca

SEQ ID NO: 10789 - RNA, 20 nt, synthetic construct
  source 1..20: mol_type = other RNA
gactatgcgagtgtggtgtc

SEQ ID NO: 10790 - RNA, 20 nt, synthetic construct
  source 1..20: mol_type = other RNA
gaccccagaatactacccaa

SEQ ID NO: 10791 - RNA, 20 nt, synthetic construct
  source 1..20: mol_type = other RNA
ttgttctttaccataagaga

SEQ ID NO: 10792 - RNA, 20 nt, synthetic construct
  source 1..20: mol_type = other RNA
caagctgagttctccgaact

SEQ ID NO: 10793 - RNA, 20 nt, synthetic construct
  source 1..20: mol_type = other RNA
caagttgagttcggagaact

SEQ ID NO: 10794 - RNA, 20 nt, synthetic construct
  source 1..20: mol_type = other RNA
caggatgattgccttggagc

SEQ ID NO: 10795 - RNA, 20 nt, synthetic construct
  source 1..20: mol_type = other RNA
gagagaagggaaatgttaag

SEQ ID NO: 10796 - RNA, 20 nt, synthetic construct
  source 1..20: mol_type = other RNA
ttctgactttcttcataatg

SEQ ID NO: 10797 - RNA, 20 nt, synthetic construct
  source 1..20: mol_type = other RNA
tttgtcattctgactttctt

SEQ ID NO: 10798 - RNA, 20 nt, synthetic construct
  source 1..20: mol_type = other RNA
ggtcctttgtcattctgact

SEQ ID NO: 10799 - RNA, 20 nt, synthetic construct
  source 1..20: mol_type = other RNA
gaatgacaaaggaccagaca

SEQ ID NO: 10800 - RNA, 20 nt, synthetic construct
  source 1..20: mol_type = other RNA
ccattgacgtttagttggtg

SEQ ID NO: 10801 - RNA, 20 nt, synthetic construct
  source 1..20: mol_type = other RNA
atggagactttccagttgga

SEQ ID NO: 10802 - RNA, 20 nt, synthetic construct
  source 1..20: mol_type = other RNA
ataaataagcacctattctt

SEQ ID NO: 10803 - RNA, 20 nt, synthetic construct
  source 1..20: mol_type = other RNA
gaaaaacactcgttcctaag

SEQ ID NO: 10804 - RNA, 20 nt, synthetic construct
  source 1..20: mol_type = other RNA
gcacagagagggatgctgaa

SEQ ID NO: 10805 - RNA, 20 nt, synthetic construct
  source 1..20: mol_type = other RNA
gacccgggcttctctccatc

SEQ ID NO: 10806 - RNA, 20 nt, synthetic construct
  source 1..20: mol_type = other RNA
gaccacccaatggccaatat

SEQ ID NO: 10807 - RNA, 20 nt, synthetic construct
  source 1..20: mol_type = other RNA
cttgtggccaaaatattggc

SEQ ID NO: 10808 - RNA, 20 nt, synthetic construct
  source 1..20: mol_type = other RNA
ctggtagtcgcttgtggcca

SEQ ID NO: 10809 - RNA, 20 nt, synthetic construct
  source 1..20: mol_type = other RNA
cacatgtagaaaccattttt

SEQ ID NO: 10810 - RNA, 20 nt, synthetic construct
  source 1..20: mol_type = other RNA
tctaccatctgttgtcccac

SEQ ID NO: 10811 - RNA, 20 nt, synthetic construct
  source 1..20: mol_type = other RNA
gcttgggctccatctccttg

SEQ ID NO: 10812 - RNA, 20 nt, synthetic construct
  source 1..20: mol_type = other RNA
tcccaaactccaatccctct

SEQ ID NO: 10813 - RNA, 20 nt, synthetic construct
  source 1..20: mol_type = other RNA
gctagaaataagaactggtt

SEQ ID NO: 10814 - RNA, 20 nt, synthetic construct
  source 1..20: mol_type = other RNA
ggccaacgactggaggagac

SEQ ID NO: 10815 - RNA, 20 nt, synthetic construct
  source 1..20: mol_type = other RNA
cctccagtcgttggcctgac

SEQ ID NO: 10816 - RNA, 20 nt, synthetic construct
  source 1..20: mol_type = other RNA
tgtcaggccaacgactggag

SEQ ID NO: 10817 - RNA, 20 nt, synthetic construct
  source 1..20: mol_type = other RNA
ttggcctgacatgacgctgc

SEQ ID NO: 10818 - RNA, 20 nt, synthetic construct
  source 1..20: mol_type = other RNA
agctgggaagaactccagta

SEQ ID NO: 10819 - RNA, 20 nt, synthetic construct
  source 1..20: mol_type = other RNA
tcacggagcacattgccaat

SEQ ID NO: 10820 - RNA, 20 nt, synthetic construct
  source 1..20: mol_type = other RNA
ccactgaattggcaatgtgc

SEQ ID NO: 10821 - RNA, 20 nt, synthetic construct
  source 1..20: mol_type = other RNA
gcagctgactttattctagt

SEQ ID NO: 10822 - RNA, 20 nt, synthetic construct
  source 1..20: mol_type = other RNA
gctgcagacaaccccttgca

SEQ ID NO: 10823 - RNA, 20 nt, synthetic construct
  source 1..20: mol_type = other RNA
aagcatcaaatcggtttcca

SEQ ID NO: 10824 - RNA, 20 nt, synthetic construct
  source 1..20: mol_type = other RNA
attgcctcagctatgcggta

SEQ ID NO: 10825 - RNA, 20 nt, synthetic construct
  source 1..20: mol_type = other RNA
gattttaaatttaggactca

SEQ ID NO: 10826 - RNA, 20 nt, synthetic construct
  source 1..20: mol_type = other RNA
taaatttaaaatctgactac

SEQ ID NO: 10827 - RNA, 20 nt, synthetic construct
  source 1..20: mol_type = other RNA
cacgaaacgcttttctacat

SEQ ID NO: 10828 - RNA, 20 nt, synthetic construct
  source 1..20: mol_type = other RNA
tgggtcacacgaaacgcttt

SEQ ID NO: 10829 - RNA, 20 nt, synthetic construct
  source 1..20: mol_type = other RNA
aattttcacgcaattctaat

SEQ ID NO: 10830 - RNA, 20 nt, synthetic construct
  source 1..20: mol_type = other RNA
taattgaaaaaaattactgt

SEQ ID NO: 10831 - RNA, 20 nt, synthetic construct
  source 1..20: mol_type = other RNA
aaattgatcagccggccata

SEQ ID NO: 10832 - RNA, 20 nt, synthetic construct
  source 1..20: mol_type = other RNA
gtgtgtgttagaacttgtga

SEQ ID NO: 10833 - RNA, 20 nt, synthetic construct
  source 1..20: mol_type = other RNA
gtgaggctcgcttaatttta

SEQ ID NO: 10834 - RNA, 20 nt, synthetic construct
  source 1..20: mol_type = other RNA
cagtaaagagcaagggagtt

SEQ ID NO: 10835 - RNA, 20 nt, synthetic construct
  source 1..20: mol_type = other RNA
cgagaaactggaggaaaaag

SEQ ID NO: 10836 - RNA, 20 nt, synthetic construct
  source 1..20: mol_type = other RNA
tcctacaagtacactgatac

SEQ ID NO: 10837 - RNA, 20 nt, synthetic construct
  source 1..20: mol_type = other RNA
tccatgtcggataaatgcat

SEQ ID NO: 10838 - RNA, 20 nt, synthetic construct
  source 1..20: mol_type = other RNA
gataaatgcatattgtgcac

SEQ ID NO: 10839 - RNA, 20 nt, synthetic construct
  source 1..20: mol_type = other RNA
cctctcttgttacataagcc

SEQ ID NO: 10840 - RNA, 20 nt, synthetic construct
  source 1..20: mol_type = other RNA
actctcatttacaaagatat

SEQ ID NO: 10841 - RNA, 20 nt, synthetic construct
  source 1..20: mol_type = other RNA
tattaataaaagggtactgt

SEQ ID NO: 10842 - RNA, 20 nt, synthetic construct
  source 1..20: mol_type = other RNA
atgcattcaaaagagggaag

SEQ ID NO: 10843 - RNA, 20 nt, synthetic construct
  source 1..20: mol_type = other RNA
ttcaagagctcaggctctta

SEQ ID NO: 10844 - RNA, 20 nt, synthetic construct
  source 1..20: mol_type = other RNA
caaccccagaccctccattc

SEQ ID NO: 10845 - RNA, 20 nt, synthetic construct
  source 1..20: mol_type = other RNA
ggggttgagactaggccaca

SEQ ID NO: 10846 - RNA, 20 nt, synthetic construct
  source 1..20: mol_type = other RNA
ctctagagactctagacttg

SEQ ID NO: 10847 - RNA, 20 nt, synthetic construct
  source 1..20: mol_type = other RNA
agagtctctagagagacagt

SEQ ID NO: 10848 - RNA, 20 nt, synthetic construct
  source 1..20: mol_type = other RNA
ctagagagacagtgttggaa

SEQ ID NO: 10849 - RNA, 20 nt, synthetic construct
  source 1..20: mol_type = other RNA
tgaatgtgaggatactggga

SEQ ID NO: 10850 - RNA, 20 nt, synthetic construct
  source 1..20: mol_type = other RNA
gacagctacggagcagcaga

SEQ ID NO: 10851 - RNA, 20 nt, synthetic construct
  source 1..20: mol_type = other RNA
gacctcttcagatctcttag

SEQ ID NO: 10852 - RNA, 20 nt, synthetic construct
  source 1..20: mol_type = other RNA
accctgccgtcttcctttat

SEQ ID NO: 10853 - RNA, 20 nt, synthetic construct
  source 1..20: mol_type = other RNA
tcctttatgccatgggtccc

SEQ ID NO: 10854 - RNA, 20 nt, synthetic construct
  source 1..20: mol_type = other RNA
cactgttctttcaactcatc

SEQ ID NO: 10855 - RNA, 20 nt, synthetic construct
  source 1..20: mol_type = other RNA
cggagtagctgcggccagca

SEQ ID NO: 10856 - RNA, 20 nt, synthetic construct
  source 1..20: mol_type = other RNA
accctctgctggccgcagct

SEQ ID NO: 10857 - RNA, 20 nt, synthetic construct
  source 1..20: mol_type = other RNA
ttctctcctgctctcagtct

SEQ ID NO: 10858 - RNA, 20 nt, synthetic construct
  source 1..20: mol_type = other RNA
tggagaaacaaacctactaa

SEQ ID NO: 10859 - RNA, 20 nt, synthetic construct
  source 1..20: mol_type = other RNA
ggtttagtaggtttgtttct

SEQ ID NO: 10860 - RNA, 20 nt, synthetic construct
  source 1..20: mol_type = other RNA
gtcaggtttagtaggtttgt

SEQ ID NO: 10861 - RNA, 20 nt, synthetic construct
  source 1..20: mol_type = other RNA
accctcacactctatgtact

SEQ ID NO: 10862 - RNA, 20 nt, synthetic construct
  source 1..20: mol_type = other RNA
tccaggaggatagccgttcc

SEQ ID NO: 10863 - RNA, 20 nt, synthetic construct
  source 1..20: mol_type = other RNA
ccgtatctctctcggtagga

SEQ ID NO: 10864 - RNA, 20 nt, synthetic construct
  source 1..20: mol_type = other RNA
taccgagagagatacggaga

SEQ ID NO: 10865 - RNA, 20 nt, synthetic construct
  source 1..20: mol_type = other RNA
agtctccgtatctctctcgg

SEQ ID NO: 10866 - RNA, 20 nt, synthetic construct
  source 1..20: mol_type = other RNA
gtattgtgggattgtgtatt

SEQ ID NO: 10867 - RNA, 20 nt, synthetic construct
  source 1..20: mol_type = other RNA
aaacccataccagttattcc

SEQ ID NO: 10868 - RNA, 20 nt, synthetic construct
  source 1..20: mol_type = other RNA
ttaccggtgcctttctaata

SEQ ID NO: 10869 - RNA, 20 nt, synthetic construct
  source 1..20: mol_type = other RNA
caagaggtgggacaacatgc

SEQ ID NO: 10870 - RNA, 20 nt, synthetic construct
  source 1..20: mol_type = other RNA
cacctcttgtgacgtgtatc

SEQ ID NO: 10871 - RNA, 20 nt, synthetic construct
  source 1..20: mol_type = other RNA
ggttgcagtactcccacctg

SEQ ID NO: 10872 - RNA, 20 nt, synthetic construct
  source 1..20: mol_type = other RNA
ggtgggagtactgcaacctg

SEQ ID NO: 10873 - RNA, 20 nt, synthetic construct
  source 1..20: mol_type = other RNA
gagcattgcgtcaggttgca

SEQ ID NO: 10874 - RNA, 20 nt, synthetic construct
  source 1..20: mol_type = other RNA
cttctgcgtctgagcattgc

SEQ ID NO: 10875 - RNA, 20 nt, synthetic construct
  source 1..20: mol_type = other RNA
gaggcgcgacggcagtccct

SEQ ID NO: 10876 - RNA, 20 nt, synthetic construct
  source 1..20: mol_type = other RNA
cgcctccgactgttaccccg

SEQ ID NO: 10877 - RNA, 20 nt, synthetic construct
  source 1..20: mol_type = other RNA
ggccacagactccttacctt

SEQ ID NO: 10878 - RNA, 20 nt, synthetic construct
  source 1..20: mol_type = other RNA
gtggccagacatctacacgc

SEQ ID NO: 10879 - RNA, 20 nt, synthetic construct
  source 1..20: mol_type = other RNA
ttaggatgggcacaaaccct

SEQ ID NO: 10880 - RNA, 20 nt, synthetic construct
  source 1..20: mol_type = other RNA
atccccctggagggtttgtg

SEQ ID NO: 10881 - RNA, 20 nt, synthetic construct
  source 1..20: mol_type = other RNA
cagccaaaatttttattgta

SEQ ID NO: 10882 - RNA, 20 nt, synthetic construct
  source 1..20: mol_type = other RNA
ggtgtgtcactctttccaag

SEQ ID NO: 10883 - RNA, 20 nt, synthetic construct
  source 1..20: mol_type = other RNA
ctctttccaagccagtaagc

SEQ ID NO: 10884 - RNA, 20 nt, synthetic construct
  source 1..20: mol_type = other RNA
ccctcgagaaacctaagagg

SEQ ID NO: 10885 - RNA, 20 nt, synthetic construct
  source 1..20: mol_type = other RNA
atggagcagtacatgagctc

SEQ ID NO: 10886 - RNA, 20 nt, synthetic construct
  source 1..20: mol_type = other RNA
tcagaaagaggtttaagaat

SEQ ID NO: 10887 - RNA, 20 nt, synthetic construct
  source 1..20: mol_type = other RNA
actactctttctctctagac

SEQ ID NO: 10888 - RNA, 20 nt, synthetic construct
  source 1..20: mol_type = other RNA
agagagaaagagtagtagac

SEQ ID NO: 10889 - RNA, 20 nt, synthetic construct
  source 1..20: mol_type = other RNA
ttgtcttcagtcagatacat

SEQ ID NO: 10890 - RNA, 20 nt, synthetic construct
  source 1..20: mol_type = other RNA
tatgtatctgactgaagaca

SEQ ID NO: 10891 - RNA, 20 nt, synthetic construct
  source 1..20: mol_type = other RNA
tcagtcagatacataggacc

SEQ ID NO: 10892 - RNA, 20 nt, synthetic construct
  source 1..20: mol_type = other RNA
gatacataggaccgttttct

SEQ ID NO: 10893 - RNA, 20 nt, synthetic construct
  source 1..20: mol_type = other RNA
agggaaacatgcaaaatttc

SEQ ID NO: 10894 - RNA, 20 nt, synthetic construct
  source 1..20: mol_type = other RNA
ggggcagagtttgggacaga

SEQ ID NO: 10895 - RNA, 20 nt, synthetic construct
  source 1..20: mol_type = other RNA
gtcccaaactctgcccccga

SEQ ID NO: 10896 - RNA, 20 nt, synthetic construct
  source 1..20: mol_type = other RNA
caaactctgcccccgacagc

SEQ ID NO: 10897 - RNA, 20 nt, synthetic construct
  source 1..20: mol_type = other RNA
ggtgaaatatttccaagaac

SEQ ID NO: 10898 - RNA, 20 nt, synthetic construct
  source 1..20: mol_type = other RNA
gttttctcacatccatctgc

SEQ ID NO: 10899 - RNA, 20 nt, synthetic construct
  source 1..20: mol_type = other RNA
atgagaattacgaccgttct

SEQ ID NO: 10900 - RNA, 20 nt, synthetic construct
  source 1..20: mol_type = other RNA
taattctcatagactccttt

SEQ ID NO: 10901 - RNA, 20 nt, synthetic construct
  source 1..20: mol_type = other RNA
caaatggcttcacatgtttc

SEQ ID NO: 10902 - RNA, 20 nt, synthetic construct
  source 1..20: mol_type = other RNA
gtgctgaaatgaaaacacgg

SEQ ID NO: 10903 - RNA, 20 nt, synthetic construct
  source 1..20: mol_type = other RNA
attaccatggtagcactcct

SEQ ID NO: 10904 - RNA, 20 nt, synthetic construct
  source 1..20: mol_type = other RNA
caggaagaacctgccaagct

SEQ ID NO: 10905 - RNA, 20 nt, synthetic construct
  source 1..20: mol_type = other RNA
tagatgaccaagcttggcag

SEQ ID NO: 10906 - RNA, 20 nt, synthetic construct
  source 1..20: mol_type = other RNA
tctatgacaccacactcgca

SEQ ID NO: 10907 - RNA, 20 nt, synthetic construct
  source 1..20: mol_type = other RNA
gactatgcgagtgtggtgtc

SEQ ID NO: 10908 - RNA, 20 nt, synthetic construct
  source 1..20: mol_type = other RNA
gaccccagaatactacccaa

SEQ ID NO: 10909 - RNA, 20 nt, synthetic construct
  source 1..20: mol_type = other RNA
ttgttctttaccataagaga

SEQ ID NO: 10910 - RNA, 20 nt, synthetic construct
  source 1..20: mol_type = other RNA
caagctgagttctccgaact

SEQ ID NO: 10911 - RNA, 20 nt, synthetic construct
  source 1..20: mol_type = other RNA
caagttgagttcggagaact

SEQ ID NO: 10912 - RNA, 20 nt, synthetic construct
  source 1..20: mol_type = other RNA
caggatgattgccttggagc

SEQ ID NO: 10913 - RNA, 20 nt, synthetic construct
  source 1..20: mol_type = other RNA
gagagaagggaaatgttaag

SEQ ID NO: 10914 - RNA, 20 nt, synthetic construct
  source 1..20: mol_type = other RNA
ttctgactttcttcataatg

SEQ ID NO: 10915 - RNA, 20 nt, synthetic construct
  source 1..20: mol_type = other RNA
tttgtcattctgactttctt

SEQ ID NO: 10916 - RNA, 20 nt, synthetic construct
  source 1..20: mol_type = other RNA
ggtcctttgtcattctgact

SEQ ID NO: 10917 - RNA, 20 nt, synthetic construct
  source 1..20: mol_type = other RNA
gaatgacaaaggaccagaca

SEQ ID NO: 10918 - RNA, 20 nt, synthetic construct
  source 1..20: mol_type = other RNA
ccattgacgtttagttggtg

SEQ ID NO: 10919 - RNA, 20 nt, synthetic construct
  source 1..20: mol_type = other RNA
atggagactttccagttgga

SEQ ID NO: 10920 - RNA, 20 nt, synthetic construct
  source 1..20: mol_type = other RNA
ataaataagcacctattctt

SEQ ID NO: 10921 - RNA, 20 nt, synthetic construct
  source 1..20: mol_type = other RNA
gaaaaacactcgttcctaag

SEQ ID NO: 10922 - RNA, 20 nt, synthetic construct
  source 1..20: mol_type = other RNA
gcacagagagggatgctgaa

SEQ ID NO: 10923 - RNA, 20 nt, synthetic construct
  source 1..20: mol_type = other RNA
gacccgggcttctctccatc

SEQ ID NO: 10924 - RNA, 20 nt, synthetic construct
  source 1..20: mol_type = other RNA
gaccacccaatggccaatat

SEQ ID NO: 10925 - RNA, 20 nt, synthetic construct
  source 1..20: mol_type = other RNA
cttgtggccaaaatattggc

SEQ ID NO: 10926 - RNA, 20 nt, synthetic construct
  source 1..20: mol_type = other RNA
ctggtagtcgcttgtggcca

SEQ ID NO: 10927 - RNA, 20 nt, synthetic construct
  source 1..20: mol_type = other RNA
cacatgtagaaaccattttt

SEQ ID NO: 10928 - RNA, 20 nt, synthetic construct
  source 1..20: mol_type = other RNA
tctaccatctgttgtcccac

SEQ ID NO: 10929 - RNA, 20 nt, synthetic construct
  source 1..20: mol_type = other RNA
gcttgggctccatctccttg

SEQ ID NO: 10930 - RNA, 20 nt, synthetic construct
  source 1..20: mol_type = other RNA
tcccaaactccaatccctct

SEQ ID NO: 10931 - RNA, 20 nt, synthetic construct
  source 1..20: mol_type = other RNA
gctagaaataagaactggtt

SEQ ID NO: 10932 - RNA, 20 nt, synthetic construct
  source 1..20: mol_type = other RNA
ggccaacgactggaggagac

SEQ ID NO: 10933 - RNA, 20 nt, synthetic construct
  source 1..20: mol_type = other RNA
cctccagtcgttggcctgac

SEQ ID NO: 10934 - RNA, 20 nt, synthetic construct
  source 1..20: mol_type = other RNA
tgtcaggccaacgactggag

SEQ ID NO: 10935 - RNA, 20 nt, synthetic construct
  source 1..20: mol_type = other RNA
ttggcctgacatgacgctgc

SEQ ID NO: 10936 - RNA, 20 nt, synthetic construct
  source 1..20: mol_type = other RNA
agctgggaagaactccagta

SEQ ID NO: 10937 - RNA, 20 nt, synthetic construct
  source 1..20: mol_type = other RNA
tcacggagcacattgccaat

SEQ ID NO: 10938 - RNA, 20 nt, synthetic construct
  source 1..20: mol_type = other RNA
ccactgaattggcaatgtgc

SEQ ID NO: 10939 - RNA, 20 nt, synthetic construct
  source 1..20: mol_type = other RNA
gcagctgactttattctagt

SEQ ID NO: 10940 - RNA, 20 nt, synthetic construct
  source 1..20: mol_type = other RNA
gctgcagacaaccccttgca

SEQ ID NO: 10941 - RNA, 20 nt, synthetic construct
  source 1..20: mol_type = other RNA
aagcatcaaatcggtttcca

SEQ ID NO: 10942 - RNA, 20 nt, synthetic construct
  source 1..20: mol_type = other RNA
attgcctcagctatgcggta

SEQ ID NO: 10943 - RNA, 20 nt, synthetic construct
  source 1..20: mol_type = other RNA
gattttaaatttaggactca

SEQ ID NO: 10944 - RNA, 20 nt, synthetic construct
  source 1..20: mol_type = other RNA
taaatttaaaatctgactac

SEQ ID NO: 10945 - RNA, 20 nt, synthetic construct
  source 1..20: mol_type = other RNA
cacgaaacgcttttctacat

SEQ ID NO: 10946 - RNA, 20 nt, synthetic construct
  source 1..20: mol_type = other RNA
tgggtcacacgaaacgcttt

SEQ ID NO: 10947 - RNA, 20 nt, synthetic construct
  source 1..20: mol_type = other RNA
aattttcacgcaattctaat

SEQ ID NO: 10948 - RNA, 20 nt, synthetic construct
  source 1..20: mol_type = other RNA
taattgaaaaaaattactgt

SEQ ID NO: 10949 - RNA, 20 nt, synthetic construct
  source 1..20: mol_type = other RNA
aaattgatcagccggccata

SEQ ID NO: 10950 - RNA, 20 nt, synthetic construct
  source 1..20: mol_type = other RNA
gtgtgtgttagaacttgtga

SEQ ID NO: 10951 - RNA, 20 nt, synthetic construct
  source 1..20: mol_type = other RNA
gtgaggctcgcttaatttta

SEQ ID NO: 10952 - RNA, 20 nt, synthetic construct
  source 1..20: mol_type = other RNA
cagtaaagagcaagggagtt

SEQ ID NO: 10953 - RNA, 20 nt, synthetic construct
  source 1..20: mol_type = other RNA
cgagaaactggaggaaaaag

SEQ ID NO: 10954 - RNA, 20 nt, synthetic construct
  source 1..20: mol_type = other RNA
tcctacaagtacactgatac

SEQ ID NO: 10955 - RNA, 20 nt, synthetic construct
  source 1..20: mol_type = other RNA
gataaatgcatattgtgcac

SEQ ID NO: 10956 - RNA, 20 nt, synthetic construct
  source 1..20: mol_type = other RNA
cctctcttgttacataagcc

SEQ ID NO: 10957 - RNA, 20 nt, synthetic construct
  source 1..20: mol_type = other RNA
actctcatttacaaagatat

SEQ ID NO: 10958 - RNA, 20 nt, synthetic construct
  source 1..20: mol_type = other RNA
tattaataaaagggtactgt

SEQ ID NO: 10959 - RNA, 20 nt, synthetic construct
  source 1..20: mol_type = other RNA
atgcattcaaaagagggaag

SEQ ID NO: 10960 - RNA, 20 nt, synthetic construct
  source 1..20: mol_type = other RNA
ttcaagagctcaggctctta

SEQ ID NO: 10961 - RNA, 20 nt, synthetic construct
  source 1..20: mol_type = other RNA
caaccccagaccctccattc

SEQ ID NO: 10962 - RNA, 20 nt, synthetic construct
  source 1..20: mol_type = other RNA
ggggttgagactaggccaca

SEQ ID NO: 10963 - RNA, 20 nt, synthetic construct
  source 1..20: mol_type = other RNA
ctctagagactctagacttg

SEQ ID NO: 10964 - RNA, 20 nt, synthetic construct
  source 1..20: mol_type = other RNA
agagtctctagagagacagt

SEQ ID NO: 10965 - RNA, 20 nt, synthetic construct
  source 1..20: mol_type = other RNA
ctagagagacagtgttggaa

SEQ ID NO: 10966 - RNA, 20 nt, synthetic construct
  source 1..20: mol_type = other RNA
tgaatgtgaggatactggga

SEQ ID NO: 10967 - RNA, 20 nt, synthetic construct
  source 1..20: mol_type = other RNA
gacagctacggagcagcaga

SEQ ID NO: 10968 - RNA, 20 nt, synthetic construct
  source 1..20: mol_type = other RNA
gacctcttcagatctcttag

SEQ ID NO: 10969 - RNA, 20 nt, synthetic construct
  source 1..20: mol_type = other RNA
accctgccgtcttcctttat

SEQ ID NO: 10970 - RNA, 20 nt, synthetic construct
  source 1..20: mol_type = other RNA
tcctttatgccatgggtccc

SEQ ID NO: 10971 - RNA, 20 nt, synthetic construct
  source 1..20: mol_type = other RNA
cactgttctttcaactcatc

SEQ ID NO: 10972 - RNA, 20 nt, synthetic construct
  source 1..20: mol_type = other RNA
cggagtagctgcggccagca

SEQ ID NO: 10973 - RNA, 20 nt, synthetic construct
  source 1..20: mol_type = other RNA
accctctgctggccgcagct

SEQ ID NO: 10974 - RNA, 20 nt, synthetic construct
  source 1..20: mol_type = other RNA
ttctctcctgctctcagtct

SEQ ID NO: 10975 - RNA, 20 nt, synthetic construct
  source 1..20: mol_type = other RNA
tggagaaacaaacctactaa

SEQ ID NO: 10976 - RNA, 20 nt, synthetic construct
  source 1..20: mol_type = other RNA
ggtttagtaggtttgtttct

SEQ ID NO: 10977 - RNA, 20 nt, synthetic construct
  source 1..20: mol_type = other RNA
gtcaggtttagtaggtttgt

SEQ ID NO: 10978 - RNA, 20 nt, synthetic construct
  source 1..20: mol_type = other RNA
accctcacactctatgtact

SEQ ID NO: 10979 - RNA, 20 nt, synthetic construct
  source 1..20: mol_type = other RNA
tccaggaggatagccgttcc

SEQ ID NO: 10980 - RNA, 20 nt, synthetic construct
  source 1..20: mol_type = other RNA
ccgtatctctctcggtagga

SEQ ID NO: 10981 - RNA, 20 nt, synthetic construct
  source 1..20: mol_type = other RNA
taccgagagagatacggaga

SEQ ID NO: 10982 - RNA, 20 nt, synthetic construct
  source 1..20: mol_type = other RNA
agtctccgtatctctctcgg

SEQ ID NO: 10983 - RNA, 20 nt, synthetic construct
  source 1..20: mol_type = other RNA
gtattgtgggattgtgtatt

SEQ ID NO: 10984 - RNA, 20 nt, synthetic construct
  source 1..20: mol_type = other RNA
aaacccataccagttattcc

SEQ ID NO: 10985 - RNA, 20 nt, synthetic construct
  source 1..20: mol_type = other RNA
ttaccggtgcctttctaata

SEQ ID NO: 10986 - RNA, 20 nt, synthetic construct
  source 1..20: mol_type = other RNA
caagaggtgggacaacatgc

SEQ ID NO: 10987 - RNA, 20 nt, synthetic construct
  source 1..20: mol_type = other RNA
cacctcttgtgacgtgtatc

SEQ ID NO: 10988 - RNA, 20 nt, synthetic construct
  source 1..20: mol_type = other RNA
ggttgcagtactcccacctg

SEQ ID NO: 10989 - RNA, 20 nt, synthetic construct
  source 1..20: mol_type = other RNA
ggtgggagtactgcaacctg

SEQ ID NO: 10990 - RNA, 20 nt, synthetic construct
  source 1..20: mol_type = other RNA
gagcattgcgtcaggttgca

SEQ ID NO: 10991 - RNA, 20 nt, synthetic construct
  source 1..20: mol_type = other RNA
cttctgcgtctgagcattgc

SEQ ID NO: 10992 - RNA, 20 nt, synthetic construct
  source 1..20: mol_type = other RNA
gaggcgcgacggcagtccct

SEQ ID NO: 10993 - RNA, 20 nt, synthetic construct
  source 1..20: mol_type = other RNA
cgcctccgactgttaccccg

SEQ ID NO: 10994 - RNA, 20 nt, synthetic construct
  source 1..20: mol_type = other RNA
ggccacagactccttacctt

SEQ ID NO: 10995 - RNA, 20 nt, synthetic construct
  source 1..20: mol_type = other RNA
gtggccagacatctacacgc

SEQ ID NO: 10996 - RNA, 20 nt, synthetic construct
  source 1..20: mol_type = other RNA
ttagaatgggcacaaacctt

SEQ ID NO: 10997 - RNA, 20 nt, synthetic construct
  source 1..20: mol_type = other RNA
tagccaaaatttttattgta

SEQ ID NO: 10998 - RNA, 20 nt, synthetic construct
  source 1..20: mol_type = other RNA
ggtgtgtgattctttctgtc

SEQ ID NO: 10999 - RNA, 20 nt, synthetic construct
  source 1..20: mol_type = other RNA
cagtaagcttttctggggat

SEQ ID NO: 11000 - RNA, 20 nt, synthetic construct
  source 1..20: mol_type = other RNA
gtgcaatcttcagcattgca

SEQ ID NO: 11001 - RNA, 20 nt, synthetic construct
  source 1..20: mol_type = other RNA
tcctcgagaaacctaacagg

SEQ ID NO: 11002 - RNA, 20 nt, synthetic construct
  source 1..20: mol_type = other RNA
tgggtctatggagcagtata

SEQ ID NO: 11003 - RNA, 20 nt, synthetic construct
  source 1..20: mol_type = other RNA
atggagcagtatatgagctc

SEQ ID NO: 11004 - RNA, 20 nt, synthetic construct
  source 1..20: mol_type = other RNA
taggctttgaagggagtgat

SEQ ID NO: 11005 - RNA, 20 nt, synthetic construct
  source 1..20: mol_type = other RNA
actaacctttctctctagac

SEQ ID NO: 11006 - RNA, 20 nt, synthetic construct
  source 1..20: mol_type = other RNA
agagagaaaggttagtagac

SEQ ID NO: 11007 - RNA, 20 nt, synthetic construct
  source 1..20: mol_type = other RNA
ttgccttcagtcagatatat

SEQ ID NO: 11008 - RNA, 20 nt, synthetic construct
  source 1..20: mol_type = other RNA
gatatataggatcgttttct

SEQ ID NO: 11009 - RNA, 20 nt, synthetic construct
  source 1..20: mol_type = other RNA
agggcagaggaggggaaaga

SEQ ID NO: 11010 - RNA, 20 nt, synthetic construct
  source 1..20: mol_type = other RNA
ttcccctcctctgccctcga

SEQ ID NO: 11011 - RNA, 20 nt, synthetic construct
  source 1..20: mol_type = other RNA
gttctgttctgtttttctaa

SEQ ID NO: 11012 - RNA, 20 nt, synthetic construct
  source 1..20: mol_type = other RNA
atgagaattacgaacgttat

SEQ ID NO: 11013 - RNA, 20 nt, synthetic construct
  source 1..20: mol_type = other RNA
taaatggcttcacatatttc

SEQ ID NO: 11014 - RNA, 20 nt, synthetic construct
  source 1..20: mol_type = other RNA
gtgctgaaatgaaaacacaa

SEQ ID NO: 11015 - RNA, 20 nt, synthetic construct
  source 1..20: mol_type = other RNA
attaccgtggtagcactcct

SEQ ID NO: 11016 - RNA, 20 nt, synthetic construct
  source 1..20: mol_type = other RNA
ctggaagaacctgccaagct

SEQ ID NO: 11017 - RNA, 20 nt, synthetic construct
  source 1..20: mol_type = other RNA
tagatgaccaagcttggcag

SEQ ID NO: 11018 - RNA, 20 nt, synthetic construct
  source 1..20: mol_type = other RNA
tctatgacaccacactcgca

SEQ ID NO: 11019 - RNA, 20 nt, synthetic construct
  source 1..20: mol_type = other RNA
gactatgcgagtgtggtgtc

SEQ ID NO: 11020 - RNA, 20 nt, synthetic construct
  source 1..20: mol_type = other RNA
gaccccagaatactacccaa

SEQ ID NO: 11021 - RNA, 20 nt, synthetic construct
  source 1..20: mol_type = other RNA
ttgttctttaccataagaga

SEQ ID NO: 11022 - RNA, 20 nt, synthetic construct
  source 1..20: mol_type = other RNA
caagctgagttctccgaact

SEQ ID NO: 11023 - RNA, 20 nt, synthetic construct
  source 1..20: mol_type = other RNA
caagttgagttcggagaact

SEQ ID NO: 11024 - RNA, 20 nt, synthetic construct
  source 1..20: mol_type = other RNA
caggatgattgccttggagc

SEQ ID NO: 11025 - RNA, 20 nt, synthetic construct
  source 1..20: mol_type = other RNA
gagagaagggaaatgttaag

SEQ ID NO: 11026 - RNA, 20 nt, synthetic construct
  source 1..20: mol_type = other RNA
ttctgactttcttcataatg

SEQ ID NO: 11027 - RNA, 20 nt, synthetic construct
  source 1..20: mol_type = other RNA
tttgtcattctgactttctt

SEQ ID NO: 11028 - RNA, 20 nt, synthetic construct
  source 1..20: mol_type = other RNA
ggtcctttgtcattctgact

SEQ ID NO: 11029 - RNA, 20 nt, synthetic construct
  source 1..20: mol_type = other RNA
gaatgacaaaggaccagaca

SEQ ID NO: 11030 - RNA, 20 nt, synthetic construct
  source 1..20: mol_type = other RNA
ccattgacgtttagttggtg

SEQ ID NO: 11031 - RNA, 20 nt, synthetic construct
  source 1..20: mol_type = other RNA
atggagactttccagttgga

SEQ ID NO: 11032 - RNA, 20 nt, synthetic construct
  source 1..20: mol_type = other RNA
ataaataagcacctattctt

SEQ ID NO: 11033 - RNA, 20 nt, synthetic construct
  source 1..20: mol_type = other RNA
gaaaaacactcgttcctaag

SEQ ID NO: 11034 - RNA, 20 nt, synthetic construct
  source 1..20: mol_type = other RNA
gacccgggcttctctccatc

SEQ ID NO: 11035 - RNA, 20 nt, synthetic construct
  source 1..20: mol_type = other RNA
gaccacccaatggccaatat

SEQ ID NO: 11036 - RNA, 20 nt, synthetic construct
  source 1..20: mol_type = other RNA
cttgtggccaaaatattggc

SEQ ID NO: 11037 - RNA, 20 nt, synthetic construct
  source 1..20: mol_type = other RNA
ctggtagtcgcttgtggcca

SEQ ID NO: 11038 - RNA, 20 nt, synthetic construct
  source 1..20: mol_type = other RNA
cacatgtagaaaccattttt

SEQ ID NO: 11039 - RNA, 20 nt, synthetic construct
  source 1..20: mol_type = other RNA
tctaccatctgttgtcccac

SEQ ID NO: 11040 - RNA, 20 nt, synthetic construct
  source 1..20: mol_type = other RNA
gcttgggctccatctccttg

SEQ ID NO: 11041 - RNA, 20 nt, synthetic construct
  source 1..20: mol_type = other RNA
tcccaaactccaatccctct

SEQ ID NO: 11042 - RNA, 20 nt, synthetic construct
  source 1..20: mol_type = other RNA
gctagaaataagaactggtt

SEQ ID NO: 11043 - RNA, 20 nt, synthetic construct
  source 1..20: mol_type = other RNA
ggccaacgactggaggagac

SEQ ID NO: 11044 - RNA, 20 nt, synthetic construct
  source 1..20: mol_type = other RNA
cctccagtcgttggcctgac

SEQ ID NO: 11045 - RNA, 20 nt, synthetic construct
  source 1..20: mol_type = other RNA
tgtcaggccaacgactggag

SEQ ID NO: 11046 - RNA, 20 nt, synthetic construct
  source 1..20: mol_type = other RNA
ttggcctgacatgacgctgc

SEQ ID NO: 11047 - RNA, 20 nt, synthetic construct
  source 1..20: mol_type = other RNA
agctgggaagaactccagta

SEQ ID NO: 11048 - RNA, 20 nt, synthetic construct
  source 1..20: mol_type = other RNA
tcacggagcacattgccaat

SEQ ID NO: 11049 - RNA, 20 nt, synthetic construct
  source 1..20: mol_type = other RNA
ccactgaattggcaatgtgc

SEQ ID NO: 11050 - RNA, 20 nt, synthetic construct
  source 1..20: mol_type = other RNA
gcagctgactttattctagt

SEQ ID NO: 11051 - RNA, 20 nt, synthetic construct
  source 1..20: mol_type = other RNA
gctgcagacaaccccttgca

SEQ ID NO: 11052 - RNA, 20 nt, synthetic construct
  source 1..20: mol_type = other RNA
aagcatcaaatcggtttcca

SEQ ID NO: 11053 - RNA, 20 nt, synthetic construct
  source 1..20: mol_type = other RNA
attgcctcagctatgcggta

SEQ ID NO: 11054 - RNA, 20 nt, synthetic construct
  source 1..20: mol_type = other RNA
gattttaaatttaggactca

SEQ ID NO: 11055 - RNA, 20 nt, synthetic construct
  source 1..20: mol_type = other RNA
taaatttaaaatctgactac

SEQ ID NO: 11056 - RNA, 20 nt, synthetic construct
  source 1..20: mol_type = other RNA
cacgaaacgcttttctacat

SEQ ID NO: 11057 - RNA, 20 nt, synthetic construct
  source 1..20: mol_type = other RNA
tgggtcacacgaaacgcttt

SEQ ID NO: 11058 - RNA, 20 nt, synthetic construct
  source 1..20: mol_type = other RNA
aattttcacgcaattctaat

SEQ ID NO: 11059 - RNA, 20 nt, synthetic construct
  source 1..20: mol_type = other RNA
taattgaaaaaaattactgt

SEQ ID NO: 11060 - RNA, 20 nt, synthetic construct
  source 1..20: mol_type = other RNA
aatttgatcagccggccata

SEQ ID NO: 11061 - RNA, 20 nt, synthetic construct
  source 1..20: mol_type = other RNA
gtgtgtgttagaacttgtga

SEQ ID NO: 11062 - RNA, 20 nt, synthetic construct
  source 1..20: mol_type = other RNA
gtgaggctcgcttaatttta

SEQ ID NO: 11063 - RNA, 20 nt, synthetic construct
  source 1..20: mol_type = other RNA
cagtaaagagcaagggagtt

SEQ ID NO: 11064 - RNA, 20 nt, synthetic construct
  source 1..20: mol_type = other RNA
cgagaaactggaggaaaaag

SEQ ID NO: 11065 - RNA, 20 nt, synthetic construct
  source 1..20: mol_type = other RNA
tcctacaagtacactgatac

SEQ ID NO: 11066 - RNA, 20 nt, synthetic construct
  source 1..20: mol_type = other RNA
gataaatgcatattgtgcac

SEQ ID NO: 11067 - RNA, 20 nt, synthetic construct
  source 1..20: mol_type = other RNA
gaattggaaatcagcaggct

SEQ ID NO: 11068 - RNA, 20 nt, synthetic construct
  source 1..20: mol_type = other RNA
cctctcttgttacataagcc

SEQ ID NO: 11069 - RNA, 20 nt, synthetic construct
  source 1..20: mol_type = other RNA
actctcatttacaaagatat

SEQ ID NO: 11070 - RNA, 20 nt, synthetic construct
  source 1..20: mol_type = other RNA
tattaataaaagggtactgt

SEQ ID NO: 11071 - RNA, 20 nt, synthetic construct
  source 1..20: mol_type = other RNA
atgcattcaaaagagggaag

SEQ ID NO: 11072 - RNA, 20 nt, synthetic construct
  source 1..20: mol_type = other RNA
ttcaagagctcaggctctta

SEQ ID NO: 11073 - RNA, 20 nt, synthetic construct
  source 1..20: mol_type = other RNA
caaccccagaccctccattc

SEQ ID NO: 11074 - RNA, 20 nt, synthetic construct
  source 1..20: mol_type = other RNA
ggggttgagactaggccaca

SEQ ID NO: 11075 - RNA, 20 nt, synthetic construct
  source 1..20: mol_type = other RNA
ctctagagactctagacttg

SEQ ID NO: 11076 - RNA, 20 nt, synthetic construct
  source 1..20: mol_type = other RNA
agagtctctagagagacagt

SEQ ID NO: 11077 - RNA, 20 nt, synthetic construct
  source 1..20: mol_type = other RNA
ctagagagacagtgttggaa

SEQ ID NO: 11078 - RNA, 20 nt, synthetic construct
  source 1..20: mol_type = other RNA
tgaatgtgaggatactggga

SEQ ID NO: 11079 - RNA, 20 nt, synthetic construct
  source 1..20: mol_type = other RNA
gacagctacggagcagcaga

SEQ ID NO: 11080 - RNA, 20 nt, synthetic construct
  source 1..20: mol_type = other RNA
gacctcttcagatctcttag

SEQ ID NO: 11081 - RNA, 20 nt, synthetic construct
  source 1..20: mol_type = other RNA
accctgccgtcttcctttat

SEQ ID NO: 11082 - RNA, 20 nt, synthetic construct
  source 1..20: mol_type = other RNA
tcctttatgccatgggtccc

SEQ ID NO: 11083 - RNA, 20 nt, synthetic construct
  source 1..20: mol_type = other RNA
cattgttctttcaactcatc

SEQ ID NO: 11084 - RNA, 20 nt, synthetic construct
  source 1..20: mol_type = other RNA
cggagtagctgcggccagca

SEQ ID NO: 11085 - RNA, 20 nt, synthetic construct
  source 1..20: mol_type = other RNA
accctctgctggccgcagct

SEQ ID NO: 11086 - RNA, 20 nt, synthetic construct
  source 1..20: mol_type = other RNA
ttctctcctgctctcagtct

SEQ ID NO: 11087 - RNA, 20 nt, synthetic construct
  source 1..20: mol_type = other RNA
tggagaaacaaacctactaa

SEQ ID NO: 11088 - RNA, 20 nt, synthetic construct
  source 1..20: mol_type = other RNA
ggtttagtaggtttgtttct

SEQ ID NO: 11089 - RNA, 20 nt, synthetic construct
  source 1..20: mol_type = other RNA
gtcaggtttagtaggtttgt

SEQ ID NO: 11090 - RNA, 20 nt, synthetic construct
  source 1..20: mol_type = other RNA
accctcacactctatgtact

SEQ ID NO: 11091 - RNA, 20 nt, synthetic construct
  source 1..20: mol_type = other RNA
tccaggaggatagccgttcc

SEQ ID NO: 11092 - RNA, 20 nt, synthetic construct
  source 1..20: mol_type = other RNA
ccgtatctctctcggtagga

SEQ ID NO: 11093 - RNA, 20 nt, synthetic construct
  source 1..20: mol_type = other RNA
taccgagagagatacggaga

SEQ ID NO: 11094 - RNA, 20 nt, synthetic construct
  source 1..20: mol_type = other RNA
agtctccgtatctctctcgg

SEQ ID NO: 11095 - RNA, 20 nt, synthetic construct
  source 1..20: mol_type = other RNA
gtattgtgggattgtgtatt

SEQ ID NO: 11096 - RNA, 20 nt, synthetic construct
  source 1..20: mol_type = other RNA
aaacccataccagttattcc

SEQ ID NO: 11097 - RNA, 20 nt, synthetic construct
  source 1..20: mol_type = other RNA
ttaccggtgcctttctaata

SEQ ID NO: 11098 - RNA, 20 nt, synthetic construct
  source 1..20: mol_type = other RNA
caagaggtgggacaacatgc

SEQ ID NO: 11099 - RNA, 20 nt, synthetic construct
  source 1..20: mol_type = other RNA
cacctcttgtgacgtgtatc

SEQ ID NO: 11100 - RNA, 20 nt, synthetic construct
  source 1..20: mol_type = other RNA
ggttgcagtactcccacctg

SEQ ID NO: 11101 - RNA, 20 nt, synthetic construct
  source 1..20: mol_type = other RNA
ggtgggagtactgcaacctg

SEQ ID NO: 11102 - RNA, 20 nt, synthetic construct
  source 1..20: mol_type = other RNA
gagcattgcgtcaggttgca

SEQ ID NO: 11103 - RNA, 20 nt, synthetic construct
  source 1..20: mol_type = other RNA
cttctgcgtctgagcattgc

SEQ ID NO: 11104 - RNA, 20 nt, synthetic construct
  source 1..20: mol_type = other RNA
gaggcgcgacggcagtccct

SEQ ID NO: 11105 - RNA, 20 nt, synthetic construct
  source 1..20: mol_type = other RNA
cgcctccgactgttaccccg

SEQ ID NO: 11106 - RNA, 20 nt, synthetic construct
  source 1..20: mol_type = other RNA
ggccacagactccttacctt

SEQ ID NO: 11107 - RNA, 20 nt, synthetic construct
  source 1..20: mol_type = other RNA
gtggccagacatctacacgc

SEQ ID NO: 11108 - RNA, 20 nt, synthetic construct
  source 1..20: mol_type = other RNA
ttaggatgggcacaaaccct

SEQ ID NO: 11109 - RNA, 20 nt, synthetic construct
  source 1..20: mol_type = other RNA
atccccctggagggtttgtg

SEQ ID NO: 11110 - RNA, 20 nt, synthetic construct
  source 1..20: mol_type = other RNA
cagccaaaatttttattgta

SEQ ID NO: 11111 - RNA, 20 nt, synthetic construct
  source 1..20: mol_type = other RNA
ggtgtgtcactctttccaag

SEQ ID NO: 11112 - RNA, 20 nt, synthetic construct
  source 1..20: mol_type = other RNA
ctctttccaagccagtaagc

SEQ ID NO: 11113 - RNA, 20 nt, synthetic construct
  source 1..20: mol_type = other RNA
ccctcgagaaacctaagagg

SEQ ID NO: 11114 - RNA, 20 nt, synthetic construct
  source 1..20: mol_type = other RNA
atggagcagtacatgagctc

SEQ ID NO: 11115 - RNA, 20 nt, synthetic construct
  source 1..20: mol_type = other RNA
tcagaaagaggtttaagaat

SEQ ID NO: 11116 - RNA, 20 nt, synthetic construct
  source 1..20: mol_type = other RNA
actactctttctctctagac

SEQ ID NO: 11117 - RNA, 20 nt, synthetic construct
  source 1..20: mol_type = other RNA
agagagaaagagtagtagac

SEQ ID NO: 11118 - RNA, 20 nt, synthetic construct
  source 1..20: mol_type = other RNA
ttgtcttcagtcagatacat

SEQ ID NO: 11119 - RNA, 20 nt, synthetic construct
  source 1..20: mol_type = other RNA
tatgtatctgactgaagaca

SEQ ID NO: 11120 - RNA, 20 nt, synthetic construct
  source 1..20: mol_type = other RNA
tcagtcagatacataggacc

SEQ ID NO: 11121 - RNA, 20 nt, synthetic construct
  source 1..20: mol_type = other RNA
gatacataggaccgttttct

SEQ ID NO: 11122 - RNA, 20 nt, synthetic construct
  source 1..20: mol_type = other RNA
agggaaacatgcaaaatttc

SEQ ID NO: 11123 - RNA, 20 nt, synthetic construct
  source 1..20: mol_type = other RNA
ggggcagagtttgggacaga

SEQ ID NO: 11124 - RNA, 20 nt, synthetic construct
  source 1..20: mol_type = other RNA
gtcccaaactctgcccccga

SEQ ID NO: 11125 - RNA, 20 nt, synthetic construct
  source 1..20: mol_type = other RNA
caaactctgcccccgacagc

SEQ ID NO: 11126 - RNA, 20 nt, synthetic construct
  source 1..20: mol_type = other RNA
ggtgaaatatttccaagaac

SEQ ID NO: 11127 - RNA, 20 nt, synthetic construct
  source 1..20: mol_type = other RNA
gttttctcacatccatctgc

SEQ ID NO: 11128 - RNA, 20 nt, synthetic construct
  source 1..20: mol_type = other RNA
atgagaattacgaccgttct

SEQ ID NO: 11129 - RNA, 20 nt, synthetic construct
  source 1..20: mol_type = other RNA
taattctcatagactccttt

SEQ ID NO: 11130 - RNA, 20 nt, synthetic construct
  source 1..20: mol_type = other RNA
caaatggcttcacatgtttc

SEQ ID NO: 11131 - RNA, 20 nt, synthetic construct
  source 1..20: mol_type = other RNA
gtgctgaaatgaaaacacgg

SEQ ID NO: 11132 - RNA, 20 nt, synthetic construct
  source 1..20: mol_type = other RNA
attaccatggtagcactcct

SEQ ID NO: 11133 - RNA, 20 nt, synthetic construct
  source 1..20: mol_type = other RNA
caggaagaacctgccaagct

SEQ ID NO: 11134 - RNA, 20 nt, synthetic construct
  source 1..20: mol_type = other RNA
tagatgaccaagcttggcag

SEQ ID NO: 11135 - RNA, 20 nt, synthetic construct
  source 1..20: mol_type = other RNA
tctatgacaccacactcgca

SEQ ID NO: 11136 - RNA, 20 nt, synthetic construct
  source 1..20: mol_type = other RNA
gactatgcgagtgtggtgtc

SEQ ID NO: 11137 - RNA, 20 nt, synthetic construct
  source 1..20: mol_type = other RNA
gaccccagaatactacccaa

SEQ ID NO: 11138 - RNA, 20 nt, synthetic construct
  source 1..20: mol_type = other RNA
ttgttctttaccataagaga

SEQ ID NO: 11139 - RNA, 20 nt, synthetic construct
  source 1..20: mol_type = other RNA
caagctgagttctccgaact

SEQ ID NO: 11140 - RNA, 20 nt, synthetic construct
  source 1..20: mol_type = other RNA
caagttgagttcggagaact

SEQ ID NO: 11141 - RNA, 20 nt, synthetic construct
  source 1..20: mol_type = other RNA
caggatgattgccttggagc

SEQ ID NO: 11142 - RNA, 20 nt, synthetic construct
  source 1..20: mol_type = other RNA
gagagaagggaaatgttaag

SEQ ID NO: 11143 - RNA, 20 nt, synthetic construct
  source 1..20: mol_type = other RNA
ttctgactttcttcataatg

SEQ ID NO: 11144 - RNA, 20 nt, synthetic construct
  source 1..20: mol_type = other RNA
tttgtcattctgactttctt

SEQ ID NO: 11145 - RNA, 20 nt, synthetic construct
  source 1..20: mol_type = other RNA
ggtcctttgtcattctgact

SEQ ID NO: 11146 - RNA, 20 nt, synthetic construct
  source 1..20: mol_type = other RNA
gaatgacaaaggaccagaca

SEQ ID NO: 11147 - RNA, 20 nt, synthetic construct
  source 1..20: mol_type = other RNA
ccattgacgtttagttggtg

SEQ ID NO: 11148 - RNA, 20 nt, synthetic construct
  source 1..20: mol_type = other RNA
atggagactttccagttgga

SEQ ID NO: 11149 - RNA, 20 nt, synthetic construct
  source 1..20: mol_type = other RNA
ataaataagcacctattctt

SEQ ID NO: 11150 - RNA, 20 nt, synthetic construct
  source 1..20: mol_type = other RNA
gaaaaacactcgttcctaag

SEQ ID NO: 11151 - RNA, 20 nt, synthetic construct
  source 1..20: mol_type = other RNA
gcacagagagggatgctgaa

SEQ ID NO: 11152 - RNA, 20 nt, synthetic construct
  source 1..20: mol_type = other RNA
gacccgggcttctctccatc

SEQ ID NO: 11153 - RNA, 20 nt, synthetic construct
  source 1..20: mol_type = other RNA
gaccacccaatggccaatat

SEQ ID NO: 11154 - RNA, 20 nt, synthetic construct
  source 1..20: mol_type = other RNA
cttgtggccaaaatattggc

SEQ ID NO: 11155 - RNA, 20 nt, synthetic construct
  source 1..20: mol_type = other RNA
ctggtagtcgcttgtggcca

SEQ ID NO: 11156 - RNA, 20 nt, synthetic construct
  source 1..20: mol_type = other RNA
cacatgtagaaaccattttt

SEQ ID NO: 11157 - RNA, 20 nt, synthetic construct
  source 1..20: mol_type = other RNA
tctaccatctgttgtcccac

SEQ ID NO: 11158 - RNA, 20 nt, synthetic construct
  source 1..20: mol_type = other RNA
gcttgggctccatctccttg

SEQ ID NO: 11159 - RNA, 20 nt, synthetic construct
  source 1..20: mol_type = other RNA
tcccaaactccaatccctct

SEQ ID NO: 11160 - RNA, 20 nt, synthetic construct
  source 1..20: mol_type = other RNA
gctagaaataagaactggtt

SEQ ID NO: 11161 - RNA, 20 nt, synthetic construct
  source 1..20: mol_type = other RNA
ggccaacgactggaggagac

SEQ ID NO: 11162 - RNA, 20 nt, synthetic construct
  source 1..20: mol_type = other RNA
cctccagtcgttggcctgac

SEQ ID NO: 11163 - RNA, 20 nt, synthetic construct
  source 1..20: mol_type = other RNA
tgtcaggccaacgactggag

SEQ ID NO: 11164 - RNA, 20 nt, synthetic construct
  source 1..20: mol_type = other RNA
ttggcctgacatgacgctgc

SEQ ID NO: 11165 - RNA, 20 nt, synthetic construct
  source 1..20: mol_type = other RNA
agctgggaagaactccagta

SEQ ID NO: 11166 - RNA, 20 nt, synthetic construct
  source 1..20: mol_type = other RNA
tcacggagcacattgccaat

SEQ ID NO: 11167 - RNA, 20 nt, synthetic construct
  source 1..20: mol_type = other RNA
ccactgaattggcaatgtgc

SEQ ID NO: 11168 - RNA, 20 nt, synthetic construct
  source 1..20: mol_type = other RNA
gcagctgactttattctagt

SEQ ID NO: 11169 - RNA, 20 nt, synthetic construct
  source 1..20: mol_type = other RNA
gctgcagacaaccccttgca

SEQ ID NO: 11170 - RNA, 20 nt, synthetic construct
  source 1..20: mol_type = other RNA
aagcatcaaatcggtttcca

SEQ ID NO: 11171 - RNA, 20 nt, synthetic construct
  source 1..20: mol_type = other RNA
attgcctcagctatgcggta

SEQ ID NO: 11172 - RNA, 20 nt, synthetic construct
  source 1..20: mol_type = other RNA
gattttaaatttaggactca

SEQ ID NO: 11173 - RNA, 20 nt, synthetic construct
  source 1..20: mol_type = other RNA
taaatttaaaatctgactac

SEQ ID NO: 11174 - RNA, 20 nt, synthetic construct
  source 1..20: mol_type = other RNA
cacgaaacgcttttctacat

SEQ ID NO: 11175 - RNA, 20 nt, synthetic construct
  source 1..20: mol_type = other RNA
tgggtcacacgaaacgcttt

SEQ ID NO: 11176 - RNA, 20 nt, synthetic construct
  source 1..20: mol_type = other RNA
taattgaaaaaaattactgt

SEQ ID NO: 11177 - RNA, 20 nt, synthetic construct
  source 1..20: mol_type = other RNA
aaattgatcagccggccata

SEQ ID NO: 11178 - RNA, 20 nt, synthetic construct
  source 1..20: mol_type = other RNA
gtgtgtgttagaacttgtga

SEQ ID NO: 11179 - RNA, 20 nt, synthetic construct
  source 1..20: mol_type = other RNA
gtgaggctcgcttaatttta

SEQ ID NO: 11180 - RNA, 20 nt, synthetic construct
  source 1..20: mol_type = other RNA
cagtaaagagcaagggagtt

SEQ ID NO: 11181 - RNA, 20 nt, synthetic construct
  source 1..20: mol_type = other RNA
cgagaaactggaggaaaaag

SEQ ID NO: 11182 - RNA, 20 nt, synthetic construct
  source 1..20: mol_type = other RNA
tcctacaagtacactgatac

SEQ ID NO: 11183 - RNA, 20 nt, synthetic construct
  source 1..20: mol_type = other RNA
gataaatgcatattgtgcac

SEQ ID NO: 11184 - RNA, 20 nt, synthetic construct
  source 1..20: mol_type = other RNA
cctctcttgttacataagcc

SEQ ID NO: 11185 - RNA, 20 nt, synthetic construct
  source 1..20: mol_type = other RNA
actctcatttacaaagatat

SEQ ID NO: 11186 - RNA, 20 nt, synthetic construct
  source 1..20: mol_type = other RNA
tattaataaaagggtactgt

SEQ ID NO: 11187 - RNA, 20 nt, synthetic construct
  source 1..20: mol_type = other RNA
atgcattcaaaagagggaag

SEQ ID NO: 11188 - RNA, 20 nt, synthetic construct
  source 1..20: mol_type = other RNA
ttcaagagctcaggctctta

SEQ ID NO: 11189 - RNA, 20 nt, synthetic construct
  source 1..20: mol_type = other RNA
caaccccagaccctccattc

SEQ ID NO: 11190 - RNA, 20 nt, synthetic construct
  source 1..20: mol_type = other RNA
ggggttgagactaggccaca

SEQ ID NO: 11191 - RNA, 20 nt, synthetic construct
  source 1..20: mol_type = other RNA
ctctagagactctagacttg

SEQ ID NO: 11192 - RNA, 20 nt, synthetic construct
  source 1..20: mol_type = other RNA
agagtctctagagagacagt

SEQ ID NO: 11193 - RNA, 20 nt, synthetic construct
  source 1..20: mol_type = other RNA
ctagagagacagtgttggaa

SEQ ID NO: 11194 - RNA, 20 nt, synthetic construct
  source 1..20: mol_type = other RNA
tgaatgtgaggatactggga

SEQ ID NO: 11195 - RNA, 20 nt, synthetic construct
  source 1..20: mol_type = other RNA
gacagctacggagcagcaga

SEQ ID NO: 11196 - RNA, 20 nt, synthetic construct
  source 1..20: mol_type = other RNA
gacctcttcagatctcttag

SEQ ID NO: 11197 - RNA, 20 nt, synthetic construct
  source 1..20: mol_type = other RNA
accctgccgtcttcctttat

SEQ ID NO: 11198 - RNA, 20 nt, synthetic construct
  source 1..20: mol_type = other RNA
tcctttatgccatgggtccc

SEQ ID NO: 11199 - RNA, 20 nt, synthetic construct
  source 1..20: mol_type = other RNA
cactgttctttcaactcatc

SEQ ID NO: 11200 - RNA, 20 nt, synthetic construct
  source 1..20: mol_type = other RNA
cggagtagctgcggccagca

SEQ ID NO: 11201 - RNA, 20 nt, synthetic construct
  source 1..20: mol_type = other RNA
accctctgctggccgcagct

SEQ ID NO: 11202 - RNA, 20 nt, synthetic construct
  source 1..20: mol_type = other RNA
ttctctcctgctctcagtct

SEQ ID NO: 11203 - RNA, 20 nt, synthetic construct
  source 1..20: mol_type = other RNA
tggagaaacaaacctactaa

SEQ ID NO: 11204 - RNA, 20 nt, synthetic construct
  source 1..20: mol_type = other RNA
ggtttagtaggtttgtttct

SEQ ID NO: 11205 - RNA, 20 nt, synthetic construct
  source 1..20: mol_type = other RNA
gtcaggtttagtaggtttgt

SEQ ID NO: 11206 - RNA, 20 nt, synthetic construct
  source 1..20: mol_type = other RNA
accctcacactctatgtact

SEQ ID NO: 11207 - RNA, 20 nt, synthetic construct
  source 1..20: mol_type = other RNA
tccaggaggatagccgttcc

SEQ ID NO: 11208 - RNA, 20 nt, synthetic construct
  source 1..20: mol_type = other RNA
ccgtatctctctcggtagga

SEQ ID NO: 11209 - RNA, 20 nt, synthetic construct
  source 1..20: mol_type = other RNA
taccgagagagatacggaga

SEQ ID NO: 11210 - RNA, 20 nt, synthetic construct
  source 1..20: mol_type = other RNA
agtctccgtatctctctcgg

SEQ ID NO: 11211 - RNA, 20 nt, synthetic construct
  source 1..20: mol_type = other RNA
gtattgtgggattgtgtatt

SEQ ID NO: 11212 - RNA, 20 nt, synthetic construct
  source 1..20: mol_type = other RNA
aaacccataccagttattcc

SEQ ID NO: 11213 - RNA, 20 nt, synthetic construct
  source 1..20: mol_type = other RNA
ttaccggtgcctttctaata

SEQ ID NO: 11214 - RNA, 20 nt, synthetic construct
  source 1..20: mol_type = other RNA
caagaggtgggacaacatgc

SEQ ID NO: 11215 - RNA, 20 nt, synthetic construct
  source 1..20: mol_type = other RNA
cacctcttgtgacgtgtatc

SEQ ID NO: 11216 - RNA, 20 nt, synthetic construct
  source 1..20: mol_type = other RNA
ggttgcagtactcccacctg

SEQ ID NO: 11217 - RNA, 20 nt, synthetic construct
  source 1..20: mol_type = other RNA
ggtgggagtactgcaacctg

SEQ ID NO: 11218 - RNA, 20 nt, synthetic construct
  source 1..20: mol_type = other RNA
gagcattgcgtcaggttgca

SEQ ID NO: 11219 - RNA, 20 nt, synthetic construct
  source 1..20: mol_type = other RNA
cttctgcgtctgagcattgc

SEQ ID NO: 11220 - RNA, 20 nt, synthetic construct
  source 1..20: mol_type = other RNA
gaggcgcgacggcagtccct

SEQ ID NO: 11221 - RNA, 20 nt, synthetic construct
  source 1..20: mol_type = other RNA
cgcctccgactgttaccccg

SEQ ID NO: 11222 - RNA, 20 nt, synthetic construct
  source 1..20: mol_type = other RNA
ggccacagactccttacctt

SEQ ID NO: 11223 - RNA, 20 nt, synthetic construct
  source 1..20: mol_type = other RNA
gtggccagacatctacacgc

SEQ ID NO: 11224 - RNA, 20 nt, synthetic construct
  source 1..20: mol_type = other RNA
ttaggatgggcacaaaccct

SEQ ID NO: 11225 - RNA, 20 nt, synthetic construct
  source 1..20: mol_type = other RNA
atccccctggagggtttgtg

SEQ ID NO: 11226 - RNA, 20 nt, synthetic construct
  source 1..20: mol_type = other RNA
cagccaaaatttttattgta

SEQ ID NO: 11227 - RNA, 20 nt, synthetic construct
  source 1..20: mol_type = other RNA
ggtgtgtcactctttccaag

SEQ ID NO: 11228 - RNA, 20 nt, synthetic construct
  source 1..20: mol_type = other RNA
ctctttccaagccagtaagc

SEQ ID NO: 11229 - RNA, 20 nt, synthetic construct
  source 1..20: mol_type = other RNA
ccctcgagaaacctaagagg

SEQ ID NO: 11230 - RNA, 20 nt, synthetic construct
  source 1..20: mol_type = other RNA
atggagcagtacatgagctc

SEQ ID NO: 11231 - RNA, 20 nt, synthetic construct
  source 1..20: mol_type = other RNA
tcagaaagaggtttaagaat

SEQ ID NO: 11232 - RNA, 20 nt, synthetic construct
  source 1..20: mol_type = other RNA
actactctttctctctagac

SEQ ID NO: 11233 - RNA, 20 nt, synthetic construct
  source 1..20: mol_type = other RNA
agagagaaagagtagtagac

SEQ ID NO: 11234 - RNA, 20 nt, synthetic construct
  source 1..20: mol_type = other RNA
ttgtcttcagtcagatacat

SEQ ID NO: 11235 - RNA, 20 nt, synthetic construct
  source 1..20: mol_type = other RNA
tatgtatctgactgaagaca

SEQ ID NO: 11236 - RNA, 20 nt, synthetic construct
  source 1..20: mol_type = other RNA
tcagtcagatacataggacc

SEQ ID NO: 11237 - RNA, 20 nt, synthetic construct
  source 1..20: mol_type = other RNA
gatacataggaccgttttct

SEQ ID NO: 11238 - RNA, 20 nt, synthetic construct
  source 1..20: mol_type = other RNA
agggaaacatgcaaaatttc

SEQ ID NO: 11239 - RNA, 20 nt, synthetic construct
  source 1..20: mol_type = other RNA
ggggaagagtttgggacaga

SEQ ID NO: 11240 - RNA, 20 nt, synthetic construct
  source 1..20: mol_type = other RNA
gtcccaaactcttcccccga

SEQ ID NO: 11241 - RNA, 20 nt, synthetic construct
  source 1..20: mol_type = other RNA
caaactcttcccccgacagc

SEQ ID NO: 11242 - RNA, 20 nt, synthetic construct
  source 1..20: mol_type = other RNA
ggtgaaatatttccaagaac

SEQ ID NO: 11243 - RNA, 20 nt, synthetic construct
  source 1..20: mol_type = other RNA
gttttctcacatccatctgc

SEQ ID NO: 11244 - RNA, 20 nt, synthetic construct
  source 1..20: mol_type = other RNA
atgagaattacgaccgttct

SEQ ID NO: 11245 - RNA, 20 nt, synthetic construct
  source 1..20: mol_type = other RNA
taattctcatagactccttt

SEQ ID NO: 11246 - RNA, 20 nt, synthetic construct
  source 1..20: mol_type = other RNA
caaatggcttcacatgtttc

SEQ ID NO: 11247 - RNA, 20 nt, synthetic construct
  source 1..20: mol_type = other RNA
gtgctgaaatgaaaacacgg

SEQ ID NO: 11248 - RNA, 20 nt, synthetic construct
  source 1..20: mol_type = other RNA
attaccatggtagcactcct

SEQ ID NO: 11249 - RNA, 20 nt, synthetic construct
  source 1..20: mol_type = other RNA
caggaagaacctgccaagct

SEQ ID NO: 11250 - RNA, 20 nt, synthetic construct
  source 1..20: mol_type = other RNA
tagatgaccaagcttggcag

SEQ ID NO: 11251 - RNA, 20 nt, synthetic construct
  source 1..20: mol_type = other RNA
tctatgacaccacactcgca

SEQ ID NO: 11252 - RNA, 20 nt, synthetic construct
  source 1..20: mol_type = other RNA
gactatgcgagtgtggtgtc

SEQ ID NO: 11253 - RNA, 20 nt, synthetic construct
  source 1..20: mol_type = other RNA
gaccccagaatactacccaa

SEQ ID NO: 11254 - RNA, 20 nt, synthetic construct
  source 1..20: mol_type = other RNA
ttgttctttaccataagaga

SEQ ID NO: 11255 - RNA, 20 nt, synthetic construct
  source 1..20: mol_type = other RNA
caagctgagttctccgaact

SEQ ID NO: 11256 - RNA, 20 nt, synthetic construct
  source 1..20: mol_type = other RNA
caagttgagttcggagaact

SEQ ID NO: 11257 - RNA, 20 nt, synthetic construct
  source 1..20: mol_type = other RNA
caggatgattgccttggagc

SEQ ID NO: 11258 - RNA, 20 nt, synthetic construct
  source 1..20: mol_type = other RNA
gagagaagggaaatgttaag

SEQ ID NO: 11259 - RNA, 20 nt, synthetic construct
  source 1..20: mol_type = other RNA
ttctgactttcttcataatg

SEQ ID NO: 11260 - RNA, 20 nt, synthetic construct
  source 1..20: mol_type = other RNA
tttgtcattctgactttctt

SEQ ID NO: 11261 - RNA, 20 nt, synthetic construct
  source 1..20: mol_type = other RNA
ggtcctttgtcattctgact

SEQ ID NO: 11262 - RNA, 20 nt, synthetic construct
  source 1..20: mol_type = other RNA
gaatgacaaaggaccagaca

SEQ ID NO: 11263 - RNA, 20 nt, synthetic construct
  source 1..20: mol_type = other RNA
ccattgacgtttagttggtg

SEQ ID NO: 11264 - RNA, 20 nt, synthetic construct
  source 1..20: mol_type = other RNA
atggagactttccagttgga

SEQ ID NO: 11265 - RNA, 20 nt, synthetic construct
  source 1..20: mol_type = other RNA
ataaataagcacctattctt

SEQ ID NO: 11266 - RNA, 20 nt, synthetic construct
  source 1..20: mol_type = other RNA
gaaaaacactcgttcctaag

SEQ ID NO: 11267 - RNA, 20 nt, synthetic construct
  source 1..20: mol_type = other RNA
gcacagagagggatgctgaa

SEQ ID NO: 11268 - RNA, 20 nt, synthetic construct
  source 1..20: mol_type = other RNA
gacccgggcttctctccatc

SEQ ID NO: 11269 - RNA, 20 nt, synthetic construct
  source 1..20: mol_type = other RNA
gaccacccaatggccaatat

SEQ ID NO: 11270 - RNA, 20 nt, synthetic construct
  source 1..20: mol_type = other RNA
cttgtggccaaaatattggc

SEQ ID NO: 11271 - RNA, 20 nt, synthetic construct
  source 1..20: mol_type = other RNA
ctggtagtcgcttgtggcca

SEQ ID NO: 11272 - RNA, 20 nt, synthetic construct
  source 1..20: mol_type = other RNA
cacatgtagaaaccattttt

SEQ ID NO: 11273 - RNA, 20 nt, synthetic construct
  source 1..20: mol_type = other RNA
tctaccatctgttgtcccac

SEQ ID NO: 11274 - RNA, 20 nt, synthetic construct
  source 1..20: mol_type = other RNA
gcttgggctccatctccttg

SEQ ID NO: 11275 - RNA, 20 nt, synthetic construct
  source 1..20: mol_type = other RNA
tcccaaactccaatccctct

SEQ ID NO: 11276 - RNA, 20 nt, synthetic construct
  source 1..20: mol_type = other RNA
gctagaaataagaactggtt

SEQ ID NO: 11277 - RNA, 20 nt, synthetic construct
  source 1..20: mol_type = other RNA
ggccaacgactggaggagac

SEQ ID NO: 11278 - RNA, 20 nt, synthetic construct
  source 1..20: mol_type = other RNA
cctccagtcgttggcctgac

SEQ ID NO: 11279 - RNA, 20 nt, synthetic construct
  source 1..20: mol_type = other RNA
tgtcaggccaacgactggag

SEQ ID NO: 11280 - RNA, 20 nt, synthetic construct
  source 1..20: mol_type = other RNA
ttggcctgacatgacgctgc

SEQ ID NO: 11281 - RNA, 20 nt, synthetic construct
  source 1..20: mol_type = other RNA
agctgggaagaactccagta

SEQ ID NO: 11282 - RNA, 20 nt, synthetic construct
  source 1..20: mol_type = other RNA
tcacggagcacattgccaat

SEQ ID NO: 11283 - RNA, 20 nt, synthetic construct
  source 1..20: mol_type = other RNA
ccactgaattggcaatgtgc

SEQ ID NO: 11284 - RNA, 20 nt, synthetic construct
  source 1..20: mol_type = other RNA
gcagctgactttattctagt

SEQ ID NO: 11285 - RNA, 20 nt, synthetic construct
  source 1..20: mol_type = other RNA
gctgcagacaaccccttgca

SEQ ID NO: 11286 - RNA, 20 nt, synthetic construct
  source 1..20: mol_type = other RNA
aagcatcaaatcggtttcca

SEQ ID NO: 11287 - RNA, 20 nt, synthetic construct
  source 1..20: mol_type = other RNA
attgcctcagctatgcggta

SEQ ID NO: 11288 - RNA, 20 nt, synthetic construct
  source 1..20: mol_type = other RNA
gattttaaatttaggactca

SEQ ID NO: 11289 - RNA, 20 nt, synthetic construct
  source 1..20: mol_type = other RNA
taaatttaaaatctgactac

SEQ ID NO: 11290 - RNA, 20 nt, synthetic construct
  source 1..20: mol_type = other RNA
cacgaaacgcttttctacat

SEQ ID NO: 11291 - RNA, 20 nt, synthetic construct
  source 1..20: mol_type = other RNA
tgggtcacacgaaacgcttt

SEQ ID NO: 11292 - RNA, 20 nt, synthetic construct
  source 1..20: mol_type = other RNA
aattttcacgcaattctaat

SEQ ID NO: 11293 - RNA, 20 nt, synthetic construct
  source 1..20: mol_type = other RNA
taattgaaaaaaattactgt

SEQ ID NO: 11294 - RNA, 20 nt, synthetic construct
  source 1..20: mol_type = other RNA
aaattgatcagccggccata

SEQ ID NO: 11295 - RNA, 20 nt, synthetic construct
  source 1..20: mol_type = other RNA
gtgtgtgttagaacttgtga

SEQ ID NO: 11296 - RNA, 20 nt, synthetic construct
  source 1..20: mol_type = other RNA
gtgaggctcgcttaatttta

SEQ ID NO: 11297 - RNA, 20 nt, synthetic construct
  source 1..20: mol_type = other RNA
cagtaaagagcaagggagtt

SEQ ID NO: 11298 - RNA, 20 nt, synthetic construct
  source 1..20: mol_type = other RNA
cgagaaactggaggaaaaag

SEQ ID NO: 11299 - RNA, 20 nt, synthetic construct
  source 1..20: mol_type = other RNA
tcctacaagtacactgatac

SEQ ID NO: 11300 - RNA, 20 nt, synthetic construct
  source 1..20: mol_type = other RNA
tccatgtcggataaatgcat

SEQ ID NO: 11301 - RNA, 20 nt, synthetic construct
  source 1..20: mol_type = other RNA
gataaatgcatattgtgcac

SEQ ID NO: 11302 - RNA, 20 nt, synthetic construct
  source 1..20: mol_type = other RNA
cctctcttgttacataagcc

SEQ ID NO: 11303 - RNA, 20 nt, synthetic construct
  source 1..20: mol_type = other RNA
actctcatttacaaagatat

SEQ ID NO: 11304 - RNA, 20 nt, synthetic construct
  source 1..20: mol_type = other RNA
tattaataaaagggtactgt

SEQ ID NO: 11305 - RNA, 20 nt, synthetic construct
  source 1..20: mol_type = other RNA
atgcattcaaaagagggaag

SEQ ID NO: 11306 - RNA, 20 nt, synthetic construct
  source 1..20: mol_type = other RNA
ttcaagagctcaggctctta

SEQ ID NO: 11307 - RNA, 20 nt, synthetic construct
  source 1..20: mol_type = other RNA
caaccccagaccctccattc

SEQ ID NO: 11308 - RNA, 20 nt, synthetic construct
  source 1..20: mol_type = other RNA
ggggttgagactaggccaca

SEQ ID NO: 11309 - RNA, 20 nt, synthetic construct
  source 1..20: mol_type = other RNA
ctctagagactctagacttg

SEQ ID NO: 11310 - RNA, 20 nt, synthetic construct
  source 1..20: mol_type = other RNA
agagtctctagagagacagt

SEQ ID NO: 11311 - RNA, 20 nt, synthetic construct
  source 1..20: mol_type = other RNA
ctagagagacagtgttggaa

SEQ ID NO: 11312 - RNA, 20 nt, synthetic construct
  source 1..20: mol_type = other RNA
tgaatgtgaggatactggga

SEQ ID NO: 11313 - RNA, 20 nt, synthetic construct
  source 1..20: mol_type = other RNA
gacagctacggagcagcaga

SEQ ID NO: 11314 - RNA, 20 nt, synthetic construct
  source 1..20: mol_type = other RNA
gacctcttcagatctcttag

SEQ ID NO: 11315 - RNA, 20 nt, synthetic construct
  source 1..20: mol_type = other RNA
accctgccgtcttcctttat

SEQ ID NO: 11316 - RNA, 20 nt, synthetic construct
  source 1..20: mol_type = other RNA
tcctttatgccatgggtccc

SEQ ID NO: 11317 - RNA, 20 nt, synthetic construct
  source 1..20: mol_type = other RNA
cactgttctttcaactcatc

SEQ ID NO: 11318 - RNA, 20 nt, synthetic construct
  source 1..20: mol_type = other RNA
cggagtagctgcggccagca

SEQ ID NO: 11319 - RNA, 20 nt, synthetic construct
  source 1..20: mol_type = other RNA
accctctgctggccgcagct

SEQ ID NO: 11320 - RNA, 20 nt, synthetic construct
  source 1..20: mol_type = other RNA
ttctctcctgctctcagtct

SEQ ID NO: 11321 - RNA, 20 nt, synthetic construct
  source 1..20: mol_type = other RNA
tggagaaacaaacctactaa

SEQ ID NO: 11322 - RNA, 20 nt, synthetic construct
  source 1..20: mol_type = other RNA
ggtttagtaggtttgtttct

SEQ ID NO: 11323 - RNA, 20 nt, synthetic construct
  source 1..20: mol_type = other RNA
gtcaggtttagtaggtttgt

SEQ ID NO: 11324 - RNA, 20 nt, synthetic construct
  source 1..20: mol_type = other RNA
accctcacactctatgtact

SEQ ID NO: 11325 - RNA, 20 nt, synthetic construct
  source 1..20: mol_type = other RNA
tccaggaggatagccgttcc

SEQ ID NO: 11326 - RNA, 20 nt, synthetic construct
  source 1..20: mol_type = other RNA
ccgtatctctctcggtagga

SEQ ID NO: 11327 - RNA, 20 nt, synthetic construct
  source 1..20: mol_type = other RNA
taccgagagagatacggaga

SEQ ID NO: 11328 - RNA, 20 nt, synthetic construct
  source 1..20: mol_type = other RNA
agtctccgtatctctctcgg

SEQ ID NO: 11329 - RNA, 20 nt, synthetic construct
  source 1..20: mol_type = other RNA
gtattgtgggattgtgtatt

SEQ ID NO: 11330 - RNA, 20 nt, synthetic construct
  source 1..20: mol_type = other RNA
aaacccataccagttattcc

SEQ ID NO: 11331 - RNA, 20 nt, synthetic construct
  source 1..20: mol_type = other RNA
ttaccggtgcctttctaata

SEQ ID NO: 11332 - RNA, 20 nt, synthetic construct
  source 1..20: mol_type = other RNA
caagaggtgggacaacatgc

SEQ ID NO: 11333 - RNA, 20 nt, synthetic construct
  source 1..20: mol_type = other RNA
cacctcttgtgacgtgtatc

SEQ ID NO: 11334 - RNA, 20 nt, synthetic construct
  source 1..20: mol_type = other RNA
ggttgcagtactcccacctg

SEQ ID NO: 11335 - RNA, 20 nt, synthetic construct
  source 1..20: mol_type = other RNA
ggtgggagtactgcaacctg

SEQ ID NO: 11336 - RNA, 20 nt, synthetic construct
  source 1..20: mol_type = other RNA
gagcattgcgtcaggttgca

SEQ ID NO: 11337 - RNA, 20 nt, synthetic construct
  source 1..20: mol_type = other RNA
cttctgcgtctgagcattgc

SEQ ID NO: 11338 - RNA, 20 nt, synthetic construct
  source 1..20: mol_type = other RNA
gaggcgcgacggcagtccct

SEQ ID NO: 11339 - RNA, 20 nt, synthetic construct
  source 1..20: mol_type = other RNA
cgcctccgactgttaccccg

SEQ ID NO: 11340 - RNA, 20 nt, synthetic construct
  source 1..20: mol_type = other RNA
ggccacagactccttacctt

SEQ ID NO: 11341 - RNA, 20 nt, synthetic construct
  source 1..20: mol_type = other RNA
gtggccagacatctacacgc

SEQ ID NO: 11342 - RNA, 20 nt, synthetic construct
  source 1..20: mol_type = other RNA
ttaggatgggcacaaaccct

SEQ ID NO: 11343 - RNA, 20 nt, synthetic construct
  source 1..20: mol_type = other RNA
atccccctggagggtttgtg

SEQ ID NO: 11344 - RNA, 20 nt, synthetic construct
  source 1..20: mol_type = other RNA
cagccaaaatttttattgta

SEQ ID NO: 11345 - RNA, 20 nt, synthetic construct
  source 1..20: mol_type = other RNA
ggtgtgtcactctttccaag

SEQ ID NO: 11346 - RNA, 20 nt, synthetic construct
  source 1..20: mol_type = other RNA
ctctttccaagccagtaagc

SEQ ID NO: 11347 - RNA, 20 nt, synthetic construct
  source 1..20: mol_type = other RNA
ccctcgagaaacctaagagg

SEQ ID NO: 11348 - RNA, 20 nt, synthetic construct
  source 1..20: mol_type = other RNA
atggagcagtacatgagctc

SEQ ID NO: 11349 - RNA, 20 nt, synthetic construct
  source 1..20: mol_type = other RNA
tcagaaagaggtttaagaat

SEQ ID NO: 11350 - RNA, 20 nt, synthetic construct
  source 1..20: mol_type = other RNA
actactctttctctctagac

SEQ ID NO: 11351 - RNA, 20 nt, synthetic construct
  source 1..20: mol_type = other RNA
agagagaaagagtagtagac

SEQ ID NO: 11352 - RNA, 20 nt, synthetic construct
  source 1..20: mol_type = other RNA
ttgtcttcagtcagatacat

SEQ ID NO: 11353 - RNA, 20 nt, synthetic construct
  source 1..20: mol_type = other RNA
tatgtatctgactgaagaca

SEQ ID NO: 11354 - RNA, 20 nt, synthetic construct
  source 1..20: mol_type = other RNA
tcagtcagatacataggacc

SEQ ID NO: 11355 - RNA, 20 nt, synthetic construct
  source 1..20: mol_type = other RNA
gatacataggaccgttttct

SEQ ID NO: 11356 - RNA, 20 nt, synthetic construct
  source 1..20: mol_type = other RNA
agggaaacatgcaaaatttc

SEQ ID NO: 11357 - RNA, 20 nt, synthetic construct
  source 1..20: mol_type = other RNA
ggggcagagtttgggacaga

SEQ ID NO: 11358 - RNA, 20 nt, synthetic construct
  source 1..20: mol_type = other RNA
gtcccaaactctgcccccga

SEQ ID NO: 11359 - RNA, 20 nt, synthetic construct
  source 1..20: mol_type = other RNA
caaactctgcccccgacagc

SEQ ID NO: 11360 - RNA, 20 nt, synthetic construct
  source 1..20: mol_type = other RNA
ggtgaaatatttccaagaac

SEQ ID NO: 11361 - RNA, 20 nt, synthetic construct
  source 1..20: mol_type = other RNA
gttttctcacatccatctgc

SEQ ID NO: 11362 - RNA, 20 nt, synthetic construct
  source 1..20: mol_type = other RNA
atgagaattacgaccgttct

SEQ ID NO: 11363 - RNA, 20 nt, synthetic construct
  source 1..20: mol_type = other RNA
taattctcatagactccttt

SEQ ID NO: 11364 - RNA, 20 nt, synthetic construct
  source 1..20: mol_type = other RNA
caaatggcttcacatgtttc

SEQ ID NO: 11365 - RNA, 20 nt, synthetic construct
  source 1..20: mol_type = other RNA
gtgctgaaatgaaaacacgg

SEQ ID NO: 11366 - RNA, 20 nt, synthetic construct
  source 1..20: mol_type = other RNA
attaccatggtagcactcct

SEQ ID NO: 11367 - RNA, 20 nt, synthetic construct
  source 1..20: mol_type = other RNA
caggaagaacctgccaagct

SEQ ID NO: 11368 - RNA, 20 nt, synthetic construct
  source 1..20: mol_type = other RNA
tagatgaccaagcttggcag

SEQ ID NO: 11369 - RNA, 20 nt, synthetic construct
  source 1..20: mol_type = other RNA
tctatgacaccacactcgca

SEQ ID NO: 11370 - RNA, 20 nt, synthetic construct
  source 1..20: mol_type = other RNA
gactatgcgagtgtggtgtc

SEQ ID NO: 11371 - RNA, 20 nt, synthetic construct
  source 1..20: mol_type = other RNA
gaccccagaatactacccaa

SEQ ID NO: 11372 - RNA, 20 nt, synthetic construct
  source 1..20: mol_type = other RNA
ttgttctttaccataagaga

SEQ ID NO: 11373 - RNA, 20 nt, synthetic construct
  source 1..20: mol_type = other RNA
caagctgagttctccgaact

SEQ ID NO: 11374 - RNA, 20 nt, synthetic construct
  source 1..20: mol_type = other RNA
caagttgagttcggagaact

SEQ ID NO: 11375 - RNA, 20 nt, synthetic construct
  source 1..20: mol_type = other RNA
caggatgattgccttggagc

SEQ ID NO: 11376 - RNA, 20 nt, synthetic construct
  source 1..20: mol_type = other RNA
gagagaagggaaatgttaag

SEQ ID NO: 11377 - RNA, 20 nt, synthetic construct
  source 1..20: mol_type = other RNA
ttctgactttcttcataatg

SEQ ID NO: 11378 - RNA, 20 nt, synthetic construct
  source 1..20: mol_type = other RNA
tttgtcattctgactttctt

SEQ ID NO: 11379 - RNA, 20 nt, synthetic construct
  source 1..20: mol_type = other RNA
ggtcctttgtcattctgact

SEQ ID NO: 11380 - RNA, 20 nt, synthetic construct
  source 1..20: mol_type = other RNA
gaatgacaaaggaccagaca

SEQ ID NO: 11381 - RNA, 20 nt, synthetic construct
  source 1..20: mol_type = other RNA
ccattgacgtttagttggtg

SEQ ID NO: 11382 - RNA, 20 nt, synthetic construct
  source 1..20: mol_type = other RNA
atggagactttccagttgga

SEQ ID NO: 11383 - RNA, 20 nt, synthetic construct
  source 1..20: mol_type = other RNA
ataaataagcacctattctt

SEQ ID NO: 11384 - RNA, 20 nt, synthetic construct
  source 1..20: mol_type = other RNA
gaaaaacactcgttcctaag

SEQ ID NO: 11385 - RNA, 20 nt, synthetic construct
  source 1..20: mol_type = other RNA
gcacagagagggatgctgaa

SEQ ID NO: 11386 - RNA, 20 nt, synthetic construct
  source 1..20: mol_type = other RNA
gacccgggcttctctccatc

SEQ ID NO: 11387 - RNA, 20 nt, synthetic construct
  source 1..20: mol_type = other RNA
gaccacccaatggccaatat

SEQ ID NO: 11388 - RNA, 20 nt, synthetic construct
  source 1..20: mol_type = other RNA
cttgtggccaaaatattggc

SEQ ID NO: 11389 - RNA, 20 nt, synthetic construct
  source 1..20: mol_type = other RNA
ctggtagtcgcttgtggcca

SEQ ID NO: 11390 - RNA, 20 nt, synthetic construct
  source 1..20: mol_type = other RNA
cacatgtagaaaccattttt

SEQ ID NO: 11391 - RNA, 20 nt, synthetic construct
  source 1..20: mol_type = other RNA
tctaccatctgttgtcccac

SEQ ID NO: 11392 - RNA, 20 nt, synthetic construct
  source 1..20: mol_type = other RNA
gcttgggctccatctccttg

SEQ ID NO: 11393 - RNA, 20 nt, synthetic construct
  source 1..20: mol_type = other RNA
tcccaaactccaatccctct

SEQ ID NO: 11394 - RNA, 20 nt, synthetic construct
  source 1..20: mol_type = other RNA
gctagaaataagaactggtt

SEQ ID NO: 11395 - RNA, 20 nt, synthetic construct
  source 1..20: mol_type = other RNA
ggccaacgactggaggagac

SEQ ID NO: 11396 - RNA, 20 nt, synthetic construct
  source 1..20: mol_type = other RNA
cctccagtcgttggcctgac

SEQ ID NO: 11397 - RNA, 20 nt, synthetic construct
  source 1..20: mol_type = other RNA
tgtcaggccaacgactggag

SEQ ID NO: 11398 - RNA, 20 nt, synthetic construct
  source 1..20: mol_type = other RNA
ttggcctgacatgacgctgc

SEQ ID NO: 11399 - RNA, 20 nt, synthetic construct
  source 1..20: mol_type = other RNA
agctgggaagaactccagta

SEQ ID NO: 11400 - RNA, 20 nt, synthetic construct
  source 1..20: mol_type = other RNA
tcacggagcacattgccaat

SEQ ID NO: 11401 - RNA, 20 nt, synthetic construct
  source 1..20: mol_type = other RNA
ccactgaattggcaatgtgc

SEQ ID NO: 11402 - RNA, 20 nt, synthetic construct
  source 1..20: mol_type = other RNA
gcagctgactttattctagt

SEQ ID NO: 11403 - RNA, 20 nt, synthetic construct
  source 1..20: mol_type = other RNA
gctgcagacaaccccttgca

SEQ ID NO: 11404 - RNA, 20 nt, synthetic construct
  source 1..20: mol_type = other RNA
aagcatcaaatcggtttcca

SEQ ID NO: 11405 - RNA, 20 nt, synthetic construct
  source 1..20: mol_type = other RNA
attgcctcagctatgcggta

SEQ ID NO: 11406 - RNA, 20 nt, synthetic construct
  source 1..20: mol_type = other RNA
gattttaaatttaggactca

SEQ ID NO: 11407 - RNA, 20 nt, synthetic construct
  source 1..20: mol_type = other RNA
taaatttaaaatctgactac

SEQ ID NO: 11408 - RNA, 20 nt, synthetic construct
  source 1..20: mol_type = other RNA
cacgaaacgcttttctacat

SEQ ID NO: 11409 - RNA, 20 nt, synthetic construct
  source 1..20: mol_type = other RNA
tgggtcacacgaaacgcttt

SEQ ID NO: 11410 - RNA, 20 nt, synthetic construct
  source 1..20: mol_type = other RNA
aattttcacgcaattctaat

SEQ ID NO: 11411 - RNA, 20 nt, synthetic construct
  source 1..20: mol_type = other RNA
taattgaaaaaaattactgt

SEQ ID NO: 11412 - RNA, 20 nt, synthetic construct
  source 1..20: mol_type = other RNA
aatttgatcagccggccata

SEQ ID NO: 11413 - RNA, 20 nt, synthetic construct
  source 1..20: mol_type = other RNA
gtgtgtgttagaacttgtga

SEQ ID NO: 11414 - RNA, 20 nt, synthetic construct
  source 1..20: mol_type = other RNA
gtgaggctcgcttaatttta

SEQ ID NO: 11415 - RNA, 20 nt, synthetic construct
  source 1..20: mol_type = other RNA
cagtaaagagcaagggagtt

SEQ ID NO: 11416 - RNA, 20 nt, synthetic construct
  source 1..20: mol_type = other RNA
cgagaaactggaggaaaaag

SEQ ID NO: 11417 - RNA, 20 nt, synthetic construct
  source 1..20: mol_type = other RNA
tcctacaagtacactgatac

SEQ ID NO: 11418 - RNA, 20 nt, synthetic construct
  source 1..20: mol_type = other RNA
tccatgtcggataaatgcat

SEQ ID NO: 11419 - RNA, 20 nt, synthetic construct
  source 1..20: mol_type = other RNA
gataaatgcatattgtgcac

SEQ ID NO: 11420 - RNA, 20 nt, synthetic construct
  source 1..20: mol_type = other RNA
cctctcttgttacataagcc

SEQ ID NO: 11421 - RNA, 20 nt, synthetic construct
  source 1..20: mol_type = other RNA
actctcatttacaaagatat

SEQ ID NO: 11422 - RNA, 20 nt, synthetic construct
  source 1..20: mol_type = other RNA
tattaataaaagggtactgt

SEQ ID NO: 11423 - RNA, 20 nt, synthetic construct
  source 1..20: mol_type = other RNA
atgcattcaaaagagggaag

SEQ ID NO: 11424 - RNA, 20 nt, synthetic construct
  source 1..20: mol_type = other RNA
ttcaagagctcaggctctta

SEQ ID NO: 11425 - RNA, 20 nt, synthetic construct
  source 1..20: mol_type = other RNA
caaccccagaccctccattc

SEQ ID NO: 11426 - RNA, 20 nt, synthetic construct
  source 1..20: mol_type = other RNA
ggggttgagactaggccaca

SEQ ID NO: 11427 - RNA, 20 nt, synthetic construct
  source 1..20: mol_type = other RNA
ctctagagactctagacttg

SEQ ID NO: 11428 - RNA, 20 nt, synthetic construct
  source 1..20: mol_type = other RNA
agagtctctagagagacagt

SEQ ID NO: 11429 - RNA, 20 nt, synthetic construct
  source 1..20: mol_type = other RNA
ctagagagacagtgttggaa

SEQ ID NO: 11430 - RNA, 20 nt, synthetic construct
  source 1..20: mol_type = other RNA
tgaatgtgaggatactggga

SEQ ID NO: 11431 - RNA, 20 nt, synthetic construct
  source 1..20: mol_type = other RNA
gacagctacggagcagcaga

SEQ ID NO: 11432 - RNA, 20 nt, synthetic construct
  source 1..20: mol_type = other RNA
gacctcttcagatctcttag

SEQ ID NO: 11433 - RNA, 20 nt, synthetic construct
  source 1..20: mol_type = other RNA
accctgccgtcttcctttat

SEQ ID NO: 11434 - RNA, 20 nt, synthetic construct
  source 1..20: mol_type = other RNA
tcctttatgccatgggtccc

SEQ ID NO: 11435 - RNA, 20 nt, synthetic construct
  source 1..20: mol_type = other RNA
cactgttctttcaactcatc

SEQ ID NO: 11436 - RNA, 20 nt, synthetic construct
  source 1..20: mol_type = other RNA
cggagtagctgcggccagca

SEQ ID NO: 11437 - RNA, 20 nt, synthetic construct
  source 1..20: mol_type = other RNA
accctctgctggccgcagct

SEQ ID NO: 11438 - RNA, 20 nt, synthetic construct
  source 1..20: mol_type = other RNA
ttctctcctgctctcagtct

SEQ ID NO: 11439 - RNA, 20 nt, synthetic construct
  source 1..20: mol_type = other RNA
tggagaaacaaacctactaa

SEQ ID NO: 11440 - RNA, 20 nt, synthetic construct
  source 1..20: mol_type = other RNA
ggtttagtaggtttgtttct

SEQ ID NO: 11441 - RNA, 20 nt, synthetic construct
  source 1..20: mol_type = other RNA
gtcaggtttagtaggtttgt

SEQ ID NO: 11442 - RNA, 20 nt, synthetic construct
  source 1..20: mol_type = other RNA
accctcacactctatgtact

SEQ ID NO: 11443 - RNA, 20 nt, synthetic construct
  source 1..20: mol_type = other RNA
tccaggaggatagccgttcc

SEQ ID NO: 11444 - RNA, 20 nt, synthetic construct
  source 1..20: mol_type = other RNA
ccgtatctctctcggtagga

SEQ ID NO: 11445 - RNA, 20 nt, synthetic construct
  source 1..20: mol_type = other RNA
taccgagagagatacggaga

SEQ ID NO: 11446 - RNA, 20 nt, synthetic construct
  source 1..20: mol_type = other RNA
agtctccgtatctctctcgg

SEQ ID NO: 11447 - RNA, 20 nt, synthetic construct
  source 1..20: mol_type = other RNA
gtattgtgggattgtgtatt

SEQ ID NO: 11448 - RNA, 20 nt, synthetic construct
  source 1..20: mol_type = other RNA
aaacccataccagttattcc

SEQ ID NO: 11449 - RNA, 20 nt, synthetic construct
  source 1..20: mol_type = other RNA
ctgcacatctctcatactta

SEQ ID NO: 11450 - RNA, 20 nt, synthetic construct
  source 1..20: mol_type = other RNA
ttaccggtgcctttctaata

SEQ ID NO: 11451 - RNA, 20 nt, synthetic construct
  source 1..20: mol_type = other RNA
caagaggtgggacaacatgc

SEQ ID NO: 11452 - RNA, 20 nt, synthetic construct
  source 1..20: mol_type = other RNA
cacctcttgtgacgtgtatc

SEQ ID NO: 11453 - RNA, 20 nt, synthetic construct
  source 1..20: mol_type = other RNA
ggttgcagtactcccacctg

SEQ ID NO: 11454 - RNA, 20 nt, synthetic construct
  source 1..20: mol_type = other RNA
ggtgggagtactgcaacctg

SEQ ID NO: 11455 - RNA, 20 nt, synthetic construct
  source 1..20: mol_type = other RNA
gagcattgcgtcaggttgca

SEQ ID NO: 11456 - RNA, 20 nt, synthetic construct
  source 1..20: mol_type = other RNA
cttctgcgtctgagcattgc

SEQ ID NO: 11457 - RNA, 20 nt, synthetic construct
  source 1..20: mol_type = other RNA
gaggcgcgacggcagtccct

SEQ ID NO: 11458 - RNA, 20 nt, synthetic construct
  source 1..20: mol_type = other RNA
cgcctccgactgttaccccg

SEQ ID NO: 11459 - RNA, 20 nt, synthetic construct
  source 1..20: mol_type = other RNA
ggccacagactccttacctt

SEQ ID NO: 11460 - RNA, 20 nt, synthetic construct
  source 1..20: mol_type = other RNA
gtggccagacatctacacgc

SEQ ID NO: 11461 - RNA, 20 nt, synthetic construct
  source 1..20: mol_type = other RNA
ttaggatgggcacaaaccct

SEQ ID NO: 11462 - RNA, 20 nt, synthetic construct
  source 1..20: mol_type = other RNA
atccccctggagggtttgtg

SEQ ID NO: 11463 - RNA, 20 nt, synthetic construct
  source 1..20: mol_type = other RNA
cagccaaaatttttattgta

SEQ ID NO: 11464 - RNA, 20 nt, synthetic construct
  source 1..20: mol_type = other RNA
ggtgtgtcactctttccaag

SEQ ID NO: 11465 - RNA, 20 nt, synthetic construct
  source 1..20: mol_type = other RNA
ctctttccaagccagtaagc

SEQ ID NO: 11466 - RNA, 20 nt, synthetic construct
  source 1..20: mol_type = other RNA
tcctcgagaaacctaacagg

SEQ ID NO: 11467 - RNA, 20 nt, synthetic construct
  source 1..20: mol_type = other RNA
tgggtctatggagcagtata

SEQ ID NO: 11468 - RNA, 20 nt, synthetic construct
  source 1..20: mol_type = other RNA
atggagcagtatatgagctc

SEQ ID NO: 11469 - RNA, 20 nt, synthetic construct
  source 1..20: mol_type = other RNA
taggctttgaagggagtgat

SEQ ID NO: 11470 - RNA, 20 nt, synthetic construct
  source 1..20: mol_type = other RNA
actaacctttctctctagac

SEQ ID NO: 11471 - RNA, 20 nt, synthetic construct
  source 1..20: mol_type = other RNA
agagagaaaggttagtagac

SEQ ID NO: 11472 - RNA, 20 nt, synthetic construct
  source 1..20: mol_type = other RNA
ttgccttcagtcagatatat

SEQ ID NO: 11473 - RNA, 20 nt, synthetic construct
  source 1..20: mol_type = other RNA
gatatataggatcgttttct

SEQ ID NO: 11474 - RNA, 20 nt, synthetic construct
  source 1..20: mol_type = other RNA
agggcagaggaggggaaaga

SEQ ID NO: 11475 - RNA, 20 nt, synthetic construct
  source 1..20: mol_type = other RNA
ttcccctcctctgccctcga

SEQ ID NO: 11476 - RNA, 20 nt, synthetic construct
  source 1..20: mol_type = other RNA
gttctgttctgtttttctaa

SEQ ID NO: 11477 - RNA, 20 nt, synthetic construct
  source 1..20: mol_type = other RNA
atgagaattatgaacgttat

SEQ ID NO: 11478 - RNA, 20 nt, synthetic construct
  source 1..20: mol_type = other RNA
taaatggcttcacatatttc

SEQ ID NO: 11479 - RNA, 20 nt, synthetic construct
  source 1..20: mol_type = other RNA
gtgctgaaatgaaaacacaa

SEQ ID NO: 11480 - RNA, 20 nt, synthetic construct
  source 1..20: mol_type = other RNA
attaccgtggtagcactcct

SEQ ID NO: 11481 - RNA, 20 nt, synthetic construct
  source 1..20: mol_type = other RNA
ctggaagaacctgccaagct

SEQ ID NO: 11482 - RNA, 20 nt, synthetic construct
  source 1..20: mol_type = other RNA
tagatgaccaagcttggcag

SEQ ID NO: 11483 - RNA, 20 nt, synthetic construct
  source 1..20: mol_type = other RNA
tctatgacaccacactcgca

SEQ ID NO: 11484 - RNA, 20 nt, synthetic construct
  source 1..20: mol_type = other RNA
gactatgcgagtgtggtgtc

SEQ ID NO: 11485 - RNA, 20 nt, synthetic construct
  source 1..20: mol_type = other RNA
gaccccagaatactacccaa

SEQ ID NO: 11486 - RNA, 20 nt, synthetic construct
  source 1..20: mol_type = other RNA
ttgttctttaccataagaga

SEQ ID NO: 11487 - RNA, 20 nt, synthetic construct
  source 1..20: mol_type = other RNA
cagaaacttcagttggccct

SEQ ID NO: 11488 - RNA, 20 nt, synthetic construct
  source 1..20: mol_type = other RNA
cttgtcacagaaacttcagt

SEQ ID NO: 11489 - RNA, 20 nt, synthetic construct
  source 1..20: mol_type = other RNA
gattcagatggtgtagcaaa

SEQ ID NO: 11490 - RNA, 20 nt, synthetic construct
  source 1..20: mol_type = other RNA
caggatgatttccttggagc

SEQ ID NO: 11491 - RNA, 20 nt, synthetic construct
  source 1..20: mol_type = other RNA
gagagaagagaaatgttaag

SEQ ID NO: 11492 - RNA, 20 nt, synthetic construct
  source 1..20: mol_type = other RNA
ttctgactttcttcataagg

SEQ ID NO: 11493 - RNA, 20 nt, synthetic construct
  source 1..20: mol_type = other RNA
gaatgacgaaccaccaaaca

SEQ ID NO: 11494 - RNA, 20 nt, synthetic construct
  source 1..20: mol_type = other RNA
tcattgacgcttagtgggtg

SEQ ID NO: 11495 - RNA, 20 nt, synthetic construct
  source 1..20: mol_type = other RNA
atgaagactttccagttgga

SEQ ID NO: 11496 - RNA, 20 nt, synthetic construct
  source 1..20: mol_type = other RNA
gaataacggaattccaactg

SEQ ID NO: 11497 - RNA, 20 nt, synthetic construct
  source 1..20: mol_type = other RNA
gggctcatgaggaaagttta

SEQ ID NO: 11498 - RNA, 20 nt, synthetic construct
  source 1..20: mol_type = other RNA
ataagtaagcacataaactt

SEQ ID NO: 11499 - RNA, 20 nt, synthetic construct
  source 1..20: mol_type = other RNA
taagtaccagtggcctgaaa

SEQ ID NO: 11500 - RNA, 20 nt, synthetic construct
  source 1..20: mol_type = other RNA
gcacagagagggatgctgaa

SEQ ID NO: 11501 - RNA, 20 nt, synthetic construct
  source 1..20: mol_type = other RNA
gaccagggcttctatccatc

SEQ ID NO: 11502 - RNA, 20 nt, synthetic construct
  source 1..20: mol_type = other RNA
gaccaccccatggccaatca

SEQ ID NO: 11503 - RNA, 20 nt, synthetic construct
  source 1..20: mol_type = other RNA
ttggttgttgattatggcca

SEQ ID NO: 11504 - RNA, 20 nt, synthetic construct
  source 1..20: mol_type = other RNA
cacatgtagaaaccattttt

SEQ ID NO: 11505 - RNA, 20 nt, synthetic construct
  source 1..20: mol_type = other RNA
tctaccatctgttgtcccac

SEQ ID NO: 11506 - RNA, 20 nt, synthetic construct
  source 1..20: mol_type = other RNA
tcccaaactccaatccctct

SEQ ID NO: 11507 - RNA, 20 nt, synthetic construct
  source 1..20: mol_type = other RNA
gctacaaataagaactggtt

SEQ ID NO: 11508 - RNA, 20 nt, synthetic construct
  source 1..20: mol_type = other RNA
cctccagtagttggcctcac

SEQ ID NO: 11509 - RNA, 20 nt, synthetic construct
  source 1..20: mol_type = other RNA
tgtgaggccaactactggag

SEQ ID NO: 11510 - RNA, 20 nt, synthetic construct
  source 1..20: mol_type = other RNA
ccactgaattggcaatgtgt

SEQ ID NO: 11511 - RNA, 20 nt, synthetic construct
  source 1..20: mol_type = other RNA
gcagctgcctttattctagt

SEQ ID NO: 11512 - RNA, 20 nt, synthetic construct
  source 1..20: mol_type = other RNA
aagcatcaaatgggtttcca

SEQ ID NO: 11513 - RNA, 20 nt, synthetic construct
  source 1..20: mol_type = other RNA
attgcctcagctatgcggta

SEQ ID NO: 11514 - RNA, 20 nt, synthetic construct
  source 1..20: mol_type = other RNA
aatttttaatttaggactca

SEQ ID NO: 11515 - RNA, 20 nt, synthetic construct
  source 1..20: mol_type = other RNA
taaattaaaaatttgactac

SEQ ID NO: 11516 - RNA, 20 nt, synthetic construct
  source 1..20: mol_type = other RNA
tggatcacacgaaattcttt

SEQ ID NO: 11517 - RNA, 20 nt, synthetic construct
  source 1..20: mol_type = other RNA
tttctgagcctgtttgtatt

SEQ ID NO: 11518 - RNA, 20 nt, synthetic construct
  source 1..20: mol_type = other RNA
aattttcatgcaattctaat

SEQ ID NO: 11519 - RNA, 20 nt, synthetic construct
  source 1..20: mol_type = other RNA
tgatatgatacctgctttgt

SEQ ID NO: 11520 - RNA, 20 nt, synthetic construct
  source 1..20: mol_type = other RNA
taaatgaagaaattactgta

SEQ ID NO: 11521 - RNA, 20 nt, synthetic construct
  source 1..20: mol_type = other RNA
gcctgaaaaatttagatgtt

SEQ ID NO: 11522 - RNA, 20 nt, synthetic construct
  source 1..20: mol_type = other RNA
gttaattttatatttcccta

SEQ ID NO: 11523 - RNA, 20 nt, synthetic construct
  source 1..20: mol_type = other RNA
ctgagggtcggttaatttta

SEQ ID NO: 11524 - RNA, 20 nt, synthetic construct
  source 1..20: mol_type = other RNA
cagtaaagagcaagggagtt

SEQ ID NO: 11525 - RNA, 20 nt, synthetic construct
  source 1..20: mol_type = other RNA
tcctagagtacagtgataca

SEQ ID NO: 11526 - RNA, 20 nt, synthetic construct
  source 1..20: mol_type = other RNA
tacactttccagtttctttg

SEQ ID NO: 11527 - RNA, 20 nt, synthetic construct
  source 1..20: mol_type = other RNA
cctctgttgctacataagcc

SEQ ID NO: 11528 - RNA, 20 nt, synthetic construct
  source 1..20: mol_type = other RNA
aattttcatgcaattcttct

SEQ ID NO: 11529 - RNA, 20 nt, synthetic construct
  source 1..20: mol_type = other RNA
tatgtcaaattttcatgcaa

SEQ ID NO: 11530 - RNA, 20 nt, synthetic construct
  source 1..20: mol_type = other RNA
atactgttactttcttttga

SEQ ID NO: 11531 - RNA, 20 nt, synthetic construct
  source 1..20: mol_type = other RNA
ttaatttgatttggctagtc

SEQ ID NO: 11532 - RNA, 20 nt, synthetic construct
  source 1..20: mol_type = other RNA
taaaagaaaaaattactgga

SEQ ID NO: 11533 - RNA, 20 nt, synthetic construct
  source 1..20: mol_type = other RNA
aaattgatcaggcagccatc

SEQ ID NO: 11534 - RNA, 20 nt, synthetic construct
  source 1..20: mol_type = other RNA
gtgaggttcggttggttttc

SEQ ID NO: 11535 - RNA, 20 nt, synthetic construct
  source 1..20: mol_type = other RNA
cagaaaagagaacgggagat

SEQ ID NO: 11536 - RNA, 20 nt, synthetic construct
  source 1..20: mol_type = other RNA
tcttaccgtgaaaatgtgaa

SEQ ID NO: 11537 - RNA, 20 nt, synthetic construct
  source 1..20: mol_type = other RNA
aaaacactggaagccagata

SEQ ID NO: 11538 - RNA, 20 nt, synthetic construct
  source 1..20: mol_type = other RNA
cctctcttgttacatcagcc

SEQ ID NO: 11539 - RNA, 20 nt, synthetic construct
  source 1..20: mol_type = other RNA
agaaaatattttgcatttac

SEQ ID NO: 11540 - RNA, 20 nt, synthetic construct
  source 1..20: mol_type = other RNA
acgctcatttaaaaatatat

SEQ ID NO: 11541 - RNA, 20 nt, synthetic construct
  source 1..20: mol_type = other RNA
cgagtttgggctcttagtac

SEQ ID NO: 11542 - RNA, 20 nt, synthetic construct
  source 1..20: mol_type = other RNA
atcccagaccctccattcca

SEQ ID NO: 11543 - RNA, 20 nt, synthetic construct
  source 1..20: mol_type = other RNA
gggattgacactaggccaca

SEQ ID NO: 11544 - RNA, 20 nt, synthetic construct
  source 1..20: mol_type = other RNA
ctctagagactctatacatg

SEQ ID NO: 11545 - RNA, 20 nt, synthetic construct
  source 1..20: mol_type = other RNA
ctagagagacagtgtttcat

SEQ ID NO: 11546 - RNA, 20 nt, synthetic construct
  source 1..20: mol_type = other RNA
tgaatgtgaggatagagaga

SEQ ID NO: 11547 - RNA, 20 nt, synthetic construct
  source 1..20: mol_type = other RNA
gacagctacggaggaacact

SEQ ID NO: 11548 - RNA, 20 nt, synthetic construct
  source 1..20: mol_type = other RNA
gacctcttcagatctcttag

SEQ ID NO: 11549 - RNA, 20 nt, synthetic construct
  source 1..20: mol_type = other RNA
accctgccatcttcctttat

SEQ ID NO: 11550 - RNA, 20 nt, synthetic construct
  source 1..20: mol_type = other RNA
cactgttctttcaactcatc

SEQ ID NO: 11551 - RNA, 20 nt, synthetic construct
  source 1..20: mol_type = other RNA
accctctgctggccgcagct

SEQ ID NO: 11552 - RNA, 20 nt, synthetic construct
  source 1..20: mol_type = other RNA
tgcccaggaacccattctag

SEQ ID NO: 11553 - RNA, 20 nt, synthetic construct
  source 1..20: mol_type = other RNA
aataggtttgtttctgcaag

SEQ ID NO: 11554 - RNA, 20 nt, synthetic construct
  source 1..20: mol_type = other RNA
tgcagaaacaaacctatttg

SEQ ID NO: 11555 - RNA, 20 nt, synthetic construct
  source 1..20: mol_type = other RNA
ttcccatatcatgtgggtca

SEQ ID NO: 11556 - RNA, 20 nt, synthetic construct
  source 1..20: mol_type = other RNA
accttcactctctatgtact

SEQ ID NO: 11557 - RNA, 20 nt, synthetic construct
  source 1..20: mol_type = other RNA
taccgagagagatacggaga

SEQ ID NO: 11558 - RNA, 20 nt, synthetic construct
  source 1..20: mol_type = other RNA
gcacatttctcatacttaaa

SEQ ID NO: 11559 - RNA, 20 nt, synthetic construct
  source 1..20: mol_type = other RNA
ttaccagtgcctttctaata

SEQ ID NO: 11560 - RNA, 20 nt, synthetic construct
  source 1..20: mol_type = other RNA
caagaggtgggacaatatgc

SEQ ID NO: 11561 - RNA, 20 nt, synthetic construct
  source 1..20: mol_type = other RNA
cacctcttgtgacgtgtatc

SEQ ID NO: 11562 - RNA, 20 nt, synthetic construct
  source 1..20: mol_type = other RNA
ggttgcagtactcccacctg

SEQ ID NO: 11563 - RNA, 20 nt, synthetic construct
  source 1..20: mol_type = other RNA
ggtgggagtactgcaacctg

SEQ ID NO: 11564 - RNA, 20 nt, synthetic construct
  source 1..20: mol_type = other RNA
gagcattgtgtcaggttgca

SEQ ID NO: 11565 - RNA, 20 nt, synthetic construct
  source 1..20: mol_type = other RNA
cttctgcgtctgagcattgt

SEQ ID NO: 11566 - RNA, 20 nt, synthetic construct
  source 1..20: mol_type = other RNA
acactcgagcatccgtttac

SEQ ID NO: 11567 - RNA, 20 nt, synthetic construct
  source 1..20: mol_type = other RNA
tgtaggaggaagcctccgtg

SEQ ID NO: 11568 - RNA, 20 nt, synthetic construct
  source 1..20: mol_type = other RNA
ttagaattggcacaaaccct

SEQ ID NO: 11569 - RNA, 20 nt, synthetic construct
  source 1..20: mol_type = other RNA
atcaccctggagggtttgtg

SEQ ID NO: 11570 - RNA, 20 nt, synthetic construct
  source 1..20: mol_type = other RNA
tagccaaaatttttattgta

SEQ ID NO: 11571 - RNA, 20 nt, synthetic construct
  source 1..20: mol_type = other RNA
cacatctgacagcatgttac

SEQ ID NO: 11572 - RNA, 20 nt, synthetic construct
  source 1..20: mol_type = other RNA
gatgtgtgactctttccaag

SEQ ID NO: 11573 - RNA, 20 nt, synthetic construct
  source 1..20: mol_type = other RNA
caggaaaagcttactggctt

SEQ ID NO: 11574 - RNA, 20 nt, synthetic construct
  source 1..20: mol_type = other RNA
cccttgagaaacagggctaa

SEQ ID NO: 11575 - RNA, 20 nt, synthetic construct
  source 1..20: mol_type = other RNA
tgaaacatagatcattggga

SEQ ID NO: 11576 - RNA, 20 nt, synthetic construct
  source 1..20: mol_type = other RNA
taggtgggctctgcagccct

SEQ ID NO: 11577 - RNA, 20 nt, synthetic construct
  source 1..20: mol_type = other RNA
ctcacttaaaaacctagggc

SEQ ID NO: 11578 - RNA, 20 nt, synthetic construct
  source 1..20: mol_type = other RNA
ccgactctttctatccagac

SEQ ID NO: 11579 - RNA, 20 nt, synthetic construct
  source 1..20: mol_type = other RNA
ggatagaaagagtcggagac

SEQ ID NO: 11580 - RNA, 20 nt, synthetic construct
  source 1..20: mol_type = other RNA
gagacttctgtattattgca

SEQ ID NO: 11581 - RNA, 20 nt, synthetic construct
  source 1..20: mol_type = other RNA
tgagaggatttcatctctcc

SEQ ID NO: 11582 - RNA, 20 nt, synthetic construct
  source 1..20: mol_type = other RNA
aggactgcagacaaagacac

SEQ ID NO: 11583 - RNA, 20 nt, synthetic construct
  source 1..20: mol_type = other RNA
ttgtctgcagtcctagacga

SEQ ID NO: 11584 - RNA, 20 nt, synthetic construct
  source 1..20: mol_type = other RNA
ttcgtctaggactgcagaca

SEQ ID NO: 11585 - RNA, 20 nt, synthetic construct
  source 1..20: mol_type = other RNA
gcagtcctagacgaaggact

SEQ ID NO: 11586 - RNA, 20 nt, synthetic construct
  source 1..20: mol_type = other RNA
tagacgaaggactgttgtct

SEQ ID NO: 11587 - RNA, 20 nt, synthetic construct
  source 1..20: mol_type = other RNA
ctcccatggcccagaagctg

SEQ ID NO: 11588 - RNA, 20 nt, synthetic construct
  source 1..20: mol_type = other RNA
tcagcttctgggccatggga

SEQ ID NO: 11589 - RNA, 20 nt, synthetic construct
  source 1..20: mol_type = other RNA
gtccgtttctctgcccctaa

SEQ ID NO: 11590 - RNA, 20 nt, synthetic construct
  source 1..20: mol_type = other RNA
gtttctctgcccctaacacc

SEQ ID NO: 11591 - RNA, 20 nt, synthetic construct
  source 1..20: mol_type = other RNA
tcatgaacattcagtagaaa

SEQ ID NO: 11592 - RNA, 20 nt, synthetic construct
  source 1..20: mol_type = other RNA
tttttttctaagcttttatg

SEQ ID NO: 11593 - RNA, 20 nt, synthetic construct
  source 1..20: mol_type = other RNA
atctgcctacaaataaagaa

SEQ ID NO: 11594 - RNA, 20 nt, synthetic construct
  source 1..20: mol_type = other RNA
tattctcctgaggtcataat

SEQ ID NO: 11595 - RNA, 20 nt, synthetic construct
  source 1..20: mol_type = other RNA
ctgagaattatgacctcagg

SEQ ID NO: 11596 - RNA, 20 nt, synthetic construct
  source 1..20: mol_type = other RNA
taattctcagagactttttt

SEQ ID NO: 11597 - RNA, 20 nt, synthetic construct
  source 1..20: mol_type = other RNA
cttcttggaaacactcagtt

SEQ ID NO: 11598 - RNA, 20 nt, synthetic construct
  source 1..20: mol_type = other RNA
atttccgtggtagcactcct

SEQ ID NO: 11599 - RNA, 20 nt, synthetic construct
  source 1..20: mol_type = other RNA
caggaagaacctgccaagct

SEQ ID NO: 11600 - RNA, 20 nt, synthetic construct
  source 1..20: mol_type = other RNA
tagatgaccaagcttggcag

SEQ ID NO: 11601 - RNA, 20 nt, synthetic construct
  source 1..20: mol_type = other RNA
tctatgacaccacactcgca

SEQ ID NO: 11602 - RNA, 20 nt, synthetic construct
  source 1..20: mol_type = other RNA
gactatgcgagtgtggtgtc

SEQ ID NO: 11603 - RNA, 20 nt, synthetic construct
  source 1..20: mol_type = other RNA
gaccccagcatactacccaa

SEQ ID NO: 11604 - RNA, 20 nt, synthetic construct
  source 1..20: mol_type = other RNA
attttctttaccataagtga

SEQ ID NO: 11605 - RNA, 20 nt, synthetic construct
  source 1..20: mol_type = other RNA
gtggaaatttctgttagtag

SEQ ID NO: 11606 - RNA, 20 nt, synthetic construct
  source 1..20: mol_type = other RNA
tgaacactcagcttgaagca

SEQ ID NO: 11607 - RNA, 20 nt, synthetic construct
  source 1..20: mol_type = other RNA
tgcttcaagctgagtgttca

SEQ ID NO: 11608 - RNA, 20 nt, synthetic construct
  source 1..20: mol_type = other RNA
cagatgaacagtgcatagca

SEQ ID NO: 11609 - RNA, 20 nt, synthetic construct
  source 1..20: mol_type = other RNA
caggaacattgtctttgagc

SEQ ID NO: 11610 - RNA, 20 nt, synthetic construct
  source 1..20: mol_type = other RNA
ttgagcaaagagtctaagag

SEQ ID NO: 11611 - RNA, 20 nt, synthetic construct
  source 1..20: mol_type = other RNA
tctcttagactctttgctca

SEQ ID NO: 11612 - RNA, 20 nt, synthetic construct
  source 1..20: mol_type = other RNA
aagagaagacaaatgttaat

SEQ ID NO: 11613 - RNA, 20 nt, synthetic construct
  source 1..20: mol_type = other RNA
tcttgacttgtttcttaatg

SEQ ID NO: 11614 - RNA, 20 nt, synthetic construct
  source 1..20: mol_type = other RNA
agatgacaaatgatgaaact

SEQ ID NO: 11615 - RNA, 20 nt, synthetic construct
  source 1..20: mol_type = other RNA
attccaatatgtagaaacac

SEQ ID NO: 11616 - RNA, 20 nt, synthetic construct
  source 1..20: mol_type = other RNA
gaaccgactgtgtttctaca

SEQ ID NO: 11617 - RNA, 20 nt, synthetic construct
  source 1..20: mol_type = other RNA
gttctgaccaccagtggtct

SEQ ID NO: 11618 - RNA, 20 nt, synthetic construct
  source 1..20: mol_type = other RNA
gaagggatactggttgttag

SEQ ID NO: 11619 - RNA, 20 nt, synthetic construct
  source 1..20: mol_type = other RNA
gcaaagagagagatcctgta

SEQ ID NO: 11620 - RNA, 20 nt, synthetic construct
  source 1..20: mol_type = other RNA
atctatccacccttttactt

SEQ ID NO: 11621 - RNA, 20 nt, synthetic construct
  source 1..20: mol_type = other RNA
gacctgggcttctgtccatc

SEQ ID NO: 11622 - RNA, 20 nt, synthetic construct
  source 1..20: mol_type = other RNA
gaccagcccatggccaggct

SEQ ID NO: 11623 - RNA, 20 nt, synthetic construct
  source 1..20: mol_type = other RNA
cttatggcctaaagcctggc

SEQ ID NO: 11624 - RNA, 20 nt, synthetic construct
  source 1..20: mol_type = other RNA
ttggtgtcacttatggccta

SEQ ID NO: 11625 - RNA, 20 nt, synthetic construct
  source 1..20: mol_type = other RNA
aacatgtagaaaccattttt

SEQ ID NO: 11626 - RNA, 20 nt, synthetic construct
  source 1..20: mol_type = other RNA
gttgtccaacatgtagaaac

SEQ ID NO: 11627 - RNA, 20 nt, synthetic construct
  source 1..20: mol_type = other RNA
actactgtctgttgtccaac

SEQ ID NO: 11628 - RNA, 20 nt, synthetic construct
  source 1..20: mol_type = other RNA
ctattcttttggtccactac

SEQ ID NO: 11629 - RNA, 20 nt, synthetic construct
  source 1..20: mol_type = other RNA
atctgggctccatcaccttg

SEQ ID NO: 11630 - RNA, 20 nt, synthetic construct
  source 1..20: mol_type = other RNA
caaattccaatctctctcct

SEQ ID NO: 11631 - RNA, 20 nt, synthetic construct
  source 1..20: mol_type = other RNA
cctcgaatctttggctaaac

SEQ ID NO: 11632 - RNA, 20 nt, synthetic construct
  source 1..20: mol_type = other RNA
tgtttagccaaagattcgag

SEQ ID NO: 11633 - RNA, 20 nt, synthetic construct
  source 1..20: mol_type = other RNA
tctttattgagctcactgtt

SEQ ID NO: 11634 - RNA, 20 nt, synthetic construct
  source 1..20: mol_type = other RNA
gaactccagtatcccagaat

SEQ ID NO: 11635 - RNA, 20 nt, synthetic construct
  source 1..20: mol_type = other RNA
ctcctccagctggtcagaac

SEQ ID NO: 11636 - RNA, 20 nt, synthetic construct
  source 1..20: mol_type = other RNA
ctactgtattcccaagaggt

SEQ ID NO: 11637 - RNA, 20 nt, synthetic construct
  source 1..20: mol_type = other RNA
tactttaggagtagaattag

SEQ ID NO: 11638 - RNA, 20 nt, synthetic construct
  source 1..20: mol_type = other RNA
agagctgcctttttttctag

SEQ ID NO: 11639 - RNA, 20 nt, synthetic construct
  source 1..20: mol_type = other RNA
ccaagcattaaaatcatttc

SEQ ID NO: 11640 - RNA, 20 nt, synthetic construct
  source 1..20: mol_type = other RNA
attaactgcctgggagagga

SEQ ID NO: 11641 - RNA, 20 nt, synthetic construct
  source 1..20: mol_type = other RNA
agtggctcagctatgtggtg

SEQ ID NO: 11642 - RNA, 20 nt, synthetic construct
  source 1..20: mol_type = other RNA
agttttaaatttagaactca

SEQ ID NO: 11643 - RNA, 20 nt, synthetic construct
  source 1..20: mol_type = other RNA
tggttcatactaaaagcttc

SEQ ID NO: 11644 - RNA, 20 nt, synthetic construct
  source 1..20: mol_type = other RNA
atttgtattgactgattttt

SEQ ID NO: 11645 - RNA, 20 nt, synthetic construct
  source 1..20: mol_type = other RNA
tttctaggtctatttgtatt

SEQ ID NO: 11646 - RNA, 20 nt, synthetic construct
  source 1..20: mol_type = other RNA
atacaaatagacctagaaat

SEQ ID NO: 11647 - RNA, 20 nt, synthetic construct
  source 1..20: mol_type = other RNA
aattttttgccattctaatc

SEQ ID NO: 11648 - RNA, 20 nt, synthetic construct
  source 1..20: mol_type = other RNA
actgagttttaggttttaag

SEQ ID NO: 11649 - RNA, 20 nt, synthetic construct
  source 1..20: mol_type = other RNA
cttgatatggtatctgcttc

SEQ ID NO: 11650 - RNA, 20 nt, synthetic construct
  source 1..20: mol_type = other RNA
taaatgaaaaaattactgga

SEQ ID NO: 11651 - RNA, 20 nt, synthetic construct
  source 1..20: mol_type = other RNA
tttgtgtatgtgtagctggt

SEQ ID NO: 11652 - RNA, 20 nt, synthetic construct
  source 1..20: mol_type = other RNA
gtgaggatcagtggatttca

SEQ ID NO: 11653 - RNA, 20 nt, synthetic construct
  source 1..20: mol_type = other RNA
cagaaggagaggaaggagag

SEQ ID NO: 11654 - RNA, 20 nt, synthetic construct
  source 1..20: mol_type = other RNA
gattcattcagcttcttgaa

SEQ ID NO: 11655 - RNA, 20 nt, synthetic construct
  source 1..20: mol_type = other RNA
gaaggcaaagatataataac

SEQ ID NO: 11656 - RNA, 20 nt, synthetic construct
  source 1..20: mol_type = other RNA
tgctagaagaacagtgatac

SEQ ID NO: 11657 - RNA, 20 nt, synthetic construct
  source 1..20: mol_type = other RNA
actctcatttaaaaagatat

SEQ ID NO: 11658 - RNA, 20 nt, synthetic construct
  source 1..20: mol_type = other RNA
atatgttcaaatttttacct

SEQ ID NO: 11659 - RNA, 20 nt, synthetic construct
  source 1..20: mol_type = other RNA
aaagggatattgtaaatcct

SEQ ID NO: 11660 - RNA, 20 nt, synthetic construct
  source 1..20: mol_type = other RNA
ttcaagtactcaagctctga

SEQ ID NO: 11661 - RNA, 20 nt, synthetic construct
  source 1..20: mol_type = other RNA
caagcccagaccctccattc

SEQ ID NO: 11662 - RNA, 20 nt, synthetic construct
  source 1..20: mol_type = other RNA
gggcttgagactaggtcaca

SEQ ID NO: 11663 - RNA, 20 nt, synthetic construct
  source 1..20: mol_type = other RNA
ctctagagactctacacatg

SEQ ID NO: 11664 - RNA, 20 nt, synthetic construct
  source 1..20: mol_type = other RNA
catgtgtagagtctctagag

SEQ ID NO: 11665 - RNA, 20 nt, synthetic construct
  source 1..20: mol_type = other RNA
ctagagagacagtgttggat

SEQ ID NO: 11666 - RNA, 20 nt, synthetic construct
  source 1..20: mol_type = other RNA
cgaatgggaggattctgaga

SEQ ID NO: 11667 - RNA, 20 nt, synthetic construct
  source 1..20: mol_type = other RNA
ggcagctatggaggacctca

SEQ ID NO: 11668 - RNA, 20 nt, synthetic construct
  source 1..20: mol_type = other RNA
tccatagctgcccgacctct

SEQ ID NO: 11669 - RNA, 20 nt, synthetic construct
  source 1..20: mol_type = other RNA
gaagaggtcgggcagctatg

SEQ ID NO: 11670 - RNA, 20 nt, synthetic construct
  source 1..20: mol_type = other RNA
gcccagctgtctccctttat

SEQ ID NO: 11671 - RNA, 20 nt, synthetic construct
  source 1..20: mol_type = other RNA
ccctttatgccatgagtgcc

SEQ ID NO: 11672 - RNA, 20 nt, synthetic construct
  source 1..20: mol_type = other RNA
cggaattgctgtggccagca

SEQ ID NO: 11673 - RNA, 20 nt, synthetic construct
  source 1..20: mol_type = other RNA
atcctctgctggccacagca

SEQ ID NO: 11674 - RNA, 20 nt, synthetic construct
  source 1..20: mol_type = other RNA
ggacttcctctcctgctctc

SEQ ID NO: 11675 - RNA, 20 nt, synthetic construct
  source 1..20: mol_type = other RNA
tgaccaggaacccatcctag

SEQ ID NO: 11676 - RNA, 20 nt, synthetic construct
  source 1..20: mol_type = other RNA
agtgggtttctttctgcaag

SEQ ID NO: 11677 - RNA, 20 nt, synthetic construct
  source 1..20: mol_type = other RNA
tgcagaaagaaacccacttg

SEQ ID NO: 11678 - RNA, 20 nt, synthetic construct
  source 1..20: mol_type = other RNA
ataccgtatcaggtgggtca

SEQ ID NO: 11679 - RNA, 20 nt, synthetic construct
  source 1..20: mol_type = other RNA
gtcgataccgtatcaggtgg

SEQ ID NO: 11680 - RNA, 20 nt, synthetic construct
  source 1..20: mol_type = other RNA
cattcaatgtactcaaaatg

SEQ ID NO: 11681 - RNA, 20 nt, synthetic construct
  source 1..20: mol_type = other RNA
tacacagagagatacggaga

SEQ ID NO: 11682 - RNA, 20 nt, synthetic construct
  source 1..20: mol_type = other RNA
agctctccgtatctctctgt

SEQ ID NO: 11683 - RNA, 20 nt, synthetic construct
  source 1..20: mol_type = other RNA
aaatccataccagttattcc

SEQ ID NO: 11684 - RNA, 20 nt, synthetic construct
  source 1..20: mol_type = other RNA
ttgtggcaattgtatggtat

SEQ ID NO: 11685 - RNA, 20 nt, synthetic construct
  source 1..20: mol_type = other RNA
ttactggtgcctttgaaata

SEQ ID NO: 11686 - RNA, 20 nt, synthetic construct
  source 1..20: mol_type = other RNA
ggttgcagtactcccacctg

SEQ ID NO: 11687 - RNA, 20 nt, synthetic construct
  source 1..20: mol_type = other RNA
ggtgggagtactgcaacctg

SEQ ID NO: 11688 - RNA, 20 nt, synthetic construct
  source 1..20: mol_type = other RNA
gtgggggtatccatggcttt

SEQ ID NO: 11689 - RNA, 20 nt, synthetic construct
  source 1..20: mol_type = other RNA
gccatgtgggaggaagcctt

SEQ ID NO: 11690 - RNA, 20 nt, synthetic construct
  source 1..20: mol_type = other RNA
ttaggatgggcggaaaccat

SEQ ID NO: 11691 - RNA, 20 nt, synthetic construct
  source 1..20: mol_type = other RNA
agcacccagaatggtttccg

SEQ ID NO: 11692 - RNA, 20 nt, synthetic construct
  source 1..20: mol_type = other RNA
aggacaatgagatagcccct

SEQ ID NO: 11693 - RNA, 20 nt, synthetic construct
  source 1..20: mol_type = other RNA
tagacaaaattcttattgta

SEQ ID NO: 11694 - RNA, 20 nt, synthetic construct
  source 1..20: mol_type = other RNA
gatgtgtgtgtctttccaag

SEQ ID NO: 11695 - RNA, 20 nt, synthetic construct
  source 1..20: mol_type = other RNA
ttccaagccagtaaactttt

SEQ ID NO: 11696 - RNA, 20 nt, synthetic construct
  source 1..20: mol_type = other RNA
acttgaagaaatccctggaa

SEQ ID NO: 11697 - RNA, 20 nt, synthetic construct
  source 1..20: mol_type = other RNA
gtggagtagtacatgagctc

SEQ ID NO: 11698 - RNA, 20 nt, synthetic construct
  source 1..20: mol_type = other RNA
ttttcagtccgaggcaggtt

SEQ ID NO: 11699 - RNA, 20 nt, synthetic construct
  source 1..20: mol_type = other RNA
gaggcaggttgtgcagttct

SEQ ID NO: 11700 - RNA, 20 nt, synthetic construct
  source 1..20: mol_type = other RNA
actactctttttctccagac

SEQ ID NO: 11701 - RNA, 20 nt, synthetic construct
  source 1..20: mol_type = other RNA
ggagaaaaagagtagtagac

SEQ ID NO: 11702 - RNA, 20 nt, synthetic construct
  source 1..20: mol_type = other RNA
tgcagctaaaactgtaggca

SEQ ID NO: 11703 - RNA, 20 nt, synthetic construct
  source 1..20: mol_type = other RNA
gccccatcaccaggagttta

SEQ ID NO: 11704 - RNA, 20 nt, synthetic construct
  source 1..20: mol_type = other RNA
ctagatgattgctcaaaaaa

SEQ ID NO: 11705 - RNA, 20 nt, synthetic construct
  source 1..20: mol_type = other RNA
ttgcctcctccccaaaaaac

SEQ ID NO: 11706 - RNA, 20 nt, synthetic construct
  source 1..20: mol_type = other RNA
ccaagcattaaaatggtttt

SEQ ID NO: 11707 - RNA, 20 nt, synthetic construct
  source 1..20: mol_type = other RNA
tcatgaacactctgtagaga

SEQ ID NO: 11708 - RNA, 20 nt, synthetic construct
  source 1..20: mol_type = other RNA
tgaacactctgtagagattc

SEQ ID NO: 11709 - RNA, 20 nt, synthetic construct
  source 1..20: mol_type = other RNA
atttgcctattaataaagaa

SEQ ID NO: 11710 - RNA, 20 nt, synthetic construct
  source 1..20: mol_type = other RNA
ctgagatttacaaccattct

SEQ ID NO: 11711 - RNA, 20 nt, synthetic construct
  source 1..20: mol_type = other RNA
taaatggcttcctgtatttt

SEQ ID NO: 11712 - RNA, 20 nt, synthetic construct
  source 1..20: mol_type = other RNA
gtgctgaaattaaaacagaa

SEQ ID NO: 11713 - RNA, 20 nt, synthetic construct
  source 1..20: mol_type = other RNA
caggaagaacttgccaagct

SEQ ID NO: 11714 - RNA, 20 nt, synthetic construct
  source 1..20: mol_type = other RNA
tagatgaccaagcttggcaa

SEQ ID NO: 11715 - RNA, 20 nt, synthetic construct
  source 1..20: mol_type = other RNA
tctatgacaccacaccagca

SEQ ID NO: 11716 - RNA, 20 nt, synthetic construct
  source 1..20: mol_type = other RNA
gaccccagaaaactacccaa

SEQ ID NO: 11717 - RNA, 20 nt, synthetic construct
  source 1..20: mol_type = other RNA
ttgttctttaccataagcga

SEQ ID NO: 11718 - RNA, 20 nt, synthetic construct
  source 1..20: mol_type = other RNA
ccttgaagcatgactcttct

SEQ ID NO: 11719 - RNA, 20 nt, synthetic construct
  source 1..20: mol_type = other RNA
tgagcagtcaccttgaagca

SEQ ID NO: 11720 - RNA, 20 nt, synthetic construct
  source 1..20: mol_type = other RNA
tgcttcaaggtgactgctca

SEQ ID NO: 11721 - RNA, 20 nt, synthetic construct
  source 1..20: mol_type = other RNA
tctctaagaacttttgctca

SEQ ID NO: 11722 - RNA, 20 nt, synthetic construct
  source 1..20: mol_type = other RNA
caaaaaaacaaagtcttctc

SEQ ID NO: 11723 - RNA, 20 nt, synthetic construct
  source 1..20: mol_type = other RNA
tgctttgttgcccaggctgg

SEQ ID NO: 11724 - RNA, 20 nt, synthetic construct
  source 1..20: mol_type = other RNA
cagctgctagagaggctgaa

SEQ ID NO: 11725 - RNA, 20 nt, synthetic construct
  source 1..20: mol_type = other RNA
ctactaaaaatacaaaaaat

SEQ ID NO: 11726 - RNA, 20 nt, synthetic construct
  source 1..20: mol_type = other RNA
ggagaccaagaccatcctgg

SEQ ID NO: 11727 - RNA, 20 nt, synthetic construct
  source 1..20: mol_type = other RNA
tggtctcctgacctcgtgat

SEQ ID NO: 11728 - RNA, 20 nt, synthetic construct
  source 1..20: mol_type = other RNA
cctgacctcgtgatccgcct

SEQ ID NO: 11729 - RNA, 20 nt, synthetic construct
  source 1..20: mol_type = other RNA
tctcagccaggcacggtggc

SEQ ID NO: 11730 - RNA, 20 nt, synthetic construct
  source 1..20: mol_type = other RNA
tcccggctgttttattaata

SEQ ID NO: 11731 - RNA, 20 nt, synthetic construct
  source 1..20: mol_type = other RNA
tttgtcatcccggctgtttt

SEQ ID NO: 11732 - RNA, 20 nt, synthetic construct
  source 1..20: mol_type = other RNA
ctgaagtgaatgttgtgttg

SEQ ID NO: 11733 - RNA, 20 nt, synthetic construct
  source 1..20: mol_type = other RNA
cagggaattgatacttgcac

SEQ ID NO: 11734 - RNA, 20 nt, synthetic construct
  source 1..20: mol_type = other RNA
tgagcaccagtggtctgaag

SEQ ID NO: 11735 - RNA, 20 nt, synthetic construct
  source 1..20: mol_type = other RNA
gaagagatacggtctgccca

SEQ ID NO: 11736 - RNA, 20 nt, synthetic construct
  source 1..20: mol_type = other RNA
gcccagaggagaagaacaaa

SEQ ID NO: 11737 - RNA, 20 nt, synthetic construct
  source 1..20: mol_type = other RNA
gcaaaggggcgatgctgaaa

SEQ ID NO: 11738 - RNA, 20 nt, synthetic construct
  source 1..20: mol_type = other RNA
atctacccgccccttttact

SEQ ID NO: 11739 - RNA, 20 nt, synthetic construct
  source 1..20: mol_type = other RNA
cttatggccgaaagactggc

SEQ ID NO: 11740 - RNA, 20 nt, synthetic construct
  source 1..20: mol_type = other RNA
ttcggccataagtgactacc

SEQ ID NO: 11741 - RNA, 20 nt, synthetic construct
  source 1..20: mol_type = other RNA
ttggtagtcacttatggccg

SEQ ID NO: 11742 - RNA, 20 nt, synthetic construct
  source 1..20: mol_type = other RNA
tctagcatctgttgttcaac

SEQ ID NO: 11743 - RNA, 20 nt, synthetic construct
  source 1..20: mol_type = other RNA
ccttgaagaaagccaaggca

SEQ ID NO: 11744 - RNA, 20 nt, synthetic construct
  source 1..20: mol_type = other RNA
gcttgggctccatctccttg

SEQ ID NO: 11745 - RNA, 20 nt, synthetic construct
  source 1..20: mol_type = other RNA
aatcactctcctctgttcag

SEQ ID NO: 11746 - RNA, 20 nt, synthetic construct
  source 1..20: mol_type = other RNA
attcttactcttagcatggc

SEQ ID NO: 11747 - RNA, 20 nt, synthetic construct
  source 1..20: mol_type = other RNA
cctcaagtgttagtctaaac

SEQ ID NO: 11748 - RNA, 20 nt, synthetic construct
  source 1..20: mol_type = other RNA
aaacataaagcagcacttgc

SEQ ID NO: 11749 - RNA, 20 nt, synthetic construct
  source 1..20: mol_type = other RNA
cctttattaagctcactgtt

SEQ ID NO: 11750 - RNA, 20 nt, synthetic construct
  source 1..20: mol_type = other RNA
aaactccaatattccagagc

SEQ ID NO: 11751 - RNA, 20 nt, synthetic construct
  source 1..20: mol_type = other RNA
cttctctctagctggtcaaa

SEQ ID NO: 11752 - RNA, 20 nt, synthetic construct
  source 1..20: mol_type = other RNA
ctactgaatgcccaagattt

SEQ ID NO: 11753 - RNA, 20 nt, synthetic construct
  source 1..20: mol_type = other RNA
gacttttctgaggtctctac

SEQ ID NO: 11754 - RNA, 20 nt, synthetic construct
  source 1..20: mol_type = other RNA
actcataaagtctgactttt

SEQ ID NO: 11755 - RNA, 20 nt, synthetic construct
  source 1..20: mol_type = other RNA
gactttatgagtagactttg

SEQ ID NO: 11756 - RNA, 20 nt, synthetic construct
  source 1..20: mol_type = other RNA
tagtcaattaactgccttct

SEQ ID NO: 11757 - RNA, 20 nt, synthetic construct
  source 1..20: mol_type = other RNA
attaactgccttctagaaga

SEQ ID NO: 11758 - RNA, 20 nt, synthetic construct
  source 1..20: mol_type = other RNA
taaatttataactttactac

SEQ ID NO: 11759 - RNA, 20 nt, synthetic construct
  source 1..20: mol_type = other RNA
ataaaaatagaaccaggaat

SEQ ID NO: 11760 - RNA, 20 nt, synthetic construct
  source 1..20: mol_type = other RNA
aattctcatgccatttaaat

SEQ ID NO: 11761 - RNA, 20 nt, synthetic construct
  source 1..20: mol_type = other RNA
tttaatttgatttgactctt

SEQ ID NO: 11762 - RNA, 20 nt, synthetic construct
  source 1..20: mol_type = other RNA
aatcaaattaaaggactatt

SEQ ID NO: 11763 - RNA, 20 nt, synthetic construct
  source 1..20: mol_type = other RNA
cccaatcaggttagttgttt

SEQ ID NO: 11764 - RNA, 20 nt, synthetic construct
  source 1..20: mol_type = other RNA
gtttttcaatcatacatcac

SEQ ID NO: 11765 - RNA, 20 nt, synthetic construct
  source 1..20: mol_type = other RNA
aattttctgcatatttgttc

SEQ ID NO: 11766 - RNA, 20 nt, synthetic construct
  source 1..20: mol_type = other RNA
acgtttttattgagaacaaa

SEQ ID NO: 11767 - RNA, 20 nt, synthetic construct
  source 1..20: mol_type = other RNA
acctatttaacattataccg

SEQ ID NO: 11768 - RNA, 20 nt, synthetic construct
  source 1..20: mol_type = other RNA
tgtgtagagtacacctcagt

SEQ ID NO: 11769 - RNA, 20 nt, synthetic construct
  source 1..20: mol_type = other RNA
ccatagatttaaaagaatta

SEQ ID NO: 11770 - RNA, 20 nt, synthetic construct
  source 1..20: mol_type = other RNA
tacagagtgtgtcactttat

SEQ ID NO: 11771 - RNA, 20 nt, synthetic construct
  source 1..20: mol_type = other RNA
ctttattctcccagaataaa

SEQ ID NO: 11772 - RNA, 20 nt, synthetic construct
  source 1..20: mol_type = other RNA
tacggtgcatttcaaaatac

SEQ ID NO: 11773 - RNA, 20 nt, synthetic construct
  source 1..20: mol_type = other RNA
caaagagtattttgaaatgc

SEQ ID NO: 11774 - RNA, 20 nt, synthetic construct
  source 1..20: mol_type = other RNA
ttaggcttttacataatttt

SEQ ID NO: 11775 - RNA, 20 nt, synthetic construct
  source 1..20: mol_type = other RNA
tcaggtttctctagactaca

SEQ ID NO: 11776 - RNA, 20 nt, synthetic construct
  source 1..20: mol_type = other RNA
agagaaacctgaggaccttt

SEQ ID NO: 11777 - RNA, 20 nt, synthetic construct
  source 1..20: mol_type = other RNA
ctgaaggtactcaaaggtcc

SEQ ID NO: 11778 - RNA, 20 nt, synthetic construct
  source 1..20: mol_type = other RNA
tttaacctcatggactgtct

SEQ ID NO: 11779 - RNA, 20 nt, synthetic construct
  source 1..20: mol_type = other RNA
atgaggttaaaggactttgc

SEQ ID NO: 11780 - RNA, 20 nt, synthetic construct
  source 1..20: mol_type = other RNA
ctgatggctaagaaaatggg

SEQ ID NO: 11781 - RNA, 20 nt, synthetic construct
  source 1..20: mol_type = other RNA
acaattgcccattttcttag

SEQ ID NO: 11782 - RNA, 20 nt, synthetic construct
  source 1..20: mol_type = other RNA
ttgttcataggggattccaa

SEQ ID NO: 11783 - RNA, 20 nt, synthetic construct
  source 1..20: mol_type = other RNA
aagtctttgttcatagggga

SEQ ID NO: 11784 - RNA, 20 nt, synthetic construct
  source 1..20: mol_type = other RNA
tagatcaacaactgtcaaag

SEQ ID NO: 11785 - RNA, 20 nt, synthetic construct
  source 1..20: mol_type = other RNA
ctggtttggactacttcctt

SEQ ID NO: 11786 - RNA, 20 nt, synthetic construct
  source 1..20: mol_type = other RNA
aaaccagtgacattcagtga

SEQ ID NO: 11787 - RNA, 20 nt, synthetic construct
  source 1..20: mol_type = other RNA
cttttcttgttcactgaatg

SEQ ID NO: 11788 - RNA, 20 nt, synthetic construct
  source 1..20: mol_type = other RNA
tttgtttagccagactgtgt

SEQ ID NO: 11789 - RNA, 20 nt, synthetic construct
  source 1..20: mol_type = other RNA
gtcatttgtttagccagact

SEQ ID NO: 11790 - RNA, 20 nt, synthetic construct
  source 1..20: mol_type = other RNA
ggctaaacaaatgacagacc

SEQ ID NO: 11791 - RNA, 20 nt, synthetic construct
  source 1..20: mol_type = other RNA
tcctcaggaattggcccaca

SEQ ID NO: 11792 - RNA, 20 nt, synthetic construct
  source 1..20: mol_type = other RNA
ctctacaggactacactaac

SEQ ID NO: 11793 - RNA, 20 nt, synthetic construct
  source 1..20: mol_type = other RNA
tgtagagagacatacagaga

SEQ ID NO: 11794 - RNA, 20 nt, synthetic construct
  source 1..20: mol_type = other RNA
gcctctctgtatgtctctct

SEQ ID NO: 11795 - RNA, 20 nt, synthetic construct
  source 1..20: mol_type = other RNA
tgtagattgttttatgcaca

SEQ ID NO: 11796 - RNA, 20 nt, synthetic construct
  source 1..20: mol_type = other RNA
tctgtgctccataagaaaat

SEQ ID NO: 11797 - RNA, 20 nt, synthetic construct
  source 1..20: mol_type = other RNA
ttgagatgttcgcagttgtt

SEQ ID NO: 11798 - RNA, 20 nt, synthetic construct
  source 1..20: mol_type = other RNA
tcaacttctaaacaactgcg

SEQ ID NO: 11799 - RNA, 20 nt, synthetic construct
  source 1..20: mol_type = other RNA
cataatatgcacaaatggtc

SEQ ID NO: 11800 - RNA, 20 nt, synthetic construct
  source 1..20: mol_type = other RNA
ctttttacactttgttacag

SEQ ID NO: 11801 - RNA, 20 nt, synthetic construct
  source 1..20: mol_type = other RNA
ccagagatgggagaagattc

SEQ ID NO: 11802 - RNA, 20 nt, synthetic construct
  source 1..20: mol_type = other RNA
ggccactgcaaatttcaaaa

SEQ ID NO: 11803 - RNA, 20 nt, synthetic construct
  source 1..20: mol_type = other RNA
ggttgcagtactcccacctg

SEQ ID NO: 11804 - RNA, 20 nt, synthetic construct
  source 1..20: mol_type = other RNA
ggtgggagtactgcaacctg

SEQ ID NO: 11805 - RNA, 20 nt, synthetic construct
  source 1..20: mol_type = other RNA
atggccagacaaccacaccc

SEQ ID NO: 11806 - RNA, 20 nt, synthetic construct
  source 1..20: mol_type = other RNA
tagggtgtggttgtctggcc

SEQ ID NO: 11807 - RNA, 20 nt, synthetic construct
  source 1..20: mol_type = other RNA
acattctacttggaattgtg

SEQ ID NO: 11808 - RNA, 20 nt, synthetic construct
  source 1..20: mol_type = other RNA
gccactgggaaggaacactc

SEQ ID NO: 11809 - RNA, 20 nt, synthetic construct
  source 1..20: mol_type = other RNA
gcacccttcctatagatacc

SEQ ID NO: 11810 - RNA, 20 nt, synthetic construct
  source 1..20: mol_type = other RNA
agtgccctagagggtctgca

SEQ ID NO: 11811 - RNA, 20 nt, synthetic construct
  source 1..20: mol_type = other RNA
tagccagaagaatattctaa

SEQ ID NO: 11812 - RNA, 20 nt, synthetic construct
  source 1..20: mol_type = other RNA
gtgttcattgcatctttggc

SEQ ID NO: 11813 - RNA, 20 nt, synthetic construct
  source 1..20: mol_type = other RNA
gtcatccttgagaaacctaa

SEQ ID NO: 11814 - RNA, 20 nt, synthetic construct
  source 1..20: mol_type = other RNA
tattaggtttctcaaggatg

SEQ ID NO: 11815 - RNA, 20 nt, synthetic construct
  source 1..20: mol_type = other RNA
tccttgagaaacctaatatg

SEQ ID NO: 11816 - RNA, 20 nt, synthetic construct
  source 1..20: mol_type = other RNA
aggtagcagtacatagccaa

SEQ ID NO: 11817 - RNA, 20 nt, synthetic construct
  source 1..20: mol_type = other RNA
tgcacaactaggctttgatg

SEQ ID NO: 11818 - RNA, 20 nt, synthetic construct
  source 1..20: mol_type = other RNA
ctgagaagaagagtagtgga

SEQ ID NO: 11819 - RNA, 20 nt, synthetic construct
  source 1..20: mol_type = other RNA
ctcagagagggctactggcc

SEQ ID NO: 11820 - RNA, 20 nt, synthetic construct
  source 1..20: mol_type = other RNA
ttgcctacgagtcctagatg

SEQ ID NO: 11821 - RNA, 20 nt, synthetic construct
  source 1..20: mol_type = other RNA
tgcatctaggactcgtaggc

SEQ ID NO: 11822 - RNA, 20 nt, synthetic construct
  source 1..20: mol_type = other RNA
tagatgcaggaccgcttcct

SEQ ID NO: 11823 - RNA, 20 nt, synthetic construct
  source 1..20: mol_type = other RNA
cacatttccctagactgctg

SEQ ID NO: 11824 - RNA, 20 nt, synthetic construct
  source 1..20: mol_type = other RNA
agggaaatgtgtgacggttt

SEQ ID NO: 11825 - RNA, 20 nt, synthetic construct
  source 1..20: mol_type = other RNA
gtggggacagacatgaaacc

SEQ ID NO: 11826 - RNA, 20 nt, synthetic construct
  source 1..20: mol_type = other RNA
gtccccactgacagtcaatc

SEQ ID NO: 11827 - RNA, 20 nt, synthetic construct
  source 1..20: mol_type = other RNA
ccactgacagtcaatcacca

SEQ ID NO: 11828 - RNA, 20 nt, synthetic construct
  source 1..20: mol_type = other RNA
atcaccacctacaacctgca

SEQ ID NO: 11829 - RNA, 20 nt, synthetic construct
  source 1..20: mol_type = other RNA
agtttcctgccttattctca

SEQ ID NO: 11830 - RNA, 20 nt, synthetic construct
  source 1..20: mol_type = other RNA
atattaaagagcatgcacat

SEQ ID NO: 11831 - RNA, 20 nt, synthetic construct
  source 1..20: mol_type = other RNA
aaattgcactcatgtgcatg

SEQ ID NO: 11832 - RNA, 20 nt, synthetic construct
  source 1..20: mol_type = other RNA
atctgcctgctagtacagaa

SEQ ID NO: 11833 - RNA, 20 nt, synthetic construct
  source 1..20: mol_type = other RNA
ctgagaaagactaccatgct

SEQ ID NO: 11834 - RNA, 20 nt, synthetic construct
  source 1..20: mol_type = other RNA
ttctcagagacaatgatcct

SEQ ID NO: 11835 - RNA, 20 nt, synthetic construct
  source 1..20: mol_type = other RNA
cagatttcttctgatgcttc

SEQ ID NO: 11836 - RNA, 20 nt, synthetic construct
  source 1..20: mol_type = other RNA
atcaccatggtagcaatcct

SEQ ID NO: 11837 - RNA, 20 nt, synthetic construct
  source 1..20: mol_type = other RNA
aggattgctaccatggtgat

SEQ ID NO: 11838 - RNA, 20 nt, synthetic construct
  source 1..20: mol_type = other RNA
ttcctgtgacagtggtagag

SEQ ID NO: 11839 - RNA, 20 nt, synthetic construct
  source 1..20: mol_type = other RNA
caggaaggacatgtcagtct

SEQ ID NO: 11840 - RNA, 20 nt, synthetic construct
  source 1..20: mol_type = other RNA
tagaggaccaagactgacat

SEQ ID NO: 11841 - RNA, 20 nt, synthetic construct
  source 1..20: mol_type = other RNA
gtcttggtcctctatgacac

SEQ ID NO: 11842 - RNA, 20 nt, synthetic construct
  source 1..20: mol_type = other RNA
tggtcctctatgacaccaca

SEQ ID NO: 11843 - RNA, 20 nt, synthetic construct
  source 1..20: mol_type = other RNA
tctatgacaccacactggca

SEQ ID NO: 11844 - RNA, 20 nt, synthetic construct
  source 1..20: mol_type = other RNA
tctgatgccagtgtggtgtc

SEQ ID NO: 11845 - RNA, 20 nt, synthetic construct
  source 1..20: mol_type = other RNA
taagaagttagttggaagca

SEQ ID NO: 11846 - RNA, 20 nt, synthetic construct
  source 1..20: mol_type = other RNA
caggcttctttcttcaggca

SEQ ID NO: 11847 - RNA, 20 nt, synthetic construct
  source 1..20: mol_type = other RNA
gaaaggagagaaatgtcagg

SEQ ID NO: 11848 - RNA, 20 nt, synthetic construct
  source 1..20: mol_type = other RNA
ggccagctctcttttctcat

SEQ ID NO: 11849 - RNA, 20 nt, synthetic construct
  source 1..20: mol_type = other RNA
actatgagaaaagagagctg

SEQ ID NO: 11850 - RNA, 20 nt, synthetic construct
  source 1..20: mol_type = other RNA
tgagctttctattcatgaga

SEQ ID NO: 11851 - RNA, 20 nt, synthetic construct
  source 1..20: mol_type = other RNA
ttagtgggcattgtggaatg

SEQ ID NO: 11852 - RNA, 20 nt, synthetic construct
  source 1..20: mol_type = other RNA
ttctaatctccaagtcctga

SEQ ID NO: 11853 - RNA, 20 nt, synthetic construct
  source 1..20: mol_type = other RNA
tgaagtgaaggttgtattag

SEQ ID NO: 11854 - RNA, 20 nt, synthetic construct
  source 1..20: mol_type = other RNA
acatagatatcctttatttg

SEQ ID NO: 11855 - RNA, 20 nt, synthetic construct
  source 1..20: mol_type = other RNA
ggaagtataaagattctgaa

SEQ ID NO: 11856 - RNA, 20 nt, synthetic construct
  source 1..20: mol_type = other RNA
atcttcctgcatgtgtaact

SEQ ID NO: 11857 - RNA, 20 nt, synthetic construct
  source 1..20: mol_type = other RNA
gaactgggtttctgtccatc

SEQ ID NO: 11858 - RNA, 20 nt, synthetic construct
  source 1..20: mol_type = other RNA
ttcatggcagaaacgctgac

SEQ ID NO: 11859 - RNA, 20 nt, synthetic construct
  source 1..20: mol_type = other RNA
gcgtttctgccatgaaggac

SEQ ID NO: 11860 - RNA, 20 nt, synthetic construct
  source 1..20: mol_type = other RNA
aacctatgaaaacacttttc

SEQ ID NO: 11861 - RNA, 20 nt, synthetic construct
  source 1..20: mol_type = other RNA
gttgtccaacctatgaaaac

SEQ ID NO: 11862 - RNA, 20 nt, synthetic construct
  source 1..20: mol_type = other RNA
tgtctgttgtccaacctatg

SEQ ID NO: 11863 - RNA, 20 nt, synthetic construct
  source 1..20: mol_type = other RNA
caaggaaggatgccagggac

SEQ ID NO: 11864 - RNA, 20 nt, synthetic construct
  source 1..20: mol_type = other RNA
ctggcatccttccttgagac

SEQ ID NO: 11865 - RNA, 20 nt, synthetic construct
  source 1..20: mol_type = other RNA
gctgggctccatctgcttgc

SEQ ID NO: 11866 - RNA, 20 nt, synthetic construct
  source 1..20: mol_type = other RNA
ctctcctcagttaagcaaga

SEQ ID NO: 11867 - RNA, 20 nt, synthetic construct
  source 1..20: mol_type = other RNA
tgcttaactgaggagagaga

SEQ ID NO: 11868 - RNA, 20 nt, synthetic construct
  source 1..20: mol_type = other RNA
gatgcctgaggcatcacaaa

SEQ ID NO: 11869 - RNA, 20 nt, synthetic construct
  source 1..20: mol_type = other RNA
tctcaaggctttggctaaat

SEQ ID NO: 11870 - RNA, 20 nt, synthetic construct
  source 1..20: mol_type = other RNA
gaactcaaatatcccccagt

SEQ ID NO: 11871 - RNA, 20 nt, synthetic construct
  source 1..20: mol_type = other RNA
ctcctctgagtggtcagaac

SEQ ID NO: 11872 - RNA, 20 nt, synthetic construct
  source 1..20: mol_type = other RNA
aagaaagccataatttggga

SEQ ID NO: 11873 - RNA, 20 nt, synthetic construct
  source 1..20: mol_type = other RNA
ccttatttctaggaatccga

SEQ ID NO: 11874 - RNA, 20 nt, synthetic construct
  source 1..20: mol_type = other RNA
aaaaggatccaaatgatttc

SEQ ID NO: 11875 - RNA, 20 nt, synthetic construct
  source 1..20: mol_type = other RNA
tataactgagaaacttgtat

SEQ ID NO: 11876 - RNA, 20 nt, synthetic construct
  source 1..20: mol_type = other RNA
agtaaatttttaaatgcaag

SEQ ID NO: 11877 - RNA, 20 nt, synthetic construct
  source 1..20: mol_type = other RNA
gcttttgctgacattttcct

SEQ ID NO: 11878 - RNA, 20 nt, synthetic construct
  source 1..20: mol_type = other RNA
gcaaaagctgaccatgagag

SEQ ID NO: 11879 - RNA, 20 nt, synthetic construct
  source 1..20: mol_type = other RNA
agctttaattgaatcatttt

SEQ ID NO: 11880 - RNA, 20 nt, synthetic construct
  source 1..20: mol_type = other RNA
tgtggtttgtctagctttaa

SEQ ID NO: 11881 - RNA, 20 nt, synthetic construct
  source 1..20: mol_type = other RNA
gtcttgtggtttgtctagct

SEQ ID NO: 11882 - RNA, 20 nt, synthetic construct
  source 1..20: mol_type = other RNA
gtctgtcttgtggtttgtct

SEQ ID NO: 11883 - RNA, 20 nt, synthetic construct
  source 1..20: mol_type = other RNA
gtctgtctgtcttgtggttt

SEQ ID NO: 11884 - RNA, 20 nt, synthetic construct
  source 1..20: mol_type = other RNA
ttgtgtgtatgtgtatttgt

SEQ ID NO: 11885 - RNA, 20 nt, synthetic construct
  source 1..20: mol_type = other RNA
ttgaggctctgttgattaat

SEQ ID NO: 11886 - RNA, 20 nt, synthetic construct
  source 1..20: mol_type = other RNA
cagaaagagaggaaaaagat

SEQ ID NO: 11887 - RNA, 20 nt, synthetic construct
  source 1..20: mol_type = other RNA
cattatctttttcctctctt

SEQ ID NO: 11888 - RNA, 20 nt, synthetic construct
  source 1..20: mol_type = other RNA
tggcttcaagtataacttct

SEQ ID NO: 11889 - RNA, 20 nt, synthetic construct
  source 1..20: mol_type = other RNA
gccgtcatggcttcaagtat

SEQ ID NO: 11890 - RNA, 20 nt, synthetic construct
  source 1..20: mol_type = other RNA
ttgagcttcatgactatgaa

SEQ ID NO: 11891 - RNA, 20 nt, synthetic construct
  source 1..20: mol_type = other RNA
tgaagctcaatgactcaggt

SEQ ID NO: 11892 - RNA, 20 nt, synthetic construct
  source 1..20: mol_type = other RNA
gatttcaaagctaagaagaa

SEQ ID NO: 11893 - RNA, 20 nt, synthetic construct
  source 1..20: mol_type = other RNA
aaatgtttgttcataggaac

SEQ ID NO: 11894 - RNA, 20 nt, synthetic construct
  source 1..20: mol_type = other RNA
tagatcaactgtcaaaatgt

SEQ ID NO: 11895 - RNA, 20 nt, synthetic construct
  source 1..20: mol_type = other RNA
tatttgcttttccttgccta

SEQ ID NO: 11896 - RNA, 20 nt, synthetic construct
  source 1..20: mol_type = other RNA
ttggtttggactatttccat

SEQ ID NO: 11897 - RNA, 20 nt, synthetic construct
  source 1..20: mol_type = other RNA
aaaccaatgacattcagtga

SEQ ID NO: 11898 - RNA, 20 nt, synthetic construct
  source 1..20: mol_type = other RNA
attttcttgttcactgaatg

SEQ ID NO: 11899 - RNA, 20 nt, synthetic construct
  source 1..20: mol_type = other RNA
atcacatgaatcttttcaaa

SEQ ID NO: 11900 - RNA, 20 nt, synthetic construct
  source 1..20: mol_type = other RNA
tctgttcagccagactgtgg

SEQ ID NO: 11901 - RNA, 20 nt, synthetic construct
  source 1..20: mol_type = other RNA
gtcatctgttcagccagact

SEQ ID NO: 11902 - RNA, 20 nt, synthetic construct
  source 1..20: mol_type = other RNA
ggctgaacagatgacagacc

SEQ ID NO: 11903 - RNA, 20 nt, synthetic construct
  source 1..20: mol_type = other RNA
gctttcagacctggagtatg

SEQ ID NO: 11904 - RNA, 20 nt, synthetic construct
  source 1..20: mol_type = other RNA
gaaagctgacaagaagatat

SEQ ID NO: 11905 - RNA, 20 nt, synthetic construct
  source 1..20: mol_type = other RNA
ttctataggagtacccaatc

SEQ ID NO: 11906 - RNA, 20 nt, synthetic construct
  source 1..20: mol_type = other RNA
ggctatctgtatgtctttct

SEQ ID NO: 11907 - RNA, 20 nt, synthetic construct
  source 1..20: mol_type = other RNA
tgtagattgttttatgcacg

SEQ ID NO: 11908 - RNA, 20 nt, synthetic construct
  source 1..20: mol_type = other RNA
atactccataagaaaaccga

SEQ ID NO: 11909 - RNA, 20 nt, synthetic construct
  source 1..20: mol_type = other RNA
ttgaaatgttcacagttgtt

SEQ ID NO: 11910 - RNA, 20 nt, synthetic construct
  source 1..20: mol_type = other RNA
tcaacttctaaacaactgtg

SEQ ID NO: 11911 - RNA, 20 nt, synthetic construct
  source 1..20: mol_type = other RNA
tgtaacaatcacaaatcgtc

SEQ ID NO: 11912 - RNA, 20 nt, synthetic construct
  source 1..20: mol_type = other RNA
ctttttaccactttgttaca

SEQ ID NO: 11913 - RNA, 20 nt, synthetic construct
  source 1..20: mol_type = other RNA
ggtgcccttgtatcttctcc

SEQ ID NO: 11914 - RNA, 20 nt, synthetic construct
  source 1..20: mol_type = other RNA
ggccactgcaaattacaaaa

SEQ ID NO: 11915 - RNA, 20 nt, synthetic construct
  source 1..20: mol_type = other RNA
ggttgcagtactcccatctg

SEQ ID NO: 11916 - RNA, 20 nt, synthetic construct
  source 1..20: mol_type = other RNA
gatgggagtactgcaacctg

SEQ ID NO: 11917 - RNA, 20 nt, synthetic construct
  source 1..20: mol_type = other RNA
ctggacattgtgtcaggttg

SEQ ID NO: 11918 - RNA, 20 nt, synthetic construct
  source 1..20: mol_type = other RNA
agtgacagaatcaagtgtcc

SEQ ID NO: 11919 - RNA, 20 nt, synthetic construct
  source 1..20: mol_type = other RNA
ggccagagacttcttacctt

SEQ ID NO: 11920 - RNA, 20 nt, synthetic construct
  source 1..20: mol_type = other RNA
ctggccagacaaccacaccc

SEQ ID NO: 11921 - RNA, 20 nt, synthetic construct
  source 1..20: mol_type = other RNA
aagggtgtggttgtctggcc

SEQ ID NO: 11922 - RNA, 20 nt, synthetic construct
  source 1..20: mol_type = other RNA
acattcagattcccgtgcag

SEQ ID NO: 11923 - RNA, 20 nt, synthetic construct
  source 1..20: mol_type = other RNA
gccaatgggaaggaagcctc

SEQ ID NO: 11924 - RNA, 20 nt, synthetic construct
  source 1..20: mol_type = other RNA
cggggtgccaaaaatctcag

SEQ ID NO: 11925 - RNA, 20 nt, synthetic construct
  source 1..20: mol_type = other RNA
gcacgcttcctaaagacacc

SEQ ID NO: 11926 - RNA, 20 nt, synthetic construct
  source 1..20: mol_type = other RNA
ttaggaagcgtgcagacctt

SEQ ID NO: 11927 - RNA, 20 nt, synthetic construct
  source 1..20: mol_type = other RNA
tagtgaaaatggatattcta

SEQ ID NO: 11928 - RNA, 20 nt, synthetic construct
  source 1..20: mol_type = other RNA
acttgaagaaataccaggaa

SEQ ID NO: 11929 - RNA, 20 nt, synthetic construct
  source 1..20: mol_type = other RNA
gtcatccttgagaaacctga

SEQ ID NO: 11930 - RNA, 20 nt, synthetic construct
  source 1..20: mol_type = other RNA
tatcaggtttctcaaggatg

SEQ ID NO: 11931 - RNA, 20 nt, synthetic construct
  source 1..20: mol_type = other RNA
tccttgagaaacctgatatg

SEQ ID NO: 11932 - RNA, 20 nt, synthetic construct
  source 1..20: mol_type = other RNA
aggtaacagtacatagccag

SEQ ID NO: 11933 - RNA, 20 nt, synthetic construct
  source 1..20: mol_type = other RNA
accttaatcttaggcaggtg

SEQ ID NO: 11934 - RNA, 20 nt, synthetic construct
  source 1..20: mol_type = other RNA
actttgttgcaatgcaggat

SEQ ID NO: 11935 - RNA, 20 nt, synthetic construct
  source 1..20: mol_type = other RNA
ctccaagggaataaaatttt

SEQ ID NO: 11936 - RNA, 20 nt, synthetic construct
  source 1..20: mol_type = other RNA
ctcagagaggggtactggcc

SEQ ID NO: 11937 - RNA, 20 nt, synthetic construct
  source 1..20: mol_type = other RNA
ttgcctggaagtcctagatg

SEQ ID NO: 11938 - RNA, 20 nt, synthetic construct
  source 1..20: mol_type = other RNA
tccatctaggacttccaggc

SEQ ID NO: 11939 - RNA, 20 nt, synthetic construct
  source 1..20: mol_type = other RNA
tagatggaggaccacttcct

SEQ ID NO: 11940 - RNA, 20 nt, synthetic construct
  source 1..20: mol_type = other RNA
cacatttctccagagcactg

SEQ ID NO: 11941 - RNA, 20 nt, synthetic construct
  source 1..20: mol_type = other RNA
gtgggggcagacatgaaacc

SEQ ID NO: 11942 - RNA, 20 nt, synthetic construct
  source 1..20: mol_type = other RNA
gcccccactgacaaccacca

SEQ ID NO: 11943 - RNA, 20 nt, synthetic construct
  source 1..20: mol_type = other RNA
cctgccttgttctcaggaac

SEQ ID NO: 11944 - RNA, 20 nt, synthetic construct
  source 1..20: mol_type = other RNA
aaattgcactcatgtgcctg

SEQ ID NO: 11945 - RNA, 20 nt, synthetic construct
  source 1..20: mol_type = other RNA
tttggtgcccaggttttaaa

SEQ ID NO: 11946 - RNA, 20 nt, synthetic construct
  source 1..20: mol_type = other RNA
atctgcctactaatgtagaa

SEQ ID NO: 11947 - RNA, 20 nt, synthetic construct
  source 1..20: mol_type = other RNA
tcattttcagagatgatgtc

SEQ ID NO: 11948 - RNA, 20 nt, synthetic construct
  source 1..20: mol_type = other RNA
ttttcagagatgatgtcctg

SEQ ID NO: 11949 - RNA, 20 nt, synthetic construct
  source 1..20: mol_type = other RNA
tgtttctatcatggattttt

SEQ ID NO: 11950 - RNA, 20 nt, synthetic construct
  source 1..20: mol_type = other RNA
tggactgtggggctttgctc

SEQ ID NO: 11951 - RNA, 20 nt, synthetic construct
  source 1..20: mol_type = other RNA
atcaccatggtagcagtcct

SEQ ID NO: 11952 - RNA, 20 nt, synthetic construct
  source 1..20: mol_type = other RNA
aggactgctaccatggtgat

SEQ ID NO: 11953 - RNA, 20 nt, synthetic construct
  source 1..20: mol_type = other RNA
ttcctgtaacagtggtggag

SEQ ID NO: 11954 - RNA, 20 nt, synthetic construct
  source 1..20: mol_type = other RNA
tagaggaccaagactgacat

SEQ ID NO: 11955 - RNA, 20 nt, synthetic construct
  source 1..20: mol_type = other RNA
gtcttggtcctctatgacac

SEQ ID NO: 11956 - RNA, 20 nt, synthetic construct
  source 1..20: mol_type = other RNA
tggtcctctatgacaccaca

SEQ ID NO: 11957 - RNA, 20 nt, synthetic construct
  source 1..20: mol_type = other RNA
tctatgacaccacactggca

SEQ ID NO: 11958 - RNA, 20 nt, synthetic construct
  source 1..20: mol_type = other RNA
ttgagttttctcccaagaga

SEQ ID NO: 11959 - RNA, 20 nt, synthetic construct
  source 1..20: mol_type = other RNA
taagaagttagctggaagca

SEQ ID NO: 11960 - RNA, 20 nt, synthetic construct
  source 1..20: mol_type = other RNA
gagagaaattgggtcataag

SEQ ID NO: 11961 - RNA, 20 nt, synthetic construct
  source 1..20: mol_type = other RNA
aacattctgggtctgagaga

SEQ ID NO: 11962 - RNA, 20 nt, synthetic construct
  source 1..20: mol_type = other RNA
caggcttcttgctttgggca

SEQ ID NO: 11963 - RNA, 20 nt, synthetic construct
  source 1..20: mol_type = other RNA
gagaggagagaaatgtcagg

SEQ ID NO: 11964 - RNA, 20 nt, synthetic construct
  source 1..20: mol_type = other RNA
ggccagctctcttttctcat

SEQ ID NO: 11965 - RNA, 20 nt, synthetic construct
  source 1..20: mol_type = other RNA
catgaatagaaagctcagaa

SEQ ID NO: 11966 - RNA, 20 nt, synthetic construct
  source 1..20: mol_type = other RNA
tatgttcttctgagctttct

SEQ ID NO: 11967 - RNA, 20 nt, synthetic construct
  source 1..20: mol_type = other RNA
ttagtgggcattgtggaatg

SEQ ID NO: 11968 - RNA, 20 nt, synthetic construct
  source 1..20: mol_type = other RNA
ttctaatctccaagccctgg

SEQ ID NO: 11969 - RNA, 20 nt, synthetic construct
  source 1..20: mol_type = other RNA
tgggtaacaagtgaaggata

SEQ ID NO: 11970 - RNA, 20 nt, synthetic construct
  source 1..20: mol_type = other RNA
atatagatatccttcacttg

SEQ ID NO: 11971 - RNA, 20 nt, synthetic construct
  source 1..20: mol_type = other RNA
gaaaagctatgtgttgccag

SEQ ID NO: 11972 - RNA, 20 nt, synthetic construct
  source 1..20: mol_type = other RNA
ggaagtatagagatgctgaa

SEQ ID NO: 11973 - RNA, 20 nt, synthetic construct
  source 1..20: mol_type = other RNA
atcttcctgaatgtgtaact

SEQ ID NO: 11974 - RNA, 20 nt, synthetic construct
  source 1..20: mol_type = other RNA
ggctatgccagcctttctgc

SEQ ID NO: 11975 - RNA, 20 nt, synthetic construct
  source 1..20: mol_type = other RNA
ttcatggcagaaaggctggc

SEQ ID NO: 11976 - RNA, 20 nt, synthetic construct
  source 1..20: mol_type = other RNA
aacctgtgaaaactgttttc

SEQ ID NO: 11977 - RNA, 20 nt, synthetic construct
  source 1..20: mol_type = other RNA
aggaaggaagacaggttaat

SEQ ID NO: 11978 - RNA, 20 nt, synthetic construct
  source 1..20: mol_type = other RNA
tccttcctggacacagtgtt

SEQ ID NO: 11979 - RNA, 20 nt, synthetic construct
  source 1..20: mol_type = other RNA
ttcaatccaacactgtgtcc

SEQ ID NO: 11980 - RNA, 20 nt, synthetic construct
  source 1..20: mol_type = other RNA
gctgggctccatctgcttgt

SEQ ID NO: 11981 - RNA, 20 nt, synthetic construct
  source 1..20: mol_type = other RNA
ctctcctcagttaagcaaga

SEQ ID NO: 11982 - RNA, 20 nt, synthetic construct
  source 1..20: mol_type = other RNA
tgcttaactgaggagagaga

SEQ ID NO: 11983 - RNA, 20 nt, synthetic construct
  source 1..20: mol_type = other RNA
gcgatgcctcaggcagctga

SEQ ID NO: 11984 - RNA, 20 nt, synthetic construct
  source 1..20: mol_type = other RNA
cctcaaggctttggctaaat

SEQ ID NO: 11985 - RNA, 20 nt, synthetic construct
  source 1..20: mol_type = other RNA
gaattcaaatatcccccagt

SEQ ID NO: 11986 - RNA, 20 nt, synthetic construct
  source 1..20: mol_type = other RNA
ctactgaatgcccaaaatgt

SEQ ID NO: 11987 - RNA, 20 nt, synthetic construct
  source 1..20: mol_type = other RNA
ccttgattctaggaataaga

SEQ ID NO: 11988 - RNA, 20 nt, synthetic construct
  source 1..20: mol_type = other RNA
aaaaggatccaaatgatctc

SEQ ID NO: 11989 - RNA, 20 nt, synthetic construct
  source 1..20: mol_type = other RNA
cttgcctctaaggggggttg

SEQ ID NO: 11990 - RNA, 20 nt, synthetic construct
  source 1..20: mol_type = other RNA
ctattaaatttttaaataga

SEQ ID NO: 11991 - RNA, 20 nt, synthetic construct
  source 1..20: mol_type = other RNA
tcaattctataatttctggg

SEQ ID NO: 11992 - RNA, 20 nt, synthetic construct
  source 1..20: mol_type = other RNA
gcttttgctgacattttcct

SEQ ID NO: 11993 - RNA, 20 nt, synthetic construct
  source 1..20: mol_type = other RNA
gcaaaagctgaccatgagag

SEQ ID NO: 11994 - RNA, 20 nt, synthetic construct
  source 1..20: mol_type = other RNA
aaagtgatgataaggccatc

SEQ ID NO: 11995 - RNA, 20 nt, synthetic construct
  source 1..20: mol_type = other RNA
cctttcctaccgtaatgtct

SEQ ID NO: 11996 - RNA, 20 nt, synthetic construct
  source 1..20: mol_type = other RNA
tgtgatttgtgtagctccta

SEQ ID NO: 11997 - RNA, 20 nt, synthetic construct
  source 1..20: mol_type = other RNA
gtcctgtgatttgtgtagct

SEQ ID NO: 11998 - RNA, 20 nt, synthetic construct
  source 1..20: mol_type = other RNA
gtctgtcctgtgatttgtgt

SEQ ID NO: 11999 - RNA, 20 nt, synthetic construct
  source 1..20: mol_type = other RNA
gtctgtctgtcctgtgattt

SEQ ID NO: 12000 - RNA, 20 nt, synthetic construct
  source 1..20: mol_type = other RNA
gttggtctgtctgtctgtcc

SEQ ID NO: 12001 - RNA, 20 nt, synthetic construct
  source 1..20: mol_type = other RNA
ttgtgtgtgtgtgtgtgtgt

SEQ ID NO: 12002 - RNA, 20 nt, synthetic construct
  source 1..20: mol_type = other RNA
cagaaggagaagaaaaagat

SEQ ID NO: 12003 - RNA, 20 nt, synthetic construct
  source 1..20: mol_type = other RNA
tgatatctttttcttctcct

SEQ ID NO: 12004 - RNA, 20 nt, synthetic construct
  source 1..20: mol_type = other RNA
gtcatgatatctttttcttc

SEQ ID NO: 12005 - RNA, 20 nt, synthetic construct
  source 1..20: mol_type = other RNA
tttagcttcttgactatgag

SEQ ID NO: 12006 - RNA, 20 nt, synthetic construct
  source 1..20: mol_type = other RNA
agaagctaaatgactcaggt

SEQ ID NO: 12007 - RNA, 20 nt, synthetic construct
  source 1..20: mol_type = other RNA
aagctgttgttcataggaac

SEQ ID NO: 12008 - RNA, 20 nt, synthetic construct
  source 1..20: mol_type = other RNA
tagatcaacagctgtcaaag

SEQ ID NO: 12009 - RNA, 20 nt, synthetic construct
  source 1..20: mol_type = other RNA
ttggtttggactatttcctt

SEQ ID NO: 12010 - RNA, 20 nt, synthetic construct
  source 1..20: mol_type = other RNA
aaaccaatgacattcagtgg

SEQ ID NO: 12011 - RNA, 20 nt, synthetic construct
  source 1..20: mol_type = other RNA
attttcttttccactgaatg

SEQ ID NO: 12012 - RNA, 20 nt, synthetic construct
  source 1..20: mol_type = other RNA
atatgattggccaaagtctg

SEQ ID NO: 12013 - RNA, 20 nt, synthetic construct
  source 1..20: mol_type = other RNA
tctgtttagccagactttgg

SEQ ID NO: 12014 - RNA, 20 nt, synthetic construct
  source 1..20: mol_type = other RNA
gtcatctgtttagccagact

SEQ ID NO: 12015 - RNA, 20 nt, synthetic construct
  source 1..20: mol_type = other RNA
ggctaaacagatgacagacc

SEQ ID NO: 12016 - RNA, 20 nt, synthetic construct
  source 1..20: mol_type = other RNA
ctataaaactgcatgatcta

SEQ ID NO: 12017 - RNA, 20 nt, synthetic construct
  source 1..20: mol_type = other RNA
gtaagtctctataaaactgc

SEQ ID NO: 12018 - RNA, 20 nt, synthetic construct
  source 1..20: mol_type = other RNA
ggctgtctgtaagtctctat

SEQ ID NO: 12019 - RNA, 20 nt, synthetic construct
  source 1..20: mol_type = other RNA
tggagattgtttcacgtaca

SEQ ID NO: 12020 - RNA, 20 nt, synthetic construct
  source 1..20: mol_type = other RNA
acatttcaaagacagcttat

SEQ ID NO: 12021 - RNA, 20 nt, synthetic construct
  source 1..20: mol_type = other RNA
ttgaaatgttgacagttgtt

SEQ ID NO: 12022 - RNA, 20 nt, synthetic construct
  source 1..20: mol_type = other RNA
tcaacttctaaacaactgtc

SEQ ID NO: 12023 - RNA, 20 nt, synthetic construct
  source 1..20: mol_type = other RNA
cataacactcacaaatggtc

SEQ ID NO: 12024 - RNA, 20 nt, synthetic construct
  source 1..20: mol_type = other RNA
ccagagattggagaagatac

SEQ ID NO: 12025 - RNA, 20 nt, synthetic construct
  source 1..20: mol_type = other RNA
ggccactgcaaattccaaaa

SEQ ID NO: 12026 - RNA, 20 nt, synthetic construct
  source 1..20: mol_type = other RNA
ggttgcagtactcccatctg

SEQ ID NO: 12027 - RNA, 20 nt, synthetic construct
  source 1..20: mol_type = other RNA
gatgggagtactgcaacctg

SEQ ID NO: 12028 - RNA, 20 nt, synthetic construct
  source 1..20: mol_type = other RNA
gagggtatggttgtctgact

SEQ ID NO: 12029 - RNA, 20 nt, synthetic construct
  source 1..20: mol_type = other RNA
gacaaccataccctcggaca

SEQ ID NO: 12030 - RNA, 20 nt, synthetic construct
  source 1..20: mol_type = other RNA
atgacttcaccttcgacttc

SEQ ID NO: 12031 - RNA, 20 nt, synthetic construct
  source 1..20: mol_type = other RNA
aaggtgaagtcatggacagc

SEQ ID NO: 12032 - RNA, 20 nt, synthetic construct
  source 1..20: mol_type = other RNA
tggacagccaatgggaagga

SEQ ID NO: 12033 - RNA, 20 nt, synthetic construct
  source 1..20: mol_type = other RNA
ccccagagaaggcactgaag

SEQ ID NO: 12034 - RNA, 20 nt, synthetic construct
  source 1..20: mol_type = other RNA
gtgccccttttaaagacacc

SEQ ID NO: 12035 - RNA, 20 nt, synthetic construct
  source 1..20: mol_type = other RNA
ttaaaaggggcacagaccct

SEQ ID NO: 12036 - RNA, 20 nt, synthetic construct
  source 1..20: mol_type = other RNA
tagagggtctgtgccccttt

SEQ ID NO: 12037 - RNA, 20 nt, synthetic construct
  source 1..20: mol_type = other RNA
tagccaagatggatattcta

SEQ ID NO: 12038 - RNA, 20 nt, synthetic construct
  source 1..20: mol_type = other RNA
agccctttcttcaagtaggc

SEQ ID NO: 12039 - RNA, 20 nt, synthetic construct
  source 1..20: mol_type = other RNA
tcagctttaccattttgaag

SEQ ID NO: 12040 - RNA, 20 nt, synthetic construct
  source 1..20: mol_type = other RNA
tcattagatccgtattgtcc

SEQ ID NO: 12041 - RNA, 20 nt, synthetic construct
  source 1..20: mol_type = other RNA
caggacaatacggatctaat

SEQ ID NO: 12042 - RNA, 20 nt, synthetic construct
  source 1..20: mol_type = other RNA
tgagactttgaagcagtaca

SEQ ID NO: 12043 - RNA, 20 nt, synthetic construct
  source 1..20: mol_type = other RNA
gctttcttgtaatgagggat

SEQ ID NO: 12044 - RNA, 20 nt, synthetic construct
  source 1..20: mol_type = other RNA
cccctcctaggctataaaat

SEQ ID NO: 12045 - RNA, 20 nt, synthetic construct
  source 1..20: mol_type = other RNA
ttacctacaagtcctagatg

SEQ ID NO: 12046 - RNA, 20 nt, synthetic construct
  source 1..20: mol_type = other RNA
tagatgcaagatccttttct

SEQ ID NO: 12047 - RNA, 20 nt, synthetic construct
  source 1..20: mol_type = other RNA
agtgtgcaagggtttcatgt

SEQ ID NO: 12048 - RNA, 20 nt, synthetic construct
  source 1..20: mol_type = other RNA
cctgccttgttctcatgaac

SEQ ID NO: 12049 - RNA, 20 nt, synthetic construct
  source 1..20: mol_type = other RNA
tttgcttacacctcttctgg

SEQ ID NO: 12050 - RNA, 20 nt, synthetic construct
  source 1..20: mol_type = other RNA
taaatattttaattcaaccc

SEQ ID NO: 12051 - RNA, 20 nt, synthetic construct
  source 1..20: mol_type = other RNA
atttgtatttttattctaca

SEQ ID NO: 12052 - RNA, 20 nt, synthetic construct
  source 1..20: mol_type = other RNA
taatttttttcacatttccc

SEQ ID NO: 12053 - RNA, 20 nt, synthetic construct
  source 1..20: mol_type = other RNA
tagacgaccaagactgacat

SEQ ID NO: 12054 - RNA, 20 nt, synthetic construct
  source 1..20: mol_type = other RNA
gtcttggtcgtctatgacac

SEQ ID NO: 12055 - RNA, 20 nt, synthetic construct
  source 1..20: mol_type = other RNA
tggtcgtctatgacaccaca

SEQ ID NO: 12056 - RNA, 20 nt, synthetic construct
  source 1..20: mol_type = other RNA
tctatgacaccacattggca

SEQ ID NO: 12057 - RNA, 20 nt, synthetic construct
  source 1..20: mol_type = other RNA
atcatgttagccataaaagg

SEQ ID NO: 12058 - RNA, 20 nt, synthetic construct
  source 1..20: mol_type = other RNA
actaaaatttctcttagctg

SEQ ID NO: 12059 - RNA, 20 nt, synthetic construct
  source 1..20: mol_type = other RNA
atgagaaatttggacctagg

SEQ ID NO: 12060 - RNA, 20 nt, synthetic construct
  source 1..20: mol_type = other RNA
aaatttctcatagactcaga

SEQ ID NO: 12061 - RNA, 20 nt, synthetic construct
  source 1..20: mol_type = other RNA
caggaaacttacttttgagc

SEQ ID NO: 12062 - RNA, 20 nt, synthetic construct
  source 1..20: mol_type = other RNA
gaatgaagagaagttttagg

SEQ ID NO: 12063 - RNA, 20 nt, synthetic construct
  source 1..20: mol_type = other RNA
cattaatgtaaagctaagga

SEQ ID NO: 12064 - RNA, 20 nt, synthetic construct
  source 1..20: mol_type = other RNA
tttgatctccttagctttac

SEQ ID NO: 12065 - RNA, 20 nt, synthetic construct
  source 1..20: mol_type = other RNA
cagcatttggtcatttgatc

SEQ ID NO: 12066 - RNA, 20 nt, synthetic construct
  source 1..20: mol_type = other RNA
atgcagtctttcaaccatgc

SEQ ID NO: 12067 - RNA, 20 nt, synthetic construct
  source 1..20: mol_type = other RNA
ttcaaccatgcaattctatc

SEQ ID NO: 12068 - RNA, 20 nt, synthetic construct
  source 1..20: mol_type = other RNA
aaaatggcaaacacaaattt

SEQ ID NO: 12069 - RNA, 20 nt, synthetic construct
  source 1..20: mol_type = other RNA
tcccaaagtgttgggatcac

SEQ ID NO: 12070 - RNA, 20 nt, synthetic construct
  source 1..20: mol_type = other RNA
tgtcctcccaaagtgttggg

SEQ ID NO: 12071 - RNA, 20 nt, synthetic construct
  source 1..20: mol_type = other RNA
tgaactcctgacctctggtg

SEQ ID NO: 12072 - RNA, 20 nt, synthetic construct
  source 1..20: mol_type = other RNA
ggagttcaagaccagcctgg

SEQ ID NO: 12073 - RNA, 20 nt, synthetic construct
  source 1..20: mol_type = other RNA
tggtggtgggtacctgtaat

SEQ ID NO: 12074 - RNA, 20 nt, synthetic construct
  source 1..20: mol_type = other RNA
cccaggctggagtgcagtgg

SEQ ID NO: 12075 - RNA, 20 nt, synthetic construct
  source 1..20: mol_type = other RNA
tgctctgtcacccaggctgg

SEQ ID NO: 12076 - RNA, 20 nt, synthetic construct
  source 1..20: mol_type = other RNA
ggcagagtaaaagcaggaat

SEQ ID NO: 12077 - RNA, 20 nt, synthetic construct
  source 1..20: mol_type = other RNA
ggaagtaaacagatgtggtg

SEQ ID NO: 12078 - RNA, 20 nt, synthetic construct
  source 1..20: mol_type = other RNA
atgtacctgcccattttaat

SEQ ID NO: 12079 - RNA, 20 nt, synthetic construct
  source 1..20: mol_type = other RNA
gacatgcatttttttgtcca

SEQ ID NO: 12080 - RNA, 20 nt, synthetic construct
  source 1..20: mol_type = other RNA
gacaaaaactggcctcttgc

SEQ ID NO: 12081 - RNA, 20 nt, synthetic construct
  source 1..20: mol_type = other RNA
gctgttcaacatgtgcaaac

SEQ ID NO: 12082 - RNA, 20 nt, synthetic construct
  source 1..20: mol_type = other RNA
aggaagggtaattatggggt

SEQ ID NO: 12083 - RNA, 20 nt, synthetic construct
  source 1..20: mol_type = other RNA
ctctccccagtttagcaaga

SEQ ID NO: 12084 - RNA, 20 nt, synthetic construct
  source 1..20: mol_type = other RNA
tgctaaactggggagagaga

SEQ ID NO: 12085 - RNA, 20 nt, synthetic construct
  source 1..20: mol_type = other RNA
cttcaagtctctggctgaac

SEQ ID NO: 12086 - RNA, 20 nt, synthetic construct
  source 1..20: mol_type = other RNA
ctggctgaacagaaagctgt

SEQ ID NO: 12087 - RNA, 20 nt, synthetic construct
  source 1..20: mol_type = other RNA
gagctcaaatacctcccagt

SEQ ID NO: 12088 - RNA, 20 nt, synthetic construct
  source 1..20: mol_type = other RNA
ctcctcaggctggtcagagc

SEQ ID NO: 12089 - RNA, 20 nt, synthetic construct
  source 1..20: mol_type = other RNA
ttgctgaatgcccaagatgt

SEQ ID NO: 12090 - RNA, 20 nt, synthetic construct
  source 1..20: mol_type = other RNA
actccagaaacaccctagaa

SEQ ID NO: 12091 - RNA, 20 nt, synthetic construct
  source 1..20: mol_type = other RNA
aaaaagatccaaatgatctc

SEQ ID NO: 12092 - RNA, 20 nt, synthetic construct
  source 1..20: mol_type = other RNA
gaagaaaacaacctcttcag

SEQ ID NO: 12093 - RNA, 20 nt, synthetic construct
  source 1..20: mol_type = other RNA
cactaaatgctttttgtatg

SEQ ID NO: 12094 - RNA, 20 nt, synthetic construct
  source 1..20: mol_type = other RNA
atttgtattgactgattttt

SEQ ID NO: 12095 - RNA, 20 nt, synthetic construct
  source 1..20: mol_type = other RNA
atacaaatagacccaaaaat

SEQ ID NO: 12096 - RNA, 20 nt, synthetic construct
  source 1..20: mol_type = other RNA
acgctttctttaaatccttg

SEQ ID NO: 12097 - RNA, 20 nt, synthetic construct
  source 1..20: mol_type = other RNA
ttttacaatttttctttctg

SEQ ID NO: 12098 - RNA, 20 nt, synthetic construct
  source 1..20: mol_type = other RNA
tttttttcagttcttgactc

SEQ ID NO: 12099 - RNA, 20 nt, synthetic construct
  source 1..20: mol_type = other RNA
agaactgaaaaaaaagacat

SEQ ID NO: 12100 - RNA, 20 nt, synthetic construct
  source 1..20: mol_type = other RNA
ttgaggctctgtttatcttc

SEQ ID NO: 12101 - RNA, 20 nt, synthetic construct
  source 1..20: mol_type = other RNA
cagaggaagggaaagagata

SEQ ID NO: 12102 - RNA, 20 nt, synthetic construct
  source 1..20: mol_type = other RNA
tcagccatcactgcttcaag

SEQ ID NO: 12103 - RNA, 20 nt, synthetic construct
  source 1..20: mol_type = other RNA
agaagctcaatggatcagat

SEQ ID NO: 12104 - RNA, 20 nt, synthetic construct
  source 1..20: mol_type = other RNA
aaataaatcatacagcttta

SEQ ID NO: 12105 - RNA, 20 nt, synthetic construct
  source 1..20: mol_type = other RNA
ataatcaaagatagaaagta

SEQ ID NO: 12106 - RNA, 20 nt, synthetic construct
  source 1..20: mol_type = other RNA
ctgttactctatgtaaaggt

SEQ ID NO: 12107 - RNA, 20 nt, synthetic construct
  source 1..20: mol_type = other RNA
tttgtgtcactgttactcta

SEQ ID NO: 12108 - RNA, 20 nt, synthetic construct
  source 1..20: mol_type = other RNA
gaaaaaatggaataatatgc

SEQ ID NO: 12109 - RNA, 20 nt, synthetic construct
  source 1..20: mol_type = other RNA
gaaacaatggaataacacct

SEQ ID NO: 12110 - RNA, 20 nt, synthetic construct
  source 1..20: mol_type = other RNA
tcctaaaaacaaagaacaaa

SEQ ID NO: 12111 - RNA, 20 nt, synthetic construct
  source 1..20: mol_type = other RNA
ttatttagatcttctaattt

SEQ ID NO: 12112 - RNA, 20 nt, synthetic construct
  source 1..20: mol_type = other RNA
cttttcacaaaactgatctt

SEQ ID NO: 12113 - RNA, 20 nt, synthetic construct
  source 1..20: mol_type = other RNA
tttcttgaaaacctaacaga

SEQ ID NO: 12114 - RNA, 20 nt, synthetic construct
  source 1..20: mol_type = other RNA
tggtgattctagcatataca

SEQ ID NO: 12115 - RNA, 20 nt, synthetic construct
  source 1..20: mol_type = other RNA
ttatgagaatttccatatta

SEQ ID NO: 12116 - RNA, 20 nt, synthetic construct
  source 1..20: mol_type = other RNA
tgattactgtgtctttatga

SEQ ID NO: 12117 - RNA, 20 nt, synthetic construct
  source 1..20: mol_type = other RNA
cagccaataccacatgtctt

SEQ ID NO: 12118 - RNA, 20 nt, synthetic construct
  source 1..20: mol_type = other RNA
gcaactcctcatctcaggca

SEQ ID NO: 12119 - RNA, 20 nt, synthetic construct
  source 1..20: mol_type = other RNA
tgctatgttgcccaggcttg

SEQ ID NO: 12120 - RNA, 20 nt, synthetic construct
  source 1..20: mol_type = other RNA
cagctattcaggaagctgag

SEQ ID NO: 12121 - RNA, 20 nt, synthetic construct
  source 1..20: mol_type = other RNA
cccaggctaaagttcagtag

SEQ ID NO: 12122 - RNA, 20 nt, synthetic construct
  source 1..20: mol_type = other RNA
gcataaatttacatatatgg

SEQ ID NO: 12123 - RNA, 20 nt, synthetic construct
  source 1..20: mol_type = other RNA
atttattttcaatacaggta

SEQ ID NO: 12124 - RNA, 20 nt, synthetic construct
  source 1..20: mol_type = other RNA
gaaacaactggatagccata

SEQ ID NO: 12125 - RNA, 20 nt, synthetic construct
  source 1..20: mol_type = other RNA
catttgttatagtttttttc

SEQ ID NO: 12126 - RNA, 20 nt, synthetic construct
  source 1..20: mol_type = other RNA
tacagtaggattcaagcgtc

SEQ ID NO: 12127 - RNA, 20 nt, synthetic construct
  source 1..20: mol_type = other RNA
aagagctatctcaaattaat

SEQ ID NO: 12128 - RNA, 20 nt, synthetic construct
  source 1..20: mol_type = other RNA
tatatttcagcctcagaatt

SEQ ID NO: 12129 - RNA, 20 nt, synthetic construct
  source 1..20: mol_type = other RNA
acattatcatttgttttctt

SEQ ID NO: 12130 - RNA, 20 nt, synthetic construct
  source 1..20: mol_type = other RNA
tatttggtgagcataagttt

SEQ ID NO: 12131 - RNA, 20 nt, synthetic construct
  source 1..20: mol_type = other RNA
gatatatggatgagagtgtt

SEQ ID NO: 12132 - RNA, 20 nt, synthetic construct
  source 1..20: mol_type = other RNA
tctgattagtgagtgggaga

SEQ ID NO: 12133 - RNA, 20 nt, synthetic construct
  source 1..20: mol_type = other RNA
tttcttaggagaagatgcac

SEQ ID NO: 12134 - RNA, 20 nt, synthetic construct
  source 1..20: mol_type = other RNA
tcttatgagggttataactc

SEQ ID NO: 12135 - RNA, 20 nt, synthetic construct
  source 1..20: mol_type = other RNA
tcttaatgatatccatgtac

SEQ ID NO: 12136 - RNA, 20 nt, synthetic construct
  source 1..20: mol_type = other RNA
ccgatttggagctagaatgt

SEQ ID NO: 12137 - RNA, 20 nt, synthetic construct
  source 1..20: mol_type = other RNA
gatgctttcttataaagttc

SEQ ID NO: 12138 - RNA, 20 nt, synthetic construct
  source 1..20: mol_type = other RNA
acaaaaatctatataaatat

SEQ ID NO: 12139 - RNA, 20 nt, synthetic construct
  source 1..20: mol_type = other RNA
cagaagcatgaacaaacctc

SEQ ID NO: 12140 - RNA, 20 nt, synthetic construct
  source 1..20: mol_type = other RNA
ggcttctttccttaatatat

SEQ ID NO: 12141 - RNA, 20 nt, synthetic construct
  source 1..20: mol_type = other RNA
aagtgtatagtctgtatgag

SEQ ID NO: 12142 - RNA, 20 nt, synthetic construct
  source 1..20: mol_type = other RNA
gtatgagtccattcatgtga

SEQ ID NO: 12143 - RNA, 20 nt, synthetic construct
  source 1..20: mol_type = other RNA
attcatgtgagtttatagaa

SEQ ID NO: 12144 - RNA, 20 nt, synthetic construct
  source 1..20: mol_type = other RNA
aatgctattggtttctttca

SEQ ID NO: 12145 - RNA, 20 nt, synthetic construct
  source 1..20: mol_type = other RNA
agttgtgttaaaaaccactg

SEQ ID NO: 12146 - RNA, 20 nt, synthetic construct
  source 1..20: mol_type = other RNA
caagcccagatcccccattt

SEQ ID NO: 12147 - RNA, 20 nt, synthetic construct
  source 1..20: mol_type = other RNA
ctgtagagactctacacatg

SEQ ID NO: 12148 - RNA, 20 nt, synthetic construct
  source 1..20: mol_type = other RNA
catgtgtagagtctctacag

SEQ ID NO: 12149 - RNA, 20 nt, synthetic construct
  source 1..20: mol_type = other RNA
ctacagagaccgtgttggat

SEQ ID NO: 12150 - RNA, 20 nt, synthetic construct
  source 1..20: mol_type = other RNA
gagaaaacttggaacgtatt

SEQ ID NO: 12151 - RNA, 20 nt, synthetic construct
  source 1..20: mol_type = other RNA
tgaatgtgaggattctgaga

SEQ ID NO: 12152 - RNA, 20 nt, synthetic construct
  source 1..20: mol_type = other RNA
tcacctgctgtgcctcttac

SEQ ID NO: 12153 - RNA, 20 nt, synthetic construct
  source 1..20: mol_type = other RNA
gaaaacaatgcagtaagagg

SEQ ID NO: 12154 - RNA, 20 nt, synthetic construct
  source 1..20: mol_type = other RNA
agtggctatggatgagtcag

SEQ ID NO: 12155 - RNA, 20 nt, synthetic construct
  source 1..20: mol_type = other RNA
acctagccgtctccctttat

SEQ ID NO: 12156 - RNA, 20 nt, synthetic construct
  source 1..20: mol_type = other RNA
ccctttatgccttgggtccc

SEQ ID NO: 12157 - RNA, 20 nt, synthetic construct
  source 1..20: mol_type = other RNA
cgctgttctttcaactcatc

SEQ ID NO: 12158 - RNA, 20 nt, synthetic construct
  source 1..20: mol_type = other RNA
cagagtggctgcagccagca

SEQ ID NO: 12159 - RNA, 20 nt, synthetic construct
  source 1..20: mol_type = other RNA
atcctctgctggctgcagcc

SEQ ID NO: 12160 - RNA, 20 nt, synthetic construct
  source 1..20: mol_type = other RNA
tgcccatgaacccatcctag

SEQ ID NO: 12161 - RNA, 20 nt, synthetic construct
  source 1..20: mol_type = other RNA
acaggacttataaaagcttc

SEQ ID NO: 12162 - RNA, 20 nt, synthetic construct
  source 1..20: mol_type = other RNA
tgtagacccaaacccacttg

SEQ ID NO: 12163 - RNA, 20 nt, synthetic construct
  source 1..20: mol_type = other RNA
ctctctctataagactatat

SEQ ID NO: 12164 - RNA, 20 nt, synthetic construct
  source 1..20: mol_type = other RNA
tatagagagagagacaaaga

SEQ ID NO: 12165 - RNA, 20 nt, synthetic construct
  source 1..20: mol_type = other RNA
agctctttgtctctctctct

SEQ ID NO: 12166 - RNA, 20 nt, synthetic construct
  source 1..20: mol_type = other RNA
gtctagctctttgtctctct

SEQ ID NO: 12167 - RNA, 20 nt, synthetic construct
  source 1..20: mol_type = other RNA
tttattctggaggaaagtat

SEQ ID NO: 12168 - RNA, 20 nt, synthetic construct
  source 1..20: mol_type = other RNA
gtacaagaaaggatcagaat

SEQ ID NO: 12169 - RNA, 20 nt, synthetic construct
  source 1..20: mol_type = other RNA
acagttgtttaaaagttgaa

SEQ ID NO: 12170 - RNA, 20 nt, synthetic construct
  source 1..20: mol_type = other RNA
tcagcttcaacttttaaaca

SEQ ID NO: 12171 - RNA, 20 nt, synthetic construct
  source 1..20: mol_type = other RNA
ccagagatgggagaatattc

SEQ ID NO: 12172 - RNA, 20 nt, synthetic construct
  source 1..20: mol_type = other RNA
ggccactgcaaatttcaaaa

SEQ ID NO: 12173 - RNA, 20 nt, synthetic construct
  source 1..20: mol_type = other RNA
ggttgcagtactcccacctg

SEQ ID NO: 12174 - RNA, 20 nt, synthetic construct
  source 1..20: mol_type = other RNA
ggtgggagtactgcaacctg

SEQ ID NO: 12175 - RNA, 20 nt, synthetic construct
  source 1..20: mol_type = other RNA
ctggacatcgtgtcaggttg

SEQ ID NO: 12176 - RNA, 20 nt, synthetic construct
  source 1..20: mol_type = other RNA
agtgacagaatcgagtgtcc

SEQ ID NO: 12177 - RNA, 20 nt, synthetic construct
  source 1..20: mol_type = other RNA
aaccacaaatttcttacctt

SEQ ID NO: 12178 - RNA, 20 nt, synthetic construct
  source 1..20: mol_type = other RNA
gcaatgtggaggaaagcctc

SEQ ID NO: 12179 - RNA, 20 nt, synthetic construct
  source 1..20: mol_type = other RNA
ttaggaagggcacggtgtct

SEQ ID NO: 12180 - RNA, 20 nt, synthetic construct
  source 1..20: mol_type = other RNA
gtgcccttcctaaagacacc

SEQ ID NO: 12181 - RNA, 20 nt, synthetic construct
  source 1..20: mol_type = other RNA
ttaggaagggcacagacccg

SEQ ID NO: 12182 - RNA, 20 nt, synthetic construct
  source 1..20: mol_type = other RNA
agtgccctggcgggtctgtg

SEQ ID NO: 12183 - RNA, 20 nt, synthetic construct
  source 1..20: mol_type = other RNA
tttcagtgtcctagccaaaa

SEQ ID NO: 12184 - RNA, 20 nt, synthetic construct
  source 1..20: mol_type = other RNA
tagccaaaatggatattcta

SEQ ID NO: 12185 - RNA, 20 nt, synthetic construct
  source 1..20: mol_type = other RNA
actttaaatcactggaaagg

SEQ ID NO: 12186 - RNA, 20 nt, synthetic construct
  source 1..20: mol_type = other RNA
ccttaggtttctctaggata

SEQ ID NO: 12187 - RNA, 20 nt, synthetic construct
  source 1..20: mol_type = other RNA
tggggctgcatagcaggagg

SEQ ID NO: 12188 - RNA, 20 nt, synthetic construct
  source 1..20: mol_type = other RNA
ctccctggcctatctcagtc

SEQ ID NO: 12189 - RNA, 20 nt, synthetic construct
  source 1..20: mol_type = other RNA
ttcacaggctctgttcacct

SEQ ID NO: 12190 - RNA, 20 nt, synthetic construct
  source 1..20: mol_type = other RNA
acagaagaagaggaagagaa

SEQ ID NO: 12191 - RNA, 20 nt, synthetic construct
  source 1..20: mol_type = other RNA
tgaattgtaacaaagcagaa

SEQ ID NO: 12192 - RNA, 20 nt, synthetic construct
  source 1..20: mol_type = other RNA
ctaaccctccttgagaaaca

SEQ ID NO: 12193 - RNA, 20 nt, synthetic construct
  source 1..20: mol_type = other RNA
ttgcctgcactcctaaatgt

SEQ ID NO: 12194 - RNA, 20 nt, synthetic construct
  source 1..20: mol_type = other RNA
agggaaatgcgcaagggtct

SEQ ID NO: 12195 - RNA, 20 nt, synthetic construct
  source 1..20: mol_type = other RNA
ggggccgacacaagaccctt

SEQ ID NO: 12196 - RNA, 20 nt, synthetic construct
  source 1..20: mol_type = other RNA
gtcaggggccgacacaagac

SEQ ID NO: 12197 - RNA, 20 nt, synthetic construct
  source 1..20: mol_type = other RNA
tgtgtcggcccctgactgac

SEQ ID NO: 12198 - RNA, 20 nt, synthetic construct
  source 1..20: mol_type = other RNA
gcccctgactgaccaccagt

SEQ ID NO: 12199 - RNA, 20 nt, synthetic construct
  source 1..20: mol_type = other RNA
cctcctacagcctgcaccaa

SEQ ID NO: 12200 - RNA, 20 nt, synthetic construct
  source 1..20: mol_type = other RNA
tctgccctgtggttctcatg

SEQ ID NO: 12201 - RNA, 20 nt, synthetic construct
  source 1..20: mol_type = other RNA
agcattctcctctgttcttt

SEQ ID NO: 12202 - RNA, 20 nt, synthetic construct
  source 1..20: mol_type = other RNA
tttcacatccttttgctact

SEQ ID NO: 12203 - RNA, 20 nt, synthetic construct
  source 1..20: mol_type = other RNA
catactggacagtagcctct

SEQ ID NO: 12204 - RNA, 20 nt, synthetic construct
  source 1..20: mol_type = other RNA
agtatgtgacataaattgtc

SEQ ID NO: 12205 - RNA, 20 nt, synthetic construct
  source 1..20: mol_type = other RNA
cccatgtttctctgctcatg

SEQ ID NO: 12206 - RNA, 20 nt, synthetic construct
  source 1..20: mol_type = other RNA
atcaccatggtagcaatcct

SEQ ID NO: 12207 - RNA, 20 nt, synthetic construct
  source 1..20: mol_type = other RNA
aggattgctaccatggtgat

SEQ ID NO: 12208 - RNA, 20 nt, synthetic construct
  source 1..20: mol_type = other RNA
ttcctgtgacagtggtggag

SEQ ID NO: 12209 - RNA, 20 nt, synthetic construct
  source 1..20: mol_type = other RNA
caggaaggacctgtcaatct

SEQ ID NO: 12210 - RNA, 20 nt, synthetic construct
  source 1..20: mol_type = other RNA
tctatgataccacactggca

SEQ ID NO: 12211 - RNA, 20 nt, synthetic construct
  source 1..20: mol_type = other RNA
tctgatgccagtgtggtatc

SEQ ID NO: 12212 - RNA, 20 nt, synthetic construct
  source 1..20: mol_type = other RNA
tctaaccaatatttgagttg

SEQ ID NO: 12213 - RNA, 20 nt, synthetic construct
  source 1..20: mol_type = other RNA
ctaggaagtgagcttaaagc

SEQ ID NO: 12214 - RNA, 20 nt, synthetic construct
  source 1..20: mol_type = other RNA
aagagaaatttgtccctagg

SEQ ID NO: 12215 - RNA, 20 nt, synthetic construct
  source 1..20: mol_type = other RNA
tgagacattttgccaaaatg

SEQ ID NO: 12216 - RNA, 20 nt, synthetic construct
  source 1..20: mol_type = other RNA
caggacctttgcttttgagc

SEQ ID NO: 12217 - RNA, 20 nt, synthetic construct
  source 1..20: mol_type = other RNA
aagagaagagaaattttagg

SEQ ID NO: 12218 - RNA, 20 nt, synthetic construct
  source 1..20: mol_type = other RNA
tattaatgtaaagctcagaa

SEQ ID NO: 12219 - RNA, 20 nt, synthetic construct
  source 1..20: mol_type = other RNA
tttatcttctgagctttaca

SEQ ID NO: 12220 - RNA, 20 nt, synthetic construct
  source 1..20: mol_type = other RNA
tctttcactcgtgcaattct

SEQ ID NO: 12221 - RNA, 20 nt, synthetic construct
  source 1..20: mol_type = other RNA
ttctaaatttcaattcccga

SEQ ID NO: 12222 - RNA, 20 nt, synthetic construct
  source 1..20: mol_type = other RNA
tgggtaataagtaaaaaaaa

SEQ ID NO: 12223 - RNA, 20 nt, synthetic construct
  source 1..20: mol_type = other RNA
gaatatttatatacttgtgt

SEQ ID NO: 12224 - RNA, 20 nt, synthetic construct
  source 1..20: mol_type = other RNA
gagtatttttatatatttta

SEQ ID NO: 12225 - RNA, 20 nt, synthetic construct
  source 1..20: mol_type = other RNA
tttcagaccactggtgcttc

SEQ ID NO: 12226 - RNA, 20 nt, synthetic construct
  source 1..20: mol_type = other RNA
tggcaacacatgtcctttca

SEQ ID NO: 12227 - RNA, 20 nt, synthetic construct
  source 1..20: mol_type = other RNA
gaaaggacatgtgttgccag

SEQ ID NO: 12228 - RNA, 20 nt, synthetic construct
  source 1..20: mol_type = other RNA
ggaggtacacaaacgctgaa

SEQ ID NO: 12229 - RNA, 20 nt, synthetic construct
  source 1..20: mol_type = other RNA
attttacttttcagcgtttg

SEQ ID NO: 12230 - RNA, 20 nt, synthetic construct
  source 1..20: mol_type = other RNA
atgtacttgtccattttact

SEQ ID NO: 12231 - RNA, 20 nt, synthetic construct
  source 1..20: mol_type = other RNA
tttacttccaaaaggctgtt

SEQ ID NO: 12232 - RNA, 20 nt, synthetic construct
  source 1..20: mol_type = other RNA
tcttgggctccatctctttt

SEQ ID NO: 12233 - RNA, 20 nt, synthetic construct
  source 1..20: mol_type = other RNA
ctcagttcatcaagactgct

SEQ ID NO: 12234 - RNA, 20 nt, synthetic construct
  source 1..20: mol_type = other RNA
tgatgaactgagagacacca

SEQ ID NO: 12235 - RNA, 20 nt, synthetic construct
  source 1..20: mol_type = other RNA
tgtacctagaagtcacctca

SEQ ID NO: 12236 - RNA, 20 nt, synthetic construct
  source 1..20: mol_type = other RNA
cctcagtgtaatataaatct

SEQ ID NO: 12237 - RNA, 20 nt, synthetic construct
  source 1..20: mol_type = other RNA
tactttcattgtggaatcac

SEQ ID NO: 12238 - RNA, 20 nt, synthetic construct
  source 1..20: mol_type = other RNA
cttttctagctggtaagaac

SEQ ID NO: 12239 - RNA, 20 nt, synthetic construct
  source 1..20: mol_type = other RNA
ctactgaatgcccaagattt

SEQ ID NO: 12240 - RNA, 20 nt, synthetic construct
  source 1..20: mol_type = other RNA
ttctgacttgcttttcaatt

SEQ ID NO: 12241 - RNA, 20 nt, synthetic construct
  source 1..20: mol_type = other RNA
gaaagaccaaaatcctctca

SEQ ID NO: 12242 - RNA, 20 nt, synthetic construct
  source 1..20: mol_type = other RNA
catattgtggatgccagata

SEQ ID NO: 12243 - RNA, 20 nt, synthetic construct
  source 1..20: mol_type = other RNA
agtaaatttttaaatttatg

SEQ ID NO: 12244 - RNA, 20 nt, synthetic construct
  source 1..20: mol_type = other RNA
atttgtattgaatgattttt

SEQ ID NO: 12245 - RNA, 20 nt, synthetic construct
  source 1..20: mol_type = other RNA
tttctgggtctatttgtatt

SEQ ID NO: 12246 - RNA, 20 nt, synthetic construct
  source 1..20: mol_type = other RNA
aaaatcaaagaaagctagga

SEQ ID NO: 12247 - RNA, 20 nt, synthetic construct
  source 1..20: mol_type = other RNA
tttgtgtaactgttccttta

SEQ ID NO: 12248 - RNA, 20 nt, synthetic construct
  source 1..20: mol_type = other RNA
gaaacaataaagtaacatct

SEQ ID NO: 12249 - RNA, 20 nt, synthetic construct
  source 1..20: mol_type = other RNA
gccacgatccctcacctctt

SEQ ID NO: 12250 - RNA, 20 nt, synthetic construct
  source 1..20: mol_type = other RNA
tgcctcctgtctgccacgat

SEQ ID NO: 12251 - RNA, 20 nt, synthetic construct
  source 1..20: mol_type = other RNA
agagctgcaatctagtcctg

SEQ ID NO: 12252 - RNA, 20 nt, synthetic construct
  source 1..20: mol_type = other RNA
atatggggctaaaattcaca

SEQ ID NO: 12253 - RNA, 20 nt, synthetic construct
  source 1..20: mol_type = other RNA
gttcttgcagtcaatatggg

SEQ ID NO: 12254 - RNA, 20 nt, synthetic construct
  source 1..20: mol_type = other RNA
tctcaggattgctggtctgt

SEQ ID NO: 12255 - RNA, 20 nt, synthetic construct
  source 1..20: mol_type = other RNA
gtgggtcctctcaggattgc

SEQ ID NO: 12256 - RNA, 20 nt, synthetic construct
  source 1..20: mol_type = other RNA
gcttccttcacacggtctgt

SEQ ID NO: 12257 - RNA, 20 nt, synthetic construct
  source 1..20: mol_type = other RNA
cccttatcctgcaggagcag

SEQ ID NO: 12258 - RNA, 20 nt, synthetic construct
  source 1..20: mol_type = other RNA
gtttgcaggagaagttccca

SEQ ID NO: 12259 - RNA, 20 nt, synthetic construct
  source 1..20: mol_type = other RNA
tctctgctgcttcctctacc

SEQ ID NO: 12260 - RNA, 20 nt, synthetic construct
  source 1..20: mol_type = other RNA
tccatgtggagttttaccct

SEQ ID NO: 12261 - RNA, 20 nt, synthetic construct
  source 1..20: mol_type = other RNA
gcaaaccagattcatgccct

SEQ ID NO: 12262 - RNA, 20 nt, synthetic construct
  source 1..20: mol_type = other RNA
ttcccccacctgtgaagtct

SEQ ID NO: 12263 - RNA, 20 nt, synthetic construct
  source 1..20: mol_type = other RNA
ggcttgaaaacttgcctgag

SEQ ID NO: 12264 - RNA, 20 nt, synthetic construct
  source 1..20: mol_type = other RNA
gtttccaggtggggggaaag

SEQ ID NO: 12265 - RNA, 20 nt, synthetic construct
  source 1..20: mol_type = other RNA
tactcccaccatgcccccaa

SEQ ID NO: 12266 - RNA, 20 nt, synthetic construct
  source 1..20: mol_type = other RNA
caggcctcacccagcaccca

SEQ ID NO: 12267 - RNA, 20 nt, synthetic construct
  source 1..20: mol_type = other RNA
gtcacaggcctcacccagca

SEQ ID NO: 12268 - RNA, 20 nt, synthetic construct
  source 1..20: mol_type = other RNA
gggaagtggagggaagctgt

SEQ ID NO: 12269 - RNA, 20 nt, synthetic construct
  source 1..20: mol_type = other RNA
tctgagttgtcggggaagtg

SEQ ID NO: 12270 - RNA, 20 nt, synthetic construct
  source 1..20: mol_type = other RNA
ctggagttgtgtacctagga

SEQ ID NO: 12271 - RNA, 20 nt, synthetic construct
  source 1..20: mol_type = other RNA
tactgaagcttctgtatggt

SEQ ID NO: 12272 - RNA, 20 nt, synthetic construct
  source 1..20: mol_type = other RNA
gagctcagactttccttggg

SEQ ID NO: 12273 - RNA, 20 nt, synthetic construct
  source 1..20: mol_type = other RNA
gagctcagacacgcctagtc

SEQ ID NO: 12274 - RNA, 20 nt, synthetic construct
  source 1..20: mol_type = other RNA
cacccccaactgatggtcct

SEQ ID NO: 12275 - RNA, 20 nt, synthetic construct
  source 1..20: mol_type = other RNA
ttccctacccaccctggtag

SEQ ID NO: 12276 - RNA, 20 nt, synthetic construct
  source 1..20: mol_type = other RNA
tctgctaccagggtgggtag

SEQ ID NO: 12277 - RNA, 20 nt, synthetic construct
  source 1..20: mol_type = other RNA
ctctccacactagtatagct

SEQ ID NO: 12278 - RNA, 20 nt, synthetic construct
  source 1..20: mol_type = other RNA
attgcaccctcctccacctc

SEQ ID NO: 12279 - RNA, 20 nt, synthetic construct
  source 1..20: mol_type = other RNA
ctcagctgtggataccagtg

SEQ ID NO: 12280 - RNA, 20 nt, synthetic construct
  source 1..20: mol_type = other RNA
tgtgatgtgaaccatctatg

SEQ ID NO: 12281 - RNA, 20 nt, synthetic construct
  source 1..20: mol_type = other RNA
gtacagagtcctgtgatgtg

SEQ ID NO: 12282 - RNA, 20 nt, synthetic construct
  source 1..20: mol_type = other RNA
ccagtaccagcccagagctg

SEQ ID NO: 12283 - RNA, 20 nt, synthetic construct
  source 1..20: mol_type = other RNA
acccagctctgggctggtac

SEQ ID NO: 12284 - RNA, 20 nt, synthetic construct
  source 1..20: mol_type = other RNA
tgccacctagcaagtctacc

SEQ ID NO: 12285 - RNA, 20 nt, synthetic construct
  source 1..20: mol_type = other RNA
tctgggtcttgccacctagc

SEQ ID NO: 12286 - RNA, 20 nt, synthetic construct
  source 1..20: mol_type = other RNA
gagggaaggtagggctgaag

SEQ ID NO: 12287 - RNA, 20 nt, synthetic construct
  source 1..20: mol_type = other RNA
acccaaatgagaaggaacca

SEQ ID NO: 12288 - RNA, 20 nt, synthetic construct
  source 1..20: mol_type = other RNA
tattaccagggttggttttc

SEQ ID NO: 12289 - RNA, 20 nt, synthetic construct
  source 1..20: mol_type = other RNA
ctccctgattagcttaataa

SEQ ID NO: 12290 - RNA, 20 nt, synthetic construct
  source 1..20: mol_type = other RNA
actgaattttttattgtttt

SEQ ID NO: 12291 - RNA, 20 nt, synthetic construct
  source 1..20: mol_type = other RNA
aaagtctactgaatttttta

SEQ ID NO: 12292 - RNA, 20 nt, synthetic construct
  source 1..20: mol_type = other RNA
catttccaaaggtgtgtcca

SEQ ID NO: 12293 - RNA, 20 nt, synthetic construct
  source 1..20: mol_type = other RNA
cagcaatagaactgaacaag

SEQ ID NO: 12294 - RNA, 20 nt, synthetic construct
  source 1..20: mol_type = other RNA
ttgagctctgaatttatttt

SEQ ID NO: 12295 - RNA, 20 nt, synthetic construct
  source 1..20: mol_type = other RNA
ttgtctttgagctctgaatt

SEQ ID NO: 12296 - RNA, 20 nt, synthetic construct
  source 1..20: mol_type = other RNA
ttgttggattgggttaattt

SEQ ID NO: 12297 - RNA, 20 nt, synthetic construct
  source 1..20: mol_type = other RNA
tttaacataatcccagacat

SEQ ID NO: 12298 - RNA, 20 nt, synthetic construct
  source 1..20: mol_type = other RNA
gggattatgttaaatgacca

SEQ ID NO: 12299 - RNA, 20 nt, synthetic construct
  source 1..20: mol_type = other RNA
ttttcctcaggagccacgat

SEQ ID NO: 12300 - RNA, 20 nt, synthetic construct
  source 1..20: mol_type = other RNA
agcaaggccaggtaagtttt

SEQ ID NO: 12301 - RNA, 20 nt, synthetic construct
  source 1..20: mol_type = other RNA
aggtgtccagcaaggccagg

SEQ ID NO: 12302 - RNA, 20 nt, synthetic construct
  source 1..20: mol_type = other RNA
taactttgcataacctgatg

SEQ ID NO: 12303 - RNA, 20 nt, synthetic construct
  source 1..20: mol_type = other RNA
cacagctcttaagattcttg

SEQ ID NO: 12304 - RNA, 20 nt, synthetic construct
  source 1..20: mol_type = other RNA
agaattttgtatccagcgaa

SEQ ID NO: 12305 - RNA, 20 nt, synthetic construct
  source 1..20: mol_type = other RNA
aaaaacgactgtatctttcc

SEQ ID NO: 12306 - RNA, 20 nt, synthetic construct
  source 1..20: mol_type = other RNA
tttttggacaaacaaatgct

SEQ ID NO: 12307 - RNA, 20 nt, synthetic construct
  source 1..20: mol_type = other RNA
ccactagaagaactgctaaa

SEQ ID NO: 12308 - RNA, 20 nt, synthetic construct
  source 1..20: mol_type = other RNA
tgtgtgatttatgctttaaa

SEQ ID NO: 12309 - RNA, 20 nt, synthetic construct
  source 1..20: mol_type = other RNA
gccgctccccgtgagatcaa

SEQ ID NO: 12310 - RNA, 20 nt, synthetic construct
  source 1..20: mol_type = other RNA
tttctgcatttccaaccaag

SEQ ID NO: 12311 - RNA, 20 nt, synthetic construct
  source 1..20: mol_type = other RNA
caatgagatgagccgggtac

SEQ ID NO: 12312 - RNA, 20 nt, synthetic construct
  source 1..20: mol_type = other RNA
aaccagtcccaatgagatga

SEQ ID NO: 12313 - RNA, 20 nt, synthetic construct
  source 1..20: mol_type = other RNA
ccctctgtgggctgcaccca

SEQ ID NO: 12314 - RNA, 20 nt, synthetic construct
  source 1..20: mol_type = other RNA
cctcacctgggaagtggaag

SEQ ID NO: 12315 - RNA, 20 nt, synthetic construct
  source 1..20: mol_type = other RNA
gggaactccctcccctagcc

SEQ ID NO: 12316 - RNA, 20 nt, synthetic construct
  source 1..20: mol_type = other RNA
ctcacggcttcctttggcta

SEQ ID NO: 12317 - RNA, 20 nt, synthetic construct
  source 1..20: mol_type = other RNA
tcacggcacagtccctcacg

SEQ ID NO: 12318 - RNA, 20 nt, synthetic construct
  source 1..20: mol_type = other RNA
tcaggttgcaaagaccgtgg

SEQ ID NO: 12319 - RNA, 20 nt, synthetic construct
  source 1..20: mol_type = other RNA
ttgcaacctgaagaccagga

SEQ ID NO: 12320 - RNA, 20 nt, synthetic construct
  source 1..20: mol_type = other RNA
gcccaaatgccagcccagtt

SEQ ID NO: 12321 - RNA, 20 nt, synthetic construct
  source 1..20: mol_type = other RNA
tgctggcattccagggacca

SEQ ID NO: 12322 - RNA, 20 nt, synthetic construct
  source 1..20: mol_type = other RNA
ctggaatgccagcaagacag

SEQ ID NO: 12323 - RNA, 20 nt, synthetic construct
  source 1..20: mol_type = other RNA
ttctcagtggatcccacccc

SEQ ID NO: 12324 - RNA, 20 nt, synthetic construct
  source 1..20: mol_type = other RNA
acttcagactgctgtgctgg

SEQ ID NO: 12325 - RNA, 20 nt, synthetic construct
  source 1..20: mol_type = other RNA
caggtcaacttcagactgct

SEQ ID NO: 12326 - RNA, 20 nt, synthetic construct
  source 1..20: mol_type = other RNA
gaagttgacctgggacgctc

SEQ ID NO: 12327 - RNA, 20 nt, synthetic construct
  source 1..20: mol_type = other RNA
gaagcttatagataaaactc

SEQ ID NO: 12328 - RNA, 20 nt, synthetic construct
  source 1..20: mol_type = other RNA
cagggagatgggagttttat

SEQ ID NO: 12329 - RNA, 20 nt, synthetic construct
  source 1..20: mol_type = other RNA
gctggagctgcactcacagc

SEQ ID NO: 12330 - RNA, 20 nt, synthetic construct
  source 1..20: mol_type = other RNA
cttatcagagctctagtgct

SEQ ID NO: 12331 - RNA, 20 nt, synthetic construct
  source 1..20: mol_type = other RNA
gtcccttatcagagctctag

SEQ ID NO: 12332 - RNA, 20 nt, synthetic construct
  source 1..20: mol_type = other RNA
tggtttcagaagataataag

SEQ ID NO: 12333 - RNA, 20 nt, synthetic construct
  source 1..20: mol_type = other RNA
gaggaattgctaactacagt

SEQ ID NO: 12334 - RNA, 20 nt, synthetic construct
  source 1..20: mol_type = other RNA
tttatgttcttctctaaact

SEQ ID NO: 12335 - RNA, 20 nt, synthetic construct
  source 1..20: mol_type = other RNA
tgaagttctcgtgctgtgtt

SEQ ID NO: 12336 - RNA, 20 nt, synthetic construct
  source 1..20: mol_type = other RNA
catacttggaggatttgttc

SEQ ID NO: 12337 - RNA, 20 nt, synthetic construct
  source 1..20: mol_type = other RNA
tgctaggttggggaagttct

SEQ ID NO: 12338 - RNA, 20 nt, synthetic construct
  source 1..20: mol_type = other RNA
tcaggttgctcttcttgagg

SEQ ID NO: 12339 - RNA, 20 nt, synthetic construct
  source 1..20: mol_type = other RNA
gattcaccaaggttgaaatg

SEQ ID NO: 12340 - RNA, 20 nt, synthetic construct
  source 1..20: mol_type = other RNA
gatggggttccctttgtggg

SEQ ID NO: 12341 - RNA, 20 nt, synthetic construct
  source 1..20: mol_type = other RNA
tgggatggggggagtgggga

SEQ ID NO: 12342 - RNA, 20 nt, synthetic construct
  source 1..20: mol_type = other RNA
atgtactctcattgttcaat

SEQ ID NO: 12343 - RNA, 20 nt, synthetic construct
  source 1..20: mol_type = other RNA
ttgtgatagtttgctgagaa

SEQ ID NO: 12344 - RNA, 20 nt, synthetic construct
  source 1..20: mol_type = other RNA
tttgtagggatgtggatgaa

SEQ ID NO: 12345 - RNA, 20 nt, synthetic construct
  source 1..20: mol_type = other RNA
tccttctttatggctgcata

SEQ ID NO: 12346 - RNA, 20 nt, synthetic construct
  source 1..20: mol_type = other RNA
atcaatggtagactggatta

SEQ ID NO: 12347 - RNA, 20 nt, synthetic construct
  source 1..20: mol_type = other RNA
accattgatggacgtttgtg

SEQ ID NO: 12348 - RNA, 20 nt, synthetic construct
  source 1..20: mol_type = other RNA
ttgctattgtgaatagtgcc

SEQ ID NO: 12349 - RNA, 20 nt, synthetic construct
  source 1..20: mol_type = other RNA
ttatagcagcatgatttata

SEQ ID NO: 12350 - RNA, 20 nt, synthetic construct
  source 1..20: mol_type = other RNA
aatggtatttctagttctaa

SEQ ID NO: 12351 - RNA, 20 nt, synthetic construct
  source 1..20: mol_type = other RNA
tccacaatggttgaactagt

SEQ ID NO: 12352 - RNA, 20 nt, synthetic construct
  source 1..20: mol_type = other RNA
caccaccagtgtaaaaatgt

SEQ ID NO: 12353 - RNA, 20 nt, synthetic construct
  source 1..20: mol_type = other RNA
ggaaacaacagatgctagag

SEQ ID NO: 12354 - RNA, 20 nt, synthetic construct
  source 1..20: mol_type = other RNA
agagacacatgaaaaagtgc

SEQ ID NO: 12355 - RNA, 20 nt, synthetic construct
  source 1..20: mol_type = other RNA
cttgactgcataaaagtttt

SEQ ID NO: 12356 - RNA, 20 nt, synthetic construct
  source 1..20: mol_type = other RNA
gttaatatcctttgccaact

SEQ ID NO: 12357 - RNA, 20 nt, synthetic construct
  source 1..20: mol_type = other RNA
gatgggtagattgtaaaaat

SEQ ID NO: 12358 - RNA, 20 nt, synthetic construct
  source 1..20: mol_type = other RNA
attttggcttttgttgctat

SEQ ID NO: 12359 - RNA, 20 nt, synthetic construct
  source 1..20: mol_type = other RNA
tgaagtccttgcccatgcct

SEQ ID NO: 12360 - RNA, 20 nt, synthetic construct
  source 1..20: mol_type = other RNA
ttgcccatgcctatgtcctg

SEQ ID NO: 12361 - RNA, 20 nt, synthetic construct
  source 1..20: mol_type = other RNA
tgaatggtattgcttaggtt

SEQ ID NO: 12362 - RNA, 20 nt, synthetic construct
  source 1..20: mol_type = other RNA
aacatttaagtctttaatcc

SEQ ID NO: 12363 - RNA, 20 nt, synthetic construct
  source 1..20: mol_type = other RNA
ttaatccatcttgaattaat

SEQ ID NO: 12364 - RNA, 20 nt, synthetic construct
  source 1..20: mol_type = other RNA
ggtttgtcatagatcagatg

SEQ ID NO: 12365 - RNA, 20 nt, synthetic construct
  source 1..20: mol_type = other RNA
tagatcagatggttgtagat

SEQ ID NO: 12366 - RNA, 20 nt, synthetic construct
  source 1..20: mol_type = other RNA
atatctctgttttggtacca

SEQ ID NO: 12367 - RNA, 20 nt, synthetic construct
  source 1..20: mol_type = other RNA
ggcagagtgatgcctccagc

SEQ ID NO: 12368 - RNA, 20 nt, synthetic construct
  source 1..20: mol_type = other RNA
tggcaatgcatgctcttttt

SEQ ID NO: 12369 - RNA, 20 nt, synthetic construct
  source 1..20: mol_type = other RNA
ttggtagcttgatggggatg

SEQ ID NO: 12370 - RNA, 20 nt, synthetic construct
  source 1..20: mol_type = other RNA
tcttttatttcattaagcag

SEQ ID NO: 12371 - RNA, 20 nt, synthetic construct
  source 1..20: mol_type = other RNA
ttcccatcccttgtaagttg

SEQ ID NO: 12372 - RNA, 20 nt, synthetic construct
  source 1..20: mol_type = other RNA
tttgtagggacatggatgaa

SEQ ID NO: 12373 - RNA, 20 nt, synthetic construct
  source 1..20: mol_type = other RNA
ctacaaaggacatgaagtca

SEQ ID NO: 12374 - RNA, 20 nt, synthetic construct
  source 1..20: mol_type = other RNA
tgtatgggaatgcttgtgat

SEQ ID NO: 12375 - RNA, 20 nt, synthetic construct
  source 1..20: mol_type = other RNA
caagatacaaaatcaatgtg

SEQ ID NO: 12376 - RNA, 20 nt, synthetic construct
  source 1..20: mol_type = other RNA
gagaagatggggttttctaa

SEQ ID NO: 12377 - RNA, 20 nt, synthetic construct
  source 1..20: mol_type = other RNA
ctgtttgcagatgacatgat

SEQ ID NO: 12378 - RNA, 20 nt, synthetic construct
  source 1..20: mol_type = other RNA
tctgcaaacagggacaattt

SEQ ID NO: 12379 - RNA, 20 nt, synthetic construct
  source 1..20: mol_type = other RNA
tgtgccagttttcaaaggga

SEQ ID NO: 12380 - RNA, 20 nt, synthetic construct
  source 1..20: mol_type = other RNA
taaatagctcttattatttt

SEQ ID NO: 12381 - RNA, 20 nt, synthetic construct
  source 1..20: mol_type = other RNA
catcaatacatagtttattg

SEQ ID NO: 12382 - RNA, 20 nt, synthetic construct
  source 1..20: mol_type = other RNA
aaggccttttctgcatctat

SEQ ID NO: 12383 - RNA, 20 nt, synthetic construct
  source 1..20: mol_type = other RNA
ttggttctgtttatatgatg

SEQ ID NO: 12384 - RNA, 20 nt, synthetic construct
  source 1..20: mol_type = other RNA
aaaattctcatttttgttgt

SEQ ID NO: 12385 - RNA, 20 nt, synthetic construct
  source 1..20: mol_type = other RNA
ctgccaggatttggtatcag

SEQ ID NO: 12386 - RNA, 20 nt, synthetic construct
  source 1..20: mol_type = other RNA
aggagagattcatagccgaa

SEQ ID NO: 12387 - RNA, 20 nt, synthetic construct
  source 1..20: mol_type = other RNA
attcaaggattcaatttctt

SEQ ID NO: 12388 - RNA, 20 nt, synthetic construct
  source 1..20: mol_type = other RNA
tggtagggtgtatgtgtcca

SEQ ID NO: 12389 - RNA, 20 nt, synthetic construct
  source 1..20: mol_type = other RNA
aggaatttttccatttcttc

SEQ ID NO: 12390 - RNA, 20 nt, synthetic construct
  source 1..20: mol_type = other RNA
tgctagtggtctatcaattt

SEQ ID NO: 12391 - RNA, 20 nt, synthetic construct
  source 1..20: mol_type = other RNA
atcaattttgttgatctttt

SEQ ID NO: 12392 - RNA, 20 nt, synthetic construct
  source 1..20: mol_type = other RNA
ctatctccttcagttctgct

SEQ ID NO: 12393 - RNA, 20 nt, synthetic construct
  source 1..20: mol_type = other RNA
tagttatttcttgccttctg

SEQ ID NO: 12394 - RNA, 20 nt, synthetic construct
  source 1..20: mol_type = other RNA
attttagatctttcctgctt

SEQ ID NO: 12395 - RNA, 20 nt, synthetic construct
  source 1..20: mol_type = other RNA
cagagattctggtatgttgt

SEQ ID NO: 12396 - RNA, 20 nt, synthetic construct
  source 1..20: mol_type = other RNA
ttgttgtcattggtttcaaa

SEQ ID NO: 12397 - RNA, 20 nt, synthetic construct
  source 1..20: mol_type = other RNA
ttggtttcaaagaatatctt

SEQ ID NO: 12398 - RNA, 20 nt, synthetic construct
  source 1..20: mol_type = other RNA
ctcaggtgcaggttgttcag

SEQ ID NO: 12399 - RNA, 20 nt, synthetic construct
  source 1..20: mol_type = other RNA
tagtttgattgcactgtggt

SEQ ID NO: 12400 - RNA, 20 nt, synthetic construct
  source 1..20: mol_type = other RNA
ctcagaccacagtgcaatca

SEQ ID NO: 12401 - RNA, 20 nt, synthetic construct
  source 1..20: mol_type = other RNA
gagagacagtttgttataat

SEQ ID NO: 12402 - RNA, 20 nt, synthetic construct
  source 1..20: mol_type = other RNA
atttcagaataagtgcgatg

SEQ ID NO: 12403 - RNA, 20 nt, synthetic construct
  source 1..20: mol_type = other RNA
attaggtctgcttggtgcag

SEQ ID NO: 12404 - RNA, 20 nt, synthetic construct
  source 1..20: mol_type = other RNA
gcttggtgcagagctgagtt

SEQ ID NO: 12405 - RNA, 20 nt, synthetic construct
  source 1..20: mol_type = other RNA
acattagacagatcaatgag

SEQ ID NO: 12406 - RNA, 20 nt, synthetic construct
  source 1..20: mol_type = other RNA
cattgatctgtctaatgttg

SEQ ID NO: 12407 - RNA, 20 nt, synthetic construct
  source 1..20: mol_type = other RNA
aatgttgacagtggggtgtt

SEQ ID NO: 12408 - RNA, 20 nt, synthetic construct
  source 1..20: mol_type = other RNA
cccattattattgtgtggga

SEQ ID NO: 12409 - RNA, 20 nt, synthetic construct
  source 1..20: mol_type = other RNA
aagtctctttgtaggtctct

SEQ ID NO: 12410 - RNA, 20 nt, synthetic construct
  source 1..20: mol_type = other RNA
ttagagacctacaaagagac

SEQ ID NO: 12411 - RNA, 20 nt, synthetic construct
  source 1..20: mol_type = other RNA
ctttgtaggtctctaaggac

SEQ ID NO: 12412 - RNA, 20 nt, synthetic construct
  source 1..20: mol_type = other RNA
ctaaggacttgctttatgaa

SEQ ID NO: 12413 - RNA, 20 nt, synthetic construct
  source 1..20: mol_type = other RNA
ctttaccattatgtaatggc

SEQ ID NO: 12414 - RNA, 20 nt, synthetic construct
  source 1..20: mol_type = other RNA
cttttgatctttgttagttt

SEQ ID NO: 12415 - RNA, 20 nt, synthetic construct
  source 1..20: mol_type = other RNA
ctgataaaacagactttaaa

SEQ ID NO: 12416 - RNA, 20 nt, synthetic construct
  source 1..20: mol_type = other RNA
gttttatcagagactaggat

SEQ ID NO: 12417 - RNA, 20 nt, synthetic construct
  source 1..20: mol_type = other RNA
ctgcacgtgagatgtgtctt

SEQ ID NO: 12418 - RNA, 20 nt, synthetic construct
  source 1..20: mol_type = other RNA
tcagaatacagcacactgat

SEQ ID NO: 12419 - RNA, 20 nt, synthetic construct
  source 1..20: mol_type = other RNA
agatccatcagtgtgctgta

SEQ ID NO: 12420 - RNA, 20 nt, synthetic construct
  source 1..20: mol_type = other RNA
gtgtcttttaattggagcat

SEQ ID NO: 12421 - RNA, 20 nt, synthetic construct
  source 1..20: mol_type = other RNA
tttaattggagcatttagcc

SEQ ID NO: 12422 - RNA, 20 nt, synthetic construct
  source 1..20: mol_type = other RNA
tcatgatgttcgctggttat

SEQ ID NO: 12423 - RNA, 20 nt, synthetic construct
  source 1..20: mol_type = other RNA
ccaccaggcctgccttacaa

SEQ ID NO: 12424 - RNA, 20 nt, synthetic construct
  source 1..20: mol_type = other RNA
gtaaaggattttatttctcc

SEQ ID NO: 12425 - RNA, 20 nt, synthetic construct
  source 1..20: mol_type = other RNA
gatgggcttccctttgtggg

SEQ ID NO: 12426 - RNA, 20 nt, synthetic construct
  source 1..20: mol_type = other RNA
ggttacccacaaagggaagc

SEQ ID NO: 12427 - RNA, 20 nt, synthetic construct
  source 1..20: mol_type = other RNA
gattcaccagaaaggtcggg

SEQ ID NO: 12428 - RNA, 20 nt, synthetic construct
  source 1..20: mol_type = other RNA
tggagttactcttctcgagg

SEQ ID NO: 12429 - RNA, 20 nt, synthetic construct
  source 1..20: mol_type = other RNA
ctttcaggtacaccaagcag

SEQ ID NO: 12430 - RNA, 20 nt, synthetic construct
  source 1..20: mol_type = other RNA
tttcacatagtcccatattt

SEQ ID NO: 12431 - RNA, 20 nt, synthetic construct
  source 1..20: mol_type = other RNA
catatttattggaggctttg

SEQ ID NO: 12432 - RNA, 20 nt, synthetic construct
  source 1..20: mol_type = other RNA
cgtagttctcgtgccatggt

SEQ ID NO: 12433 - RNA, 20 nt, synthetic construct
  source 1..20: mol_type = other RNA
tctctatgctgtttatttta

SEQ ID NO: 12434 - RNA, 20 nt, synthetic construct
  source 1..20: mol_type = other RNA
gccattcatctaaacttttt

SEQ ID NO: 12435 - RNA, 20 nt, synthetic construct
  source 1..20: mol_type = other RNA
gaagccttcttctctcaact

SEQ ID NO: 12436 - RNA, 20 nt, synthetic construct
  source 1..20: mol_type = other RNA
ttctctgtccagctttgttc

SEQ ID NO: 12437 - RNA, 20 nt, synthetic construct
  source 1..20: mol_type = other RNA
agctttgttctgttgctcgt

SEQ ID NO: 12438 - RNA, 20 nt, synthetic construct
  source 1..20: mol_type = other RNA
tttctgtttgttagttttcc

SEQ ID NO: 12439 - RNA, 20 nt, synthetic construct
  source 1..20: mol_type = other RNA
tgactgttagaaggaaaact

SEQ ID NO: 12440 - RNA, 20 nt, synthetic construct
  source 1..20: mol_type = other RNA
ggaccctcagctgcaggtct

SEQ ID NO: 12441 - RNA, 20 nt, synthetic construct
  source 1..20: mol_type = other RNA
gttggagtttgctggaggtc

SEQ ID NO: 12442 - RNA, 20 nt, synthetic construct
  source 1..20: mol_type = other RNA
actccagtccctgtttgcct

SEQ ID NO: 12443 - RNA, 20 nt, synthetic construct
  source 1..20: mol_type = other RNA
ctgtttgcctgggtattacc

SEQ ID NO: 12444 - RNA, 20 nt, synthetic construct
  source 1..20: mol_type = other RNA
gttggcccctactgggaggt

SEQ ID NO: 12445 - RNA, 20 nt, synthetic construct
  source 1..20: mol_type = other RNA
cccagttaggctactcgggg

SEQ ID NO: 12446 - RNA, 20 nt, synthetic construct
  source 1..20: mol_type = other RNA
gtgacccccgagtagcctaa

SEQ ID NO: 12447 - RNA, 20 nt, synthetic construct
  source 1..20: mol_type = other RNA
cggacccacttgaggaggca

SEQ ID NO: 12448 - RNA, 20 nt, synthetic construct
  source 1..20: mol_type = other RNA
gtccattctcagatctcaaa

SEQ ID NO: 12449 - RNA, 20 nt, synthetic construct
  source 1..20: mol_type = other RNA
attctcagatctcaaactct

SEQ ID NO: 12450 - RNA, 20 nt, synthetic construct
  source 1..20: mol_type = other RNA
gacagctttgaagagagtag

SEQ ID NO: 12451 - RNA, 20 nt, synthetic construct
  source 1..20: mol_type = other RNA
gacagggatgtttaagtctg

SEQ ID NO: 12452 - RNA, 20 nt, synthetic construct
  source 1..20: mol_type = other RNA
gcagaagtttctgctgcctt

SEQ ID NO: 12453 - RNA, 20 nt, synthetic construct
  source 1..20: mol_type = other RNA
acagaggcaggcaggtctcc

SEQ ID NO: 12454 - RNA, 20 nt, synthetic construct
  source 1..20: mol_type = other RNA
ccttgagctgtggtgggctc

SEQ ID NO: 12455 - RNA, 20 nt, synthetic construct
  source 1..20: mol_type = other RNA
ctttgtttacctactcaagt

SEQ ID NO: 12456 - RNA, 20 nt, synthetic construct
  source 1..20: mol_type = other RNA
gccattgctgagacttgagt

SEQ ID NO: 12457 - RNA, 20 nt, synthetic construct
  source 1..20: mol_type = other RNA
cagcaatggcagacgcccct

SEQ ID NO: 12458 - RNA, 20 nt, synthetic construct
  source 1..20: mol_type = other RNA
gagaccgaactgcaaggcgg

SEQ ID NO: 12459 - RNA, 20 nt, synthetic construct
  source 1..20: mol_type = other RNA
cagactactgtgctagcagt

SEQ ID NO: 12460 - RNA, 20 nt, synthetic construct
  source 1..20: mol_type = other RNA
gagattgaactgctagcaca

SEQ ID NO: 12461 - RNA, 20 nt, synthetic construct
  source 1..20: mol_type = other RNA
catgcccacagagccttgct

SEQ ID NO: 12462 - RNA, 20 nt, synthetic construct
  source 1..20: mol_type = other RNA
tagcaaacggcacaccagga

SEQ ID NO: 12463 - RNA, 20 nt, synthetic construct
  source 1..20: mol_type = other RNA
cgattttccgggtacatctg

SEQ ID NO: 12464 - RNA, 20 nt, synthetic construct
  source 1..20: mol_type = other RNA
tggcttcccttggctaggaa

SEQ ID NO: 12465 - RNA, 20 nt, synthetic construct
  source 1..20: mol_type = other RNA
gggaattccctttcctagcc

SEQ ID NO: 12466 - RNA, 20 nt, synthetic construct
  source 1..20: mol_type = other RNA
gacagtgggtgcagcccacg

SEQ ID NO: 12467 - RNA, 20 nt, synthetic construct
  source 1..20: mol_type = other RNA
gacaagccccggtgagatga

SEQ ID NO: 12468 - RNA, 20 nt, synthetic construct
  source 1..20: mol_type = other RNA
acagttcccagcatgagcaa

SEQ ID NO: 12469 - RNA, 20 nt, synthetic construct
  source 1..20: mol_type = other RNA
cacaataggccgtctgcagg

SEQ ID NO: 12470 - RNA, 20 nt, synthetic construct
  source 1..20: mol_type = other RNA
gcaggctgaggagcaagaaa

SEQ ID NO: 12471 - RNA, 20 nt, synthetic construct
  source 1..20: mol_type = other RNA
gaattccaaaactgaagaaa

SEQ ID NO: 12472 - RNA, 20 nt, synthetic construct
  source 1..20: mol_type = other RNA
gatgttcaagggcaggaaac

SEQ ID NO: 12473 - RNA, 20 nt, synthetic construct
  source 1..20: mol_type = other RNA
acaccaggcctgccttacaa

SEQ ID NO: 12474 - RNA, 20 nt, synthetic construct
  source 1..20: mol_type = other RNA
tgaagaaaacactaaatatg

SEQ ID NO: 12475 - RNA, 20 nt, synthetic construct
  source 1..20: mol_type = other RNA
ttatgatgctagctggctat

SEQ ID NO: 12476 - RNA, 20 nt, synthetic construct
  source 1..20: mol_type = other RNA
tttaattggggcatttagcc

SEQ ID NO: 12477 - RNA, 20 nt, synthetic construct
  source 1..20: mol_type = other RNA
gtgtcttttaattggggcat

SEQ ID NO: 12478 - RNA, 20 nt, synthetic construct
  source 1..20: mol_type = other RNA
tgactctttattcaatttcc

SEQ ID NO: 12479 - RNA, 20 nt, synthetic construct
  source 1..20: mol_type = other RNA
agacccattggtttgctgtg

SEQ ID NO: 12480 - RNA, 20 nt, synthetic construct
  source 1..20: mol_type = other RNA
tctgaacacagcaaaccaat

SEQ ID NO: 12481 - RNA, 20 nt, synthetic construct
  source 1..20: mol_type = other RNA
tttcaccctgagatgggtct

SEQ ID NO: 12482 - RNA, 20 nt, synthetic construct
  source 1..20: mol_type = other RNA
gtttcatcaaagactaagat

SEQ ID NO: 12483 - RNA, 20 nt, synthetic construct
  source 1..20: mol_type = other RNA
ttgatgaaacagactttaaa

SEQ ID NO: 12484 - RNA, 20 nt, synthetic construct
  source 1..20: mol_type = other RNA
cttttgatctttgatggttt

SEQ ID NO: 12485 - RNA, 20 nt, synthetic construct
  source 1..20: mol_type = other RNA
gatcttcttgttgcattgat

SEQ ID NO: 12486 - RNA, 20 nt, synthetic construct
  source 1..20: mol_type = other RNA
tacttatatatgcacccaat

SEQ ID NO: 12487 - RNA, 20 nt, synthetic construct
  source 1..20: mol_type = other RNA
ctaagaacttgctttattaa

SEQ ID NO: 12488 - RNA, 20 nt, synthetic construct
  source 1..20: mol_type = other RNA
ctttgtaggtctctaagaac

SEQ ID NO: 12489 - RNA, 20 nt, synthetic construct
  source 1..20: mol_type = other RNA
aagtctctttgtaggtctct

SEQ ID NO: 12490 - RNA, 20 nt, synthetic construct
  source 1..20: mol_type = other RNA
cccactatttttgtgtggaa

SEQ ID NO: 12491 - RNA, 20 nt, synthetic construct
  source 1..20: mol_type = other RNA
atctaatattggctgtgggg

SEQ ID NO: 12492 - RNA, 20 nt, synthetic construct
  source 1..20: mol_type = other RNA
cgtcgatctaatattggctg

SEQ ID NO: 12493 - RNA, 20 nt, synthetic construct
  source 1..20: mol_type = other RNA
tgaatatccttgttaatttt

SEQ ID NO: 12494 - RNA, 20 nt, synthetic construct
  source 1..20: mol_type = other RNA
agagctgaattcacgtcctg

SEQ ID NO: 12495 - RNA, 20 nt, synthetic construct
  source 1..20: mol_type = other RNA
gcttggtccagagctgaatt

SEQ ID NO: 12496 - RNA, 20 nt, synthetic construct
  source 1..20: mol_type = other RNA
attaggtcagcttggtccag

SEQ ID NO: 12497 - RNA, 20 nt, synthetic construct
  source 1..20: mol_type = other RNA
agttctgtagatgtctatta

SEQ ID NO: 12498 - RNA, 20 nt, synthetic construct
  source 1..20: mol_type = other RNA
attttagaataagtgcaatg

SEQ ID NO: 12499 - RNA, 20 nt, synthetic construct
  source 1..20: mol_type = other RNA
gagagactgtttgttatgat

SEQ ID NO: 12500 - RNA, 20 nt, synthetic construct
  source 1..20: mol_type = other RNA
ctcagaccaaagtgcaatca

SEQ ID NO: 12501 - RNA, 20 nt, synthetic construct
  source 1..20: mol_type = other RNA
ttgttctctttggtttctaa

SEQ ID NO: 12502 - RNA, 20 nt, synthetic construct
  source 1..20: mol_type = other RNA
tctgctagcttttgtatttg

SEQ ID NO: 12503 - RNA, 20 nt, synthetic construct
  source 1..20: mol_type = other RNA
ttatccccttcagttctgct

SEQ ID NO: 12504 - RNA, 20 nt, synthetic construct
  source 1..20: mol_type = other RNA
ggctaggcttctatgtattt

SEQ ID NO: 12505 - RNA, 20 nt, synthetic construct
  source 1..20: mol_type = other RNA
atttgattcttctctatttt

SEQ ID NO: 12506 - RNA, 20 nt, synthetic construct
  source 1..20: mol_type = other RNA
aggaatttatccatttcttt

SEQ ID NO: 12507 - RNA, 20 nt, synthetic construct
  source 1..20: mol_type = other RNA
tgggagggtgtatgtgtcca

SEQ ID NO: 12508 - RNA, 20 nt, synthetic construct
  source 1..20: mol_type = other RNA
attcagggatttgacttctt

SEQ ID NO: 12509 - RNA, 20 nt, synthetic construct
  source 1..20: mol_type = other RNA
aatccctgaatagaccaata

SEQ ID NO: 12510 - RNA, 20 nt, synthetic construct
  source 1..20: mol_type = other RNA
gggctttttttggttggtaa

SEQ ID NO: 12511 - RNA, 20 nt, synthetic construct
  source 1..20: mol_type = other RNA
aatcctaacagaggtacaaa

SEQ ID NO: 12512 - RNA, 20 nt, synthetic construct
  source 1..20: mol_type = other RNA
ctctttttctattgtgtgga

SEQ ID NO: 12513 - RNA, 20 nt, synthetic construct
  source 1..20: mol_type = other RNA
ctgccaggttttggtatcag

SEQ ID NO: 12514 - RNA, 20 nt, synthetic construct
  source 1..20: mol_type = other RNA
ttggttctgtttatgtgatg

SEQ ID NO: 12515 - RNA, 20 nt, synthetic construct
  source 1..20: mol_type = other RNA
attgcgataatcatacggtt

SEQ ID NO: 12516 - RNA, 20 nt, synthetic construct
  source 1..20: mol_type = other RNA
caaaataataagagctactt

SEQ ID NO: 12517 - RNA, 20 nt, synthetic construct
  source 1..20: mol_type = other RNA
taagtagctcttattatttt

SEQ ID NO: 12518 - RNA, 20 nt, synthetic construct
  source 1..20: mol_type = other RNA
tgtgctggttttcaaaggga

SEQ ID NO: 12519 - RNA, 20 nt, synthetic construct
  source 1..20: mol_type = other RNA
agggcaatcaggcaagagaa

SEQ ID NO: 12520 - RNA, 20 nt, synthetic construct
  source 1..20: mol_type = other RNA
tctgcaaagagaaataattt

SEQ ID NO: 12521 - RNA, 20 nt, synthetic construct
  source 1..20: mol_type = other RNA
aattatttctctttgcagat

SEQ ID NO: 12522 - RNA, 20 nt, synthetic construct
  source 1..20: mol_type = other RNA
caggatacaaaatcaatgtg

SEQ ID NO: 12523 - RNA, 20 nt, synthetic construct
  source 1..20: mol_type = other RNA
cttattggtgtataggaatg

SEQ ID NO: 12524 - RNA, 20 nt, synthetic construct
  source 1..20: mol_type = other RNA
ttcacatcccttgtaagttg

SEQ ID NO: 12525 - RNA, 20 nt, synthetic construct
  source 1..20: mol_type = other RNA
tatcttatttccttgagcag

SEQ ID NO: 12526 - RNA, 20 nt, synthetic construct
  source 1..20: mol_type = other RNA
tggatatacaggcccttttt

SEQ ID NO: 12527 - RNA, 20 nt, synthetic construct
  source 1..20: mol_type = other RNA
gatagcatgatgcctccagc

SEQ ID NO: 12528 - RNA, 20 nt, synthetic construct
  source 1..20: mol_type = other RNA
atatatctgttttggtacca

SEQ ID NO: 12529 - RNA, 20 nt, synthetic construct
  source 1..20: mol_type = other RNA
aagatccaatagttgtagat

SEQ ID NO: 12530 - RNA, 20 nt, synthetic construct
  source 1..20: mol_type = other RNA
agtttgtcaaagatccaata

SEQ ID NO: 12531 - RNA, 20 nt, synthetic construct
  source 1..20: mol_type = other RNA
tacatttaattctttaatct

SEQ ID NO: 12532 - RNA, 20 nt, synthetic construct
  source 1..20: mol_type = other RNA
tctagggtttttatggtttt

SEQ ID NO: 12533 - RNA, 20 nt, synthetic construct
  source 1..20: mol_type = other RNA
cgatctcctgacctcgtgat

SEQ ID NO: 12534 - RNA, 20 nt, synthetic construct
  source 1..20: mol_type = other RNA
ggagatcgagaccatcttgg

SEQ ID NO: 12535 - RNA, 20 nt, synthetic construct
  source 1..20: mol_type = other RNA
tgggcacctgtagtcccagc

SEQ ID NO: 12536 - RNA, 20 nt, synthetic construct
  source 1..20: mol_type = other RNA
cagctacttgggaggctgag

SEQ ID NO: 12537 - RNA, 20 nt, synthetic construct
  source 1..20: mol_type = other RNA
cactctgttgcccaggctgg

SEQ ID NO: 12538 - RNA, 20 nt, synthetic construct
  source 1..20: mol_type = other RNA
tgaatggtattgcctatgtt

SEQ ID NO: 12539 - RNA, 20 nt, synthetic construct
  source 1..20: mol_type = other RNA
tctcccatgcctatgtcctg

SEQ ID NO: 12540 - RNA, 20 nt, synthetic construct
  source 1..20: mol_type = other RNA
tgaagtcttctcccatgcct

SEQ ID NO: 12541 - RNA, 20 nt, synthetic construct
  source 1..20: mol_type = other RNA
gatggctagaccacagaatt

SEQ ID NO: 12542 - RNA, 20 nt, synthetic construct
  source 1..20: mol_type = other RNA
agccatctgacaaagggcta

SEQ ID NO: 12543 - RNA, 20 nt, synthetic construct
  source 1..20: mol_type = other RNA
gttcatatcctttgcccact

SEQ ID NO: 12544 - RNA, 20 nt, synthetic construct
  source 1..20: mol_type = other RNA
gaagtgtctgttcatatcct

SEQ ID NO: 12545 - RNA, 20 nt, synthetic construct
  source 1..20: mol_type = other RNA
tcctgtcagaagtgtctgtt

SEQ ID NO: 12546 - RNA, 20 nt, synthetic construct
  source 1..20: mol_type = other RNA
gccacataaaggtcttcctg

SEQ ID NO: 12547 - RNA, 20 nt, synthetic construct
  source 1..20: mol_type = other RNA
ggaaacaacagatgctgaag

SEQ ID NO: 12548 - RNA, 20 nt, synthetic construct
  source 1..20: mol_type = other RNA
tccacaatggttgaactaat

SEQ ID NO: 12549 - RNA, 20 nt, synthetic construct
  source 1..20: mol_type = other RNA
aatggtacttctggttctag

SEQ ID NO: 12550 - RNA, 20 nt, synthetic construct
  source 1..20: mol_type = other RNA
ttattgtagaatgatttata

SEQ ID NO: 12551 - RNA, 20 nt, synthetic construct
  source 1..20: mol_type = other RNA
ttgctattgtgaatagtgct

SEQ ID NO: 12552 - RNA, 20 nt, synthetic construct
  source 1..20: mol_type = other RNA
atcattgatgggcatttcag

SEQ ID NO: 12553 - RNA, 20 nt, synthetic construct
  source 1..20: mol_type = other RNA
ctgcaaaagacatgaactca

SEQ ID NO: 12554 - RNA, 20 nt, synthetic construct
  source 1..20: mol_type = other RNA
tttgcagggacatggatgaa

SEQ ID NO: 12555 - RNA, 20 nt, synthetic construct
  source 1..20: mol_type = other RNA
atgtgttctcattgttcaac

SEQ ID NO: 12556 - RNA, 20 nt, synthetic construct
  source 1..20: mol_type = other RNA
tggtggtttgctgcacccag

SEQ ID NO: 12557 - RNA, 20 nt, synthetic construct
  source 1..20: mol_type = other RNA
cctgaaggcagcagatggtt

SEQ ID NO: 12558 - RNA, 20 nt, synthetic construct
  source 1..20: mol_type = other RNA
taaatgagtctcctgaaggc

SEQ ID NO: 12559 - RNA, 20 nt, synthetic construct
  source 1..20: mol_type = other RNA
ttatgtcttaaatgagtctc

SEQ ID NO: 12560 - RNA, 20 nt, synthetic construct
  source 1..20: mol_type = other RNA
ctgatgtggaggtagattat

SEQ ID NO: 12561 - RNA, 20 nt, synthetic construct
  source 1..20: mol_type = other RNA
gatggtttcttaaaaagttc

SEQ ID NO: 12562 - RNA, 20 nt, synthetic construct
  source 1..20: mol_type = other RNA
acaaagagttctatatgaat

SEQ ID NO: 12563 - RNA, 20 nt, synthetic construct
  source 1..20: mol_type = other RNA
ctacccaattaatctgtgct

SEQ ID NO: 12564 - RNA, 20 nt, synthetic construct
  source 1..20: mol_type = other RNA
cagaaatgttccgtgtggtg

SEQ ID NO: 12565 - RNA, 20 nt, synthetic construct
  source 1..20: mol_type = other RNA
ccagcctagacccccatttg

SEQ ID NO: 12566 - RNA, 20 nt, synthetic construct
  source 1..20: mol_type = other RNA
aggctggagactaggtcaca

SEQ ID NO: 12567 - RNA, 20 nt, synthetic construct
  source 1..20: mol_type = other RNA
caggcatagagtctctaaac

SEQ ID NO: 12568 - RNA, 20 nt, synthetic construct
  source 1..20: mol_type = other RNA
ctaaactttcccatggcaca

SEQ ID NO: 12569 - RNA, 20 nt, synthetic construct
  source 1..20: mol_type = other RNA
gaatcctcagattactaacc

SEQ ID NO: 12570 - RNA, 20 nt, synthetic construct
  source 1..20: mol_type = other RNA
acgttcctaggaggcatgaa

SEQ ID NO: 12571 - RNA, 20 nt, synthetic construct
  source 1..20: mol_type = other RNA
ttgctttctgtgcctcttac

SEQ ID NO: 12572 - RNA, 20 nt, synthetic construct
  source 1..20: mol_type = other RNA
gaaaacaatggagtaagagg

SEQ ID NO: 12573 - RNA, 20 nt, synthetic construct
  source 1..20: mol_type = other RNA
agtggctacagaggagtcag

SEQ ID NO: 12574 - RNA, 20 nt, synthetic construct
  source 1..20: mol_type = other RNA
taaagggcgatggctgggta

SEQ ID NO: 12575 - RNA, 20 nt, synthetic construct
  source 1..20: mol_type = other RNA
acccagccatcgccctttat

SEQ ID NO: 12576 - RNA, 20 nt, synthetic construct
  source 1..20: mol_type = other RNA
cactgttctttcatctcatc

SEQ ID NO: 12577 - RNA, 20 nt, synthetic construct
  source 1..20: mol_type = other RNA
atcctctgctagcggcagcc

SEQ ID NO: 12578 - RNA, 20 nt, synthetic construct
  source 1..20: mol_type = other RNA
tgcccaggaacccatcctag

SEQ ID NO: 12579 - RNA, 20 nt, synthetic construct
  source 1..20: mol_type = other RNA
gggagctagttttttagggc

SEQ ID NO: 12580 - RNA, 20 nt, synthetic construct
  source 1..20: mol_type = other RNA
ggctttacaagacttataaa

SEQ ID NO: 12581 - RNA, 20 nt, synthetic construct
  source 1..20: mol_type = other RNA
tgtaaagccagacacacttg

SEQ ID NO: 12582 - RNA, 20 nt, synthetic construct
  source 1..20: mol_type = other RNA
ctctctaggactctgcagta

SEQ ID NO: 12583 - RNA, 20 nt, synthetic construct
  source 1..20: mol_type = other RNA
tagagagagacacagagaat

SEQ ID NO: 12584 - RNA, 20 nt, synthetic construct
  source 1..20: mol_type = other RNA
cattctctgtgtctctctct

SEQ ID NO: 12585 - RNA, 20 nt, synthetic construct
  source 1..20: mol_type = other RNA
caatctcctgacctcgtgat

SEQ ID NO: 12586 - RNA, 20 nt, synthetic construct
  source 1..20: mol_type = other RNA
ggagattgagaccatcctgg

SEQ ID NO: 12587 - RNA, 20 nt, synthetic construct
  source 1..20: mol_type = other RNA
ctactaaaaatacaaaaaat

SEQ ID NO: 12588 - RNA, 20 nt, synthetic construct
  source 1..20: mol_type = other RNA
cctgagtagctgggactaca

SEQ ID NO: 12589 - RNA, 20 nt, synthetic construct
  source 1..20: mol_type = other RNA
cagctactcaggagactgag

SEQ ID NO: 12590 - RNA, 20 nt, synthetic construct
  source 1..20: mol_type = other RNA
gcctcctgggttcaagccat

SEQ ID NO: 12591 - RNA, 20 nt, synthetic construct
  source 1..20: mol_type = other RNA
cccagactggagtgcagtgg

SEQ ID NO: 12592 - RNA, 20 nt, synthetic construct
  source 1..20: mol_type = other RNA
cgctctgtcgcccagactgg

SEQ ID NO: 12593 - RNA, 20 nt, synthetic construct
  source 1..20: mol_type = other RNA
gggcgacagagcgagactcc

SEQ ID NO: 12594 - RNA, 20 nt, synthetic construct
  source 1..20: mol_type = other RNA
caaaaaaaaaaaaaaatcta

SEQ ID NO: 12595 - RNA, 20 nt, synthetic construct
  source 1..20: mol_type = other RNA
tttattctggaggaatgcag

SEQ ID NO: 12596 - RNA, 20 nt, synthetic construct
  source 1..20: mol_type = other RNA
atgatccataaaaaaactga

SEQ ID NO: 12597 - RNA, 20 nt, synthetic construct
  source 1..20: mol_type = other RNA
tcaagttctaaagaaccatg

SEQ ID NO: 12598 - RNA, 20 nt, synthetic construct
  source 1..20: mol_type = other RNA
ctttttaacactttgttata

SEQ ID NO: 12599 - RNA, 20 nt, synthetic construct
  source 1..20: mol_type = other RNA
aaactttgttataacaaagt

SEQ ID NO: 12600 - RNA, 20 nt, synthetic construct
  source 1..20: mol_type = other RNA
caagaggcgggaaaaaattc

SEQ ID NO: 12601 - RNA, 20 nt, synthetic construct
  source 1..20: mol_type = other RNA
ggccactgcaaattccaaaa

SEQ ID NO: 12602 - RNA, 20 nt, synthetic construct
  source 1..20: mol_type = other RNA
gattgcagtactcccacctc

SEQ ID NO: 12603 - RNA, 20 nt, synthetic construct
  source 1..20: mol_type = other RNA
tagagactcccactgttgtt

SEQ ID NO: 12604 - RNA, 20 nt, synthetic construct
  source 1..20: mol_type = other RNA
gtggccagatatctacacat

SEQ ID NO: 12605 - RNA, 20 nt, synthetic construct
  source 1..20: mol_type = other RNA
gattttccatctcttttcat

SEQ ID NO: 12606 - RNA, 20 nt, synthetic construct
  source 1..20: mol_type = other RNA
ccgcccacgcacgttgcgcc

SEQ ID NO: 12607 - RNA, 20 nt, synthetic construct
  source 1..20: mol_type = other RNA
agtgcccaggtgggtttgca

SEQ ID NO: 12608 - RNA, 20 nt, synthetic construct
  source 1..20: mol_type = other RNA
ggaacaccgagataacccct

SEQ ID NO: 12609 - RNA, 20 nt, synthetic construct
  source 1..20: mol_type = other RNA
attttaataaatgcctggaa

SEQ ID NO: 12610 - RNA, 20 nt, synthetic construct
  source 1..20: mol_type = other RNA
tcctggggaaacctaatatg

SEQ ID NO: 12611 - RNA, 20 nt, synthetic construct
  source 1..20: mol_type = other RNA
taggtaggctctgcacacct

SEQ ID NO: 12612 - RNA, 20 nt, synthetic construct
  source 1..20: mol_type = other RNA
actacccttcctctcaacac

SEQ ID NO: 12613 - RNA, 20 nt, synthetic construct
  source 1..20: mol_type = other RNA
ctactgtaagggaataagat

SEQ ID NO: 12614 - RNA, 20 nt, synthetic construct
  source 1..20: mol_type = other RNA
ttgcctccaagtactagatg

SEQ ID NO: 12615 - RNA, 20 nt, synthetic construct
  source 1..20: mol_type = other RNA
tgcatctagtacttggaggc

SEQ ID NO: 12616 - RNA, 20 nt, synthetic construct
  source 1..20: mol_type = other RNA
accagaagcttaaggctttg

SEQ ID NO: 12617 - RNA, 20 nt, synthetic construct
  source 1..20: mol_type = other RNA
gtaggggacagacatgaaaa

SEQ ID NO: 12618 - RNA, 20 nt, synthetic construct
  source 1..20: mol_type = other RNA
gtcccctactgacagccaat

SEQ ID NO: 12619 - RNA, 20 nt, synthetic construct
  source 1..20: mol_type = other RNA
cctactgacagccaatcacc

SEQ ID NO: 12620 - RNA, 20 nt, synthetic construct
  source 1..20: mol_type = other RNA
ggtttcctgcctcattgttt

SEQ ID NO: 12621 - RNA, 20 nt, synthetic construct
  source 1..20: mol_type = other RNA
ttgttccaattgtaagagca

SEQ ID NO: 12622 - RNA, 20 nt, synthetic construct
  source 1..20: mol_type = other RNA
ttttcccaccaggttttgaa

SEQ ID NO: 12623 - RNA, 20 nt, synthetic construct
  source 1..20: mol_type = other RNA
ttctgcttgtgagtatacta

SEQ ID NO: 12624 - RNA, 20 nt, synthetic construct
  source 1..20: mol_type = other RNA
taattctgaaactactgtcc

SEQ ID NO: 12625 - RNA, 20 nt, synthetic construct
  source 1..20: mol_type = other RNA
tgtttgtgtcataaattgct

SEQ ID NO: 12626 - RNA, 20 nt, synthetic construct
  source 1..20: mol_type = other RNA
taaattgcttcacatgtttc

SEQ ID NO: 12627 - RNA, 20 nt, synthetic construct
  source 1..20: mol_type = other RNA
ggcagtgctaccatggtaat

SEQ ID NO: 12628 - RNA, 20 nt, synthetic construct
  source 1..20: mol_type = other RNA
ttcctgtgacagtggtggag

SEQ ID NO: 12629 - RNA, 20 nt, synthetic construct
  source 1..20: mol_type = other RNA
caggaaggacatgtcaatct

SEQ ID NO: 12630 - RNA, 20 nt, synthetic construct
  source 1..20: mol_type = other RNA
tggatgaccaagattgacat

SEQ ID NO: 12631 - RNA, 20 nt, synthetic construct
  source 1..20: mol_type = other RNA
atcttggtcatccatgacac

SEQ ID NO: 12632 - RNA, 20 nt, synthetic construct
  source 1..20: mol_type = other RNA
tccatgacaccacaccggca

SEQ ID NO: 12633 - RNA, 20 nt, synthetic construct
  source 1..20: mol_type = other RNA
tctgatgccggtgtggtgtc

SEQ ID NO: 12634 - RNA, 20 nt, synthetic construct
  source 1..20: mol_type = other RNA
ttgatgttacttgtaagagg

SEQ ID NO: 12635 - RNA, 20 nt, synthetic construct
  source 1..20: mol_type = other RNA
taacaagttagcttgaagca

SEQ ID NO: 12636 - RNA, 20 nt, synthetic construct
  source 1..20: mol_type = other RNA
aagggaaatttgtcctaaca

SEQ ID NO: 12637 - RNA, 20 nt, synthetic construct
  source 1..20: mol_type = other RNA
ggacattttgacacaccttc

SEQ ID NO: 12638 - RNA, 20 nt, synthetic construct
  source 1..20: mol_type = other RNA
aaatgtccagacaactttgc

SEQ ID NO: 12639 - RNA, 20 nt, synthetic construct
  source 1..20: mol_type = other RNA
agacaactttgcttttgatc

SEQ ID NO: 12640 - RNA, 20 nt, synthetic construct
  source 1..20: mol_type = other RNA
gagagaataggtattttagg

SEQ ID NO: 12641 - RNA, 20 nt, synthetic construct
  source 1..20: mol_type = other RNA
gatggaagcagaaggctaca

SEQ ID NO: 12642 - RNA, 20 nt, synthetic construct
  source 1..20: mol_type = other RNA
ttttaatataaagctcaaga

SEQ ID NO: 12643 - RNA, 20 nt, synthetic construct
  source 1..20: mol_type = other RNA
tgggtcacaagtaaataatt

SEQ ID NO: 12644 - RNA, 20 nt, synthetic construct
  source 1..20: mol_type = other RNA
caagtaaataattcacatgt

SEQ ID NO: 12645 - RNA, 20 nt, synthetic construct
  source 1..20: mol_type = other RNA
gaataaacacacctggttat

SEQ ID NO: 12646 - RNA, 20 nt, synthetic construct
  source 1..20: mol_type = other RNA
gtatgaacatatatatatga

SEQ ID NO: 12647 - RNA, 20 nt, synthetic construct
  source 1..20: mol_type = other RNA
gggacagacataaaaacctt

SEQ ID NO: 12648 - RNA, 20 nt, synthetic construct
  source 1..20: mol_type = other RNA
tcagtcagggacagacataa

SEQ ID NO: 12649 - RNA, 20 nt, synthetic construct
  source 1..20: mol_type = other RNA
gtccctgactgatgaccaaa

SEQ ID NO: 12650 - RNA, 20 nt, synthetic construct
  source 1..20: mol_type = other RNA
ctgactgatgaccaaatacc

SEQ ID NO: 12651 - RNA, 20 nt, synthetic construct
  source 1..20: mol_type = other RNA
tgcaaattgtatggctatac

SEQ ID NO: 12652 - RNA, 20 nt, synthetic construct
  source 1..20: mol_type = other RNA
atgtacctgcccattttaat

SEQ ID NO: 12653 - RNA, 20 nt, synthetic construct
  source 1..20: mol_type = other RNA
gacctggttttttgtccatg

SEQ ID NO: 12654 - RNA, 20 nt, synthetic construct
  source 1..20: mol_type = other RNA
gacaaaaactggctttctgc

SEQ ID NO: 12655 - RNA, 20 nt, synthetic construct
  source 1..20: mol_type = other RNA
tttatggcagaaagccagtt

SEQ ID NO: 12656 - RNA, 20 nt, synthetic construct
  source 1..20: mol_type = other RNA
aacatgtggaaagtgttttt

SEQ ID NO: 12657 - RNA, 20 nt, synthetic construct
  source 1..20: mol_type = other RNA
cttgtccaacatgtggaaag

SEQ ID NO: 12658 - RNA, 20 nt, synthetic construct
  source 1..20: mol_type = other RNA
tgtactgtctcttgtccaac

SEQ ID NO: 12659 - RNA, 20 nt, synthetic construct
  source 1..20: mol_type = other RNA
taatagttacggagttgcgc

SEQ ID NO: 12660 - RNA, 20 nt, synthetic construct
  source 1..20: mol_type = other RNA
aggaaggttctccaggaaga

SEQ ID NO: 12661 - RNA, 20 nt, synthetic construct
  source 1..20: mol_type = other RNA
ctttcctcagttcagcaaga

SEQ ID NO: 12662 - RNA, 20 nt, synthetic construct
  source 1..20: mol_type = other RNA
tgctgaactgaggaaagaga

SEQ ID NO: 12663 - RNA, 20 nt, synthetic construct
  source 1..20: mol_type = other RNA
aatataaactgcatatgcac

SEQ ID NO: 12664 - RNA, 20 nt, synthetic construct
  source 1..20: mol_type = other RNA
cactttgtagaatttctccc

SEQ ID NO: 12665 - RNA, 20 nt, synthetic construct
  source 1..20: mol_type = other RNA
tttccccagtagtggttctc

SEQ ID NO: 12666 - RNA, 20 nt, synthetic construct
  source 1..20: mol_type = other RNA
ccattgagctcactgtttcc

SEQ ID NO: 12667 - RNA, 20 nt, synthetic construct
  source 1..20: mol_type = other RNA
ctcctcgggctgatcagaac

SEQ ID NO: 12668 - RNA, 20 nt, synthetic construct
  source 1..20: mol_type = other RNA
ctactgaatgcccgagatgt

SEQ ID NO: 12669 - RNA, 20 nt, synthetic construct
  source 1..20: mol_type = other RNA
tactttaggagtaggattta

SEQ ID NO: 12670 - RNA, 20 nt, synthetic construct
  source 1..20: mol_type = other RNA
ttattctaagaaggcataaa

SEQ ID NO: 12671 - RNA, 20 nt, synthetic construct
  source 1..20: mol_type = other RNA
ttttagacttggtttttaag

SEQ ID NO: 12672 - RNA, 20 nt, synthetic construct
  source 1..20: mol_type = other RNA
aaaaggacccaaatgatctc

SEQ ID NO: 12673 - RNA, 20 nt, synthetic construct
  source 1..20: mol_type = other RNA
ggcagttaatttacttggag

SEQ ID NO: 12674 - RNA, 20 nt, synthetic construct
  source 1..20: mol_type = other RNA
ctccttgtgaatgcaacatt

SEQ ID NO: 12675 - RNA, 20 nt, synthetic construct
  source 1..20: mol_type = other RNA
atttgtattgactggttttt

SEQ ID NO: 12676 - RNA, 20 nt, synthetic construct
  source 1..20: mol_type = other RNA
atacaaatagaccaagaaat

SEQ ID NO: 12677 - RNA, 20 nt, synthetic construct
  source 1..20: mol_type = other RNA
attccatcgtttctactatt

SEQ ID NO: 12678 - RNA, 20 nt, synthetic construct
  source 1..20: mol_type = other RNA
tacagattgtatggctttca

SEQ ID NO: 12679 - RNA, 20 nt, synthetic construct
  source 1..20: mol_type = other RNA
ttctgtgacttgctttaccc

SEQ ID NO: 12680 - RNA, 20 nt, synthetic construct
  source 1..20: mol_type = other RNA
cagaaggacgggaaggagat

SEQ ID NO: 12681 - RNA, 20 nt, synthetic construct
  source 1..20: mol_type = other RNA
caatatctccttcccgtcct

SEQ ID NO: 12682 - RNA, 20 nt, synthetic construct
  source 1..20: mol_type = other RNA
tcagccatcattgctttgag

SEQ ID NO: 12683 - RNA, 20 nt, synthetic construct
  source 1..20: mol_type = other RNA
agaagctcaatgaatcagaa

SEQ ID NO: 12684 - RNA, 20 nt, synthetic construct
  source 1..20: mol_type = other RNA
aacatcaaagataacaagga

SEQ ID NO: 12685 - RNA, 20 nt, synthetic construct
  source 1..20: mol_type = other RNA
ctctatgtaaatgatattgt

SEQ ID NO: 12686 - RNA, 20 nt, synthetic construct
  source 1..20: mol_type = other RNA
ctttcattactgtccctcta

SEQ ID NO: 12687 - RNA, 20 nt, synthetic construct
  source 1..20: mol_type = other RNA
taggttgatctgtttttatt

SEQ ID NO: 12688 - RNA, 20 nt, synthetic construct
  source 1..20: mol_type = other RNA
tcctaggttgatctgttttt

SEQ ID NO: 12689 - RNA, 20 nt, synthetic construct
  source 1..20: mol_type = other RNA
agccaaaacaaacaaataaa

SEQ ID NO: 12690 - RNA, 20 nt, synthetic construct
  source 1..20: mol_type = other RNA
atataaaatactcttattta

SEQ ID NO: 12691 - RNA, 20 nt, synthetic construct
  source 1..20: mol_type = other RNA
tttaaatacatttaaaaatt

SEQ ID NO: 12692 - RNA, 20 nt, synthetic construct
  source 1..20: mol_type = other RNA
taggatttataatatcccac

SEQ ID NO: 12693 - RNA, 20 nt, synthetic construct
  source 1..20: mol_type = other RNA
ttttatgcaaaagaaggaag

SEQ ID NO: 12694 - RNA, 20 nt, synthetic construct
  source 1..20: mol_type = other RNA
acaataatgctatgtatttt

SEQ ID NO: 12695 - RNA, 20 nt, synthetic construct
  source 1..20: mol_type = other RNA
ttaggagtgcctgcatccat

SEQ ID NO: 12696 - RNA, 20 nt, synthetic construct
  source 1..20: mol_type = other RNA
aattgaagaaacaaaagtat

SEQ ID NO: 12697 - RNA, 20 nt, synthetic construct
  source 1..20: mol_type = other RNA
gtgatattgctttaaaactt

SEQ ID NO: 12698 - RNA, 20 nt, synthetic construct
  source 1..20: mol_type = other RNA
ttgagcatagtgtgtgaaat

SEQ ID NO: 12699 - RNA, 20 nt, synthetic construct
  source 1..20: mol_type = other RNA
tttaatctataagcatggtg

SEQ ID NO: 12700 - RNA, 20 nt, synthetic construct
  source 1..20: mol_type = other RNA
ttttttggaaaaaaaaattg

SEQ ID NO: 12701 - RNA, 20 nt, synthetic construct
  source 1..20: mol_type = other RNA
tccaatttttttttccaaaa

SEQ ID NO: 12702 - RNA, 20 nt, synthetic construct
  source 1..20: mol_type = other RNA
ttatattaaggtatataagt

SEQ ID NO: 12703 - RNA, 20 nt, synthetic construct
  source 1..20: mol_type = other RNA
tgattcctgtacttttataa

SEQ ID NO: 12704 - RNA, 20 nt, synthetic construct
  source 1..20: mol_type = other RNA
ggaggatggcttgagcccag

SEQ ID NO: 12705 - RNA, 20 nt, synthetic construct
  source 1..20: mol_type = other RNA
tgaacatctgggctcaagcc

SEQ ID NO: 12706 - RNA, 20 nt, synthetic construct
  source 1..20: mol_type = other RNA
cactctgttgctaaggctgg

SEQ ID NO: 12707 - RNA, 20 nt, synthetic construct
  source 1..20: mol_type = other RNA
tcacatcgatctaattgttt

SEQ ID NO: 12708 - RNA, 20 nt, synthetic construct
  source 1..20: mol_type = other RNA
agcaatcctctcacctcagc

SEQ ID NO: 12709 - RNA, 20 nt, synthetic construct
  source 1..20: mol_type = other RNA
agccatgagtgagcattgat

SEQ ID NO: 12710 - RNA, 20 nt, synthetic construct
  source 1..20: mol_type = other RNA
cattccatcatccaggctgg

SEQ ID NO: 12711 - RNA, 20 nt, synthetic construct
  source 1..20: mol_type = other RNA
caaaaaaaaaaaaaaaaaag

SEQ ID NO: 12712 - RNA, 20 nt, synthetic construct
  source 1..20: mol_type = other RNA
ggtggtgggccatccctttt

SEQ ID NO: 12713 - RNA, 20 nt, synthetic construct
  source 1..20: mol_type = other RNA
ccattgaattgctttgccat

SEQ ID NO: 12714 - RNA, 20 nt, synthetic construct
  source 1..20: mol_type = other RNA
agttctgcttttgttttgta

SEQ ID NO: 12715 - RNA, 20 nt, synthetic construct
  source 1..20: mol_type = other RNA
gagctaaaactgaacctgaa

SEQ ID NO: 12716 - RNA, 20 nt, synthetic construct
  source 1..20: mol_type = other RNA
gtaaacactcactataaaat

SEQ ID NO: 12717 - RNA, 20 nt, synthetic construct
  source 1..20: mol_type = other RNA
ttgttaagaaaataaatagg

SEQ ID NO: 12718 - RNA, 20 nt, synthetic construct
  source 1..20: mol_type = other RNA
gatatatggacagagagcat

SEQ ID NO: 12719 - RNA, 20 nt, synthetic construct
  source 1..20: mol_type = other RNA
atatatctgacaaatggctt

SEQ ID NO: 12720 - RNA, 20 nt, synthetic construct
  source 1..20: mol_type = other RNA
agaatataggaacatttctc

SEQ ID NO: 12721 - RNA, 20 nt, synthetic construct
  source 1..20: mol_type = other RNA
tctgtttagtgagtgggaga

SEQ ID NO: 12722 - RNA, 20 nt, synthetic construct
  source 1..20: mol_type = other RNA
agtatctcagccatgaaaaa

SEQ ID NO: 12723 - RNA, 20 nt, synthetic construct
  source 1..20: mol_type = other RNA
attgggtgtttggtgacatc

SEQ ID NO: 12724 - RNA, 20 nt, synthetic construct
  source 1..20: mol_type = other RNA
ccaaacacccaatggacatg

SEQ ID NO: 12725 - RNA, 20 nt, synthetic construct
  source 1..20: mol_type = other RNA
tcttaataatatccatgtcc

SEQ ID NO: 12726 - RNA, 20 nt, synthetic construct
  source 1..20: mol_type = other RNA
ctgatgtagagcaaggatgt

SEQ ID NO: 12727 - RNA, 20 nt, synthetic construct
  source 1..20: mol_type = other RNA
gatagtttctccaaaagttc

SEQ ID NO: 12728 - RNA, 20 nt, synthetic construct
  source 1..20: mol_type = other RNA
tcgtggacttatgtttccat

SEQ ID NO: 12729 - RNA, 20 nt, synthetic construct
  source 1..20: mol_type = other RNA
acgaagacatctccaagaat

SEQ ID NO: 12730 - RNA, 20 nt, synthetic construct
  source 1..20: mol_type = other RNA
acagtttggggttataaaaa

SEQ ID NO: 12731 - RNA, 20 nt, synthetic construct
  source 1..20: mol_type = other RNA
atcaataagaaaatgaataa

SEQ ID NO: 12732 - RNA, 20 nt, synthetic construct
  source 1..20: mol_type = other RNA
tacaatggcatactgttcag

SEQ ID NO: 12733 - RNA, 20 nt, synthetic construct
  source 1..20: mol_type = other RNA
attgatgtaaggttccagaa

SEQ ID NO: 12734 - RNA, 20 nt, synthetic construct
  source 1..20: mol_type = other RNA
tgtattgtgattgaagtgtg

SEQ ID NO: 12735 - RNA, 20 nt, synthetic construct
  source 1..20: mol_type = other RNA
tcaaactacatctaagatct

SEQ ID NO: 12736 - RNA, 20 nt, synthetic construct
  source 1..20: mol_type = other RNA
aatgcacagatcttagatgt

SEQ ID NO: 12737 - RNA, 20 nt, synthetic construct
  source 1..20: mol_type = other RNA
caagcccagattctccattc

SEQ ID NO: 12738 - RNA, 20 nt, synthetic construct
  source 1..20: mol_type = other RNA
ctgtagagactctatacatg

SEQ ID NO: 12739 - RNA, 20 nt, synthetic construct
  source 1..20: mol_type = other RNA
catgtatagagtctctacag

SEQ ID NO: 12740 - RNA, 20 nt, synthetic construct
  source 1..20: mol_type = other RNA
ctacagagacaatgttgcat

SEQ ID NO: 12741 - RNA, 20 nt, synthetic construct
  source 1..20: mol_type = other RNA
gagaaaccttgaaatgtatt

SEQ ID NO: 12742 - RNA, 20 nt, synthetic construct
  source 1..20: mol_type = other RNA
tgaatgtgaggattctgaga

SEQ ID NO: 12743 - RNA, 20 nt, synthetic construct
  source 1..20: mol_type = other RNA
tcaccggctgtgcttttttt

SEQ ID NO: 12744 - RNA, 20 nt, synthetic construct
  source 1..20: mol_type = other RNA
agaaaaaaaaaaaaaaaagc

SEQ ID NO: 12745 - RNA, 20 nt, synthetic construct
  source 1..20: mol_type = other RNA
cgctctgtcgccaggcagga

SEQ ID NO: 12746 - RNA, 20 nt, synthetic construct
  source 1..20: mol_type = other RNA
ccaggcaggagtgtaatggc

SEQ ID NO: 12747 - RNA, 20 nt, synthetic construct
  source 1..20: mol_type = other RNA
cagctactcatgaagctgag

SEQ ID NO: 12748 - RNA, 20 nt, synthetic construct
  source 1..20: mol_type = other RNA
ctactaaaaatacaaaaatt

SEQ ID NO: 12749 - RNA, 20 nt, synthetic construct
  source 1..20: mol_type = other RNA
acagagcgagaccatcttgg

SEQ ID NO: 12750 - RNA, 20 nt, synthetic construct
  source 1..20: mol_type = other RNA
cgctctgttgacctcgtgat

SEQ ID NO: 12751 - RNA, 20 nt, synthetic construct
  source 1..20: mol_type = other RNA
accagctatggagggttcag

SEQ ID NO: 12752 - RNA, 20 nt, synthetic construct
  source 1..20: mol_type = other RNA
agccagccctctcactttat

SEQ ID NO: 12753 - RNA, 20 nt, synthetic construct
  source 1..20: mol_type = other RNA
cactgttccttcatctcatc

SEQ ID NO: 12754 - RNA, 20 nt, synthetic construct
  source 1..20: mol_type = other RNA
gtcccgcagtggctgtggcc

SEQ ID NO: 12755 - RNA, 20 nt, synthetic construct
  source 1..20: mol_type = other RNA
cgcagtggctgtggccagta

SEQ ID NO: 12756 - RNA, 20 nt, synthetic construct
  source 1..20: mol_type = other RNA
atcctctactggccacagcc

SEQ ID NO: 12757 - RNA, 20 nt, synthetic construct
  source 1..20: mol_type = other RNA
caggcaggatgctgtttctc

SEQ ID NO: 12758 - RNA, 20 nt, synthetic construct
  source 1..20: mol_type = other RNA
tccaggtcagcttttataag

SEQ ID NO: 12759 - RNA, 20 nt, synthetic construct
  source 1..20: mol_type = other RNA
aaaagacttataaaagctga

SEQ ID NO: 12760 - RNA, 20 nt, synthetic construct
  source 1..20: mol_type = other RNA
gcttttataagtcttttaga

SEQ ID NO: 12761 - RNA, 20 nt, synthetic construct
  source 1..20: mol_type = other RNA
agtgagtttgagtctaaaag

SEQ ID NO: 12762 - RNA, 20 nt, synthetic construct
  source 1..20: mol_type = other RNA
tttagactcaaactcacttg

SEQ ID NO: 12763 - RNA, 20 nt, synthetic construct
  source 1..20: mol_type = other RNA
ataccacttcaggtgggtca

SEQ ID NO: 12764 - RNA, 20 nt, synthetic construct
  source 1..20: mol_type = other RNA
tgtagctaaaaggctctgca

SEQ ID NO: 12765 - RNA, 20 nt, synthetic construct
  source 1..20: mol_type = other RNA
tgtagaaagagatacagaga

SEQ ID NO: 12766 - RNA, 20 nt, synthetic construct
  source 1..20: mol_type = other RNA
aactctctgtatctctttct

SEQ ID NO: 12767 - RNA, 20 nt, synthetic construct
  source 1..20: mol_type = other RNA
atacctgtctaactctctgt

SEQ ID NO: 12768 - RNA, 20 nt, synthetic construct
  source 1..20: mol_type = other RNA
tatagattgttatgcatata

SEQ ID NO: 12769 - RNA, 20 nt, synthetic construct
  source 1..20: mol_type = other RNA
agatgagattttgggtgggg

SEQ ID NO: 12770 - RNA, 20 nt, synthetic construct
  source 1..20: mol_type = other RNA
ccacccaaaatctcatcttg

SEQ ID NO: 12771 - RNA, 20 nt, synthetic construct
  source 1..20: mol_type = other RNA
tgcccttgacacatggggat

SEQ ID NO: 12772 - RNA, 20 nt, synthetic construct
  source 1..20: mol_type = other RNA
agggcaggaccaggtggagg

SEQ ID NO: 12773 - RNA, 20 nt, synthetic construct
  source 1..20: mol_type = other RNA
tgagaacagcctgggagaaa

SEQ ID NO: 12774 - RNA, 20 nt, synthetic construct
  source 1..20: mol_type = other RNA
cctgagatctgatggttttg

SEQ ID NO: 12775 - RNA, 20 nt, synthetic construct
  source 1..20: mol_type = other RNA
ggcatttcccctacttgcac

SEQ ID NO: 12776 - RNA, 20 nt, synthetic construct
  source 1..20: mol_type = other RNA
tgccgcctgtgaagaaggtg

SEQ ID NO: 12777 - RNA, 20 nt, synthetic construct
  source 1..20: mol_type = other RNA
tggcagaaggcaagggagaa

SEQ ID NO: 12778 - RNA, 20 nt, synthetic construct
  source 1..20: mol_type = other RNA
attaaaactcttttctttgt

SEQ ID NO: 12779 - RNA, 20 nt, synthetic construct
  source 1..20: mol_type = other RNA
gtctcgggtatttcctcata

SEQ ID NO: 12780 - RNA, 20 nt, synthetic construct
  source 1..20: mol_type = other RNA
cgggtatttcctcatagcaa

SEQ ID NO: 12781 - RNA, 20 nt, synthetic construct
  source 1..20: mol_type = other RNA
ttgaaatattcccattaaag

SEQ ID NO: 12782 - RNA, 20 nt, synthetic construct
  source 1..20: mol_type = other RNA
taacaagtgtctttgaaata

SEQ ID NO: 12783 - RNA, 20 nt, synthetic construct
  source 1..20: mol_type = other RNA
ctgaatattcttccgcctcc

SEQ ID NO: 12784 - RNA, 20 nt, synthetic construct
  source 1..20: mol_type = other RNA
ggccactggaaattccaaag

SEQ ID NO: 12785 - RNA, 20 nt, synthetic construct
  source 1..20: mol_type = other RNA
atggtaaaacaccaagggcc

SEQ ID NO: 12786 - RNA, 20 nt, synthetic construct
  source 1..20: mol_type = other RNA
ggttgcagtactcccacctg

SEQ ID NO: 12787 - RNA, 20 nt, synthetic construct
  source 1..20: mol_type = other RNA
gagcatcgcgtcaggttgca

SEQ ID NO: 12788 - RNA, 20 nt, synthetic construct
  source 1..20: mol_type = other RNA
cttctgtgtctgagcatcgc

SEQ ID NO: 12789 - RNA, 20 nt, synthetic construct
  source 1..20: mol_type = other RNA
gaggagcgaccacagtccct

SEQ ID NO: 12790 - RNA, 20 nt, synthetic construct
  source 1..20: mol_type = other RNA
ctcctccgactgtcatccag

SEQ ID NO: 12791 - RNA, 20 nt, synthetic construct
  source 1..20: mol_type = other RNA
gtgtcttaccttgtctagca

SEQ ID NO: 12792 - RNA, 20 nt, synthetic construct
  source 1..20: mol_type = other RNA
taccttgtctagcacatacc

SEQ ID NO: 12793 - RNA, 20 nt, synthetic construct
  source 1..20: mol_type = other RNA
agcacatacctctctatgtg

SEQ ID NO: 12794 - RNA, 20 nt, synthetic construct
  source 1..20: mol_type = other RNA
aagcacatagagaggtatgt

SEQ ID NO: 12795 - RNA, 20 nt, synthetic construct
  source 1..20: mol_type = other RNA
tttcatcccgttgtccaagc

SEQ ID NO: 12796 - RNA, 20 nt, synthetic construct
  source 1..20: mol_type = other RNA
tggcagaacctcaaccaaca

SEQ ID NO: 12797 - RNA, 20 nt, synthetic construct
  source 1..20: mol_type = other RNA
cagtgccgtccctgggaaag

SEQ ID NO: 12798 - RNA, 20 nt, synthetic construct
  source 1..20: mol_type = other RNA
ctgggaaagccagagctgtg

SEQ ID NO: 12799 - RNA, 20 nt, synthetic construct
  source 1..20: mol_type = other RNA
ctactcccacaagttgtgcc

SEQ ID NO: 12800 - RNA, 20 nt, synthetic construct
  source 1..20: mol_type = other RNA
taaagtcactactcccacaa

SEQ ID NO: 12801 - RNA, 20 nt, synthetic construct
  source 1..20: mol_type = other RNA
cagtcaaattcctattctaa

SEQ ID NO: 12802 - RNA, 20 nt, synthetic construct
  source 1..20: mol_type = other RNA
aattcctattctaacatgct

SEQ ID NO: 12803 - RNA, 20 nt, synthetic construct
  source 1..20: mol_type = other RNA
actgtgtgattatttccaag

SEQ ID NO: 12804 - RNA, 20 nt, synthetic construct
  source 1..20: mol_type = other RNA
tcagcgttgtggctcctgag

SEQ ID NO: 12805 - RNA, 20 nt, synthetic construct
  source 1..20: mol_type = other RNA
ggcttctctaggacgacaga

SEQ ID NO: 12806 - RNA, 20 nt, synthetic construct
  source 1..20: mol_type = other RNA
tgtcaggcttctctaggacg

SEQ ID NO: 12807 - RNA, 20 nt, synthetic construct
  source 1..20: mol_type = other RNA
tcctagagaagcctgacatg

SEQ ID NO: 12808 - RNA, 20 nt, synthetic construct
  source 1..20: mol_type = other RNA
tagagaagcctgacatgact

SEQ ID NO: 12809 - RNA, 20 nt, synthetic construct
  source 1..20: mol_type = other RNA
tgggtctatgtggctgcctg

SEQ ID NO: 12810 - RNA, 20 nt, synthetic construct
  source 1..20: mol_type = other RNA
atgtggctgcctggctgtct

SEQ ID NO: 12811 - RNA, 20 nt, synthetic construct
  source 1..20: mol_type = other RNA
gtaatcatctgttttatttt

SEQ ID NO: 12812 - RNA, 20 nt, synthetic construct
  source 1..20: mol_type = other RNA
gtagaaaaaaataaaaataa

SEQ ID NO: 12813 - RNA, 20 nt, synthetic construct
  source 1..20: mol_type = other RNA
cagtaacagtggttgccttc

SEQ ID NO: 12814 - RNA, 20 nt, synthetic construct
  source 1..20: mol_type = other RNA
atggggctcctgggcagccc

SEQ ID NO: 12815 - RNA, 20 nt, synthetic construct
  source 1..20: mol_type = other RNA
ggaaaaaaatgtaagccact

SEQ ID NO: 12816 - RNA, 20 nt, synthetic construct
  source 1..20: mol_type = other RNA
aaatcaaagtggcttacatt

SEQ ID NO: 12817 - RNA, 20 nt, synthetic construct
  source 1..20: mol_type = other RNA
gcaaagggaaaaagagtcca

SEQ ID NO: 12818 - RNA, 20 nt, synthetic construct
  source 1..20: mol_type = other RNA
ttccagtattttcctctgcc

SEQ ID NO: 12819 - RNA, 20 nt, synthetic construct
  source 1..20: mol_type = other RNA
aaagagaagaggcctgagaa

SEQ ID NO: 12820 - RNA, 20 nt, synthetic construct
  source 1..20: mol_type = other RNA
tctaagccaggggtccccac

SEQ ID NO: 12821 - RNA, 20 nt, synthetic construct
  source 1..20: mol_type = other RNA
ccactccagtactggtactg

SEQ ID NO: 12822 - RNA, 20 nt, synthetic construct
  source 1..20: mol_type = other RNA
gatcagaggcagcattagat

SEQ ID NO: 12823 - RNA, 20 nt, synthetic construct
  source 1..20: mol_type = other RNA
tgcttccatcacccccagat

SEQ ID NO: 12824 - RNA, 20 nt, synthetic construct
  source 1..20: mol_type = other RNA
catctgggggtgatggaagc

SEQ ID NO: 12825 - RNA, 20 nt, synthetic construct
  source 1..20: mol_type = other RNA
tcctttaaccatcgccccct

SEQ ID NO: 12826 - RNA, 20 nt, synthetic construct
  source 1..20: mol_type = other RNA
ctggtgccaaaaaagttggg

SEQ ID NO: 12827 - RNA, 20 nt, synthetic construct
  source 1..20: mol_type = other RNA
gagatgccctctatgaggct

SEQ ID NO: 12828 - RNA, 20 nt, synthetic construct
  source 1..20: mol_type = other RNA
gatttttctagaaaagattt

SEQ ID NO: 12829 - RNA, 20 nt, synthetic construct
  source 1..20: mol_type = other RNA
catggtgacctgatggccca

SEQ ID NO: 12830 - RNA, 20 nt, synthetic construct
  source 1..20: mol_type = other RNA
ccatgagacttcccttagcc

SEQ ID NO: 12831 - RNA, 20 nt, synthetic construct
  source 1..20: mol_type = other RNA
tccctattcataggccccaa

SEQ ID NO: 12832 - RNA, 20 nt, synthetic construct
  source 1..20: mol_type = other RNA
gtgttcccccactctcacac

SEQ ID NO: 12833 - RNA, 20 nt, synthetic construct
  source 1..20: mol_type = other RNA
ccagcagataccagctgggt

SEQ ID NO: 12834 - RNA, 20 nt, synthetic construct
  source 1..20: mol_type = other RNA
ggaccgagttacattgtagg

SEQ ID NO: 12835 - RNA, 20 nt, synthetic construct
  source 1..20: mol_type = other RNA
tacaatgtaactcggtcctg

SEQ ID NO: 12836 - RNA, 20 nt, synthetic construct
  source 1..20: mol_type = other RNA
ccagatagagtgtcaggacc

SEQ ID NO: 12837 - RNA, 20 nt, synthetic construct
  source 1..20: mol_type = other RNA
tgacactctatctggagaca

SEQ ID NO: 12838 - RNA, 20 nt, synthetic construct
  source 1..20: mol_type = other RNA
gatcccacaagttaaggctc

SEQ ID NO: 12839 - RNA, 20 nt, synthetic construct
  source 1..20: mol_type = other RNA
tgtaggactgagccttaact

SEQ ID NO: 12840 - RNA, 20 nt, synthetic construct
  source 1..20: mol_type = other RNA
tacaagactgccccactgca

SEQ ID NO: 12841 - RNA, 20 nt, synthetic construct
  source 1..20: mol_type = other RNA
cagcctgcaacttgggattg

SEQ ID NO: 12842 - RNA, 20 nt, synthetic construct
  source 1..20: mol_type = other RNA
tatagaaaaacagatcttta

SEQ ID NO: 12843 - RNA, 20 nt, synthetic construct
  source 1..20: mol_type = other RNA
ccagtaccctaagtgttcag

SEQ ID NO: 12844 - RNA, 20 nt, synthetic construct
  source 1..20: mol_type = other RNA
tgttgggtttttatggaggc

SEQ ID NO: 12845 - RNA, 20 nt, synthetic construct
  source 1..20: mol_type = other RNA
catggttggttcccttggca

SEQ ID NO: 12846 - RNA, 20 nt, synthetic construct
  source 1..20: mol_type = other RNA
ctgccccccagttcttaaca

SEQ ID NO: 12847 - RNA, 20 nt, synthetic construct
  source 1..20: mol_type = other RNA
tggctgtggatggtgcataa

SEQ ID NO: 12848 - RNA, 20 nt, synthetic construct
  source 1..20: mol_type = other RNA
tctacctgataaagcctgtt

SEQ ID NO: 12849 - RNA, 20 nt, synthetic construct
  source 1..20: mol_type = other RNA
ctggggcgctgaggggtctt

SEQ ID NO: 12850 - RNA, 20 nt, synthetic construct
  source 1..20: mol_type = other RNA
cactgtcctctgaggctcta

SEQ ID NO: 12851 - RNA, 20 nt, synthetic construct
  source 1..20: mol_type = other RNA
tagagctagagcctcagagg

SEQ ID NO: 12852 - RNA, 20 nt, synthetic construct
  source 1..20: mol_type = other RNA
tctgaggctctagctctaag

SEQ ID NO: 12853 - RNA, 20 nt, synthetic construct
  source 1..20: mol_type = other RNA
agctcctggagaagtggcac

SEQ ID NO: 12854 - RNA, 20 nt, synthetic construct
  source 1..20: mol_type = other RNA
ttggagaatgtgccacttct

SEQ ID NO: 12855 - RNA, 20 nt, synthetic construct
  source 1..20: mol_type = other RNA
ccacaccctggttaagggtg

SEQ ID NO: 12856 - RNA, 20 nt, synthetic construct
  source 1..20: mol_type = other RNA
aaaggagttatgaggccaca

SEQ ID NO: 12857 - RNA, 20 nt, synthetic construct
  source 1..20: mol_type = other RNA
tagtcaaaaggagttatgag

SEQ ID NO: 12858 - RNA, 20 nt, synthetic construct
  source 1..20: mol_type = other RNA
aaaaatataataatgataga

SEQ ID NO: 12859 - RNA, 20 nt, synthetic construct
  source 1..20: mol_type = other RNA
tctaagaatagatgtgaaat

SEQ ID NO: 12860 - RNA, 20 nt, synthetic construct
  source 1..20: mol_type = other RNA
ccatcagggttacggcagta

SEQ ID NO: 12861 - RNA, 20 nt, synthetic construct
  source 1..20: mol_type = other RNA
aaaagttttcttggattcat

SEQ ID NO: 12862 - RNA, 20 nt, synthetic construct
  source 1..20: mol_type = other RNA
aattcccaaagggcaaactt

SEQ ID NO: 12863 - RNA, 20 nt, synthetic construct
  source 1..20: mol_type = other RNA
caccgaacccttctttgtct

SEQ ID NO: 12864 - RNA, 20 nt, synthetic construct
  source 1..20: mol_type = other RNA
agcgtgggatgcatgaaaaa

SEQ ID NO: 12865 - RNA, 20 nt, synthetic construct
  source 1..20: mol_type = other RNA
ttatgatgaaaaactgtcct

SEQ ID NO: 12866 - RNA, 20 nt, synthetic construct
  source 1..20: mol_type = other RNA
tcttctgcagctgagaagaa

SEQ ID NO: 12867 - RNA, 20 nt, synthetic construct
  source 1..20: mol_type = other RNA
ctaatgggactcatgagtag

SEQ ID NO: 12868 - RNA, 20 nt, synthetic construct
  source 1..20: mol_type = other RNA
ctaagcaatgtcgctaatgg

SEQ ID NO: 12869 - RNA, 20 nt, synthetic construct
  source 1..20: mol_type = other RNA
cattagcgacattgcttaga

SEQ ID NO: 12870 - RNA, 20 nt, synthetic construct
  source 1..20: mol_type = other RNA
cagagcaatgaggaaggaac

SEQ ID NO: 12871 - RNA, 20 nt, synthetic construct
  source 1..20: mol_type = other RNA
attccccttcccctgatcca

SEQ ID NO: 12872 - RNA, 20 nt, synthetic construct
  source 1..20: mol_type = other RNA
gcaggaagaaaatagggaac

SEQ ID NO: 12873 - RNA, 20 nt, synthetic construct
  source 1..20: mol_type = other RNA
gtccgagttacagaacacca

SEQ ID NO: 12874 - RNA, 20 nt, synthetic construct
  source 1..20: mol_type = other RNA
agggtggtgttctgtaactc

SEQ ID NO: 12875 - RNA, 20 nt, synthetic construct
  source 1..20: mol_type = other RNA
gagttacagaacaccaccct

SEQ ID NO: 12876 - RNA, 20 nt, synthetic construct
  source 1..20: mol_type = other RNA
cttcacatggcagacccaac

SEQ ID NO: 12877 - RNA, 20 nt, synthetic construct
  source 1..20: mol_type = other RNA
gccatgtgaagggaccttga

SEQ ID NO: 12878 - RNA, 20 nt, synthetic construct
  source 1..20: mol_type = other RNA
tcagtggacttggaggccaa

SEQ ID NO: 12879 - RNA, 20 nt, synthetic construct
  source 1..20: mol_type = other RNA
actgaagaccagcatcctga

SEQ ID NO: 12880 - RNA, 20 nt, synthetic construct
  source 1..20: mol_type = other RNA
catttgggccactcctgggg

SEQ ID NO: 12881 - RNA, 20 nt, synthetic construct
  source 1..20: mol_type = other RNA
ctggatttagtgtgagttga

SEQ ID NO: 12882 - RNA, 20 nt, synthetic construct
  source 1..20: mol_type = other RNA
gctatcaactcacactaaat

SEQ ID NO: 12883 - RNA, 20 nt, synthetic construct
  source 1..20: mol_type = other RNA
gtgctattgcagaagcatct

SEQ ID NO: 12884 - RNA, 20 nt, synthetic construct
  source 1..20: mol_type = other RNA
cttgatggggtcagttccag

SEQ ID NO: 12885 - RNA, 20 nt, synthetic construct
  source 1..20: mol_type = other RNA
gttccagttctccgcttctg

SEQ ID NO: 12886 - RNA, 20 nt, synthetic construct
  source 1..20: mol_type = other RNA
aggatagagagcccaggcag

SEQ ID NO: 12887 - RNA, 20 nt, synthetic construct
  source 1..20: mol_type = other RNA
gactgggcttaaattcaagg

SEQ ID NO: 12888 - RNA, 20 nt, synthetic construct
  source 1..20: mol_type = other RNA
gacttacctgcctcaaacac

SEQ ID NO: 12889 - RNA, 20 nt, synthetic construct
  source 1..20: mol_type = other RNA
caggcactactgtgggtgtt

SEQ ID NO: 12890 - RNA, 20 nt, synthetic construct
  source 1..20: mol_type = other RNA
aaggtgcatgagtcccaggc

SEQ ID NO: 12891 - RNA, 20 nt, synthetic construct
  source 1..20: mol_type = other RNA
tcacccacattgaggatgta

SEQ ID NO: 12892 - RNA, 20 nt, synthetic construct
  source 1..20: mol_type = other RNA
attggaagaaatcttgttcc

SEQ ID NO: 12893 - RNA, 20 nt, synthetic construct
  source 1..20: mol_type = other RNA
tacatcaaagtaaggtgggg

SEQ ID NO: 12894 - RNA, 20 nt, synthetic construct
  source 1..20: mol_type = other RNA
gatgggaaccctcctcacca

SEQ ID NO: 12895 - RNA, 20 nt, synthetic construct
  source 1..20: mol_type = other RNA
tcaggatttccaagtgtctg

SEQ ID NO: 12896 - RNA, 20 nt, synthetic construct
  source 1..20: mol_type = other RNA
aacctgaatatcccaccaac

SEQ ID NO: 12897 - RNA, 20 nt, synthetic construct
  source 1..20: mol_type = other RNA
tttgtaaaaaagaagcatgg

SEQ ID NO: 12898 - RNA, 20 nt, synthetic construct
  source 1..20: mol_type = other RNA
tcaaaactataaatattaat

SEQ ID NO: 12899 - RNA, 20 nt, synthetic construct
  source 1..20: mol_type = other RNA
ccagcccttcaaggtcttca

SEQ ID NO: 12900 - RNA, 20 nt, synthetic construct
  source 1..20: mol_type = other RNA
catctttggtaccacccatc

SEQ ID NO: 12901 - RNA, 20 nt, synthetic construct
  source 1..20: mol_type = other RNA
ctggaggtagggaaagtgtc

SEQ ID NO: 12902 - RNA, 20 nt, synthetic construct
  source 1..20: mol_type = other RNA
gttagtcatgggaggctccc

SEQ ID NO: 12903 - RNA, 20 nt, synthetic construct
  source 1..20: mol_type = other RNA
tgggaggctccccagaagaa

SEQ ID NO: 12904 - RNA, 20 nt, synthetic construct
  source 1..20: mol_type = other RNA
tgaagctggctgagagaagg

SEQ ID NO: 12905 - RNA, 20 nt, synthetic construct
  source 1..20: mol_type = other RNA
tatgttgaaatgttgccttc

SEQ ID NO: 12906 - RNA, 20 nt, synthetic construct
  source 1..20: mol_type = other RNA
ctgtgtgtggacatatgtgc

SEQ ID NO: 12907 - RNA, 20 nt, synthetic construct
  source 1..20: mol_type = other RNA
acacacagagactcacatgc

SEQ ID NO: 12908 - RNA, 20 nt, synthetic construct
  source 1..20: mol_type = other RNA
tttgttgtttactaccactt

SEQ ID NO: 12909 - RNA, 20 nt, synthetic construct
  source 1..20: mol_type = other RNA
tttaattcaggacgaattcc

SEQ ID NO: 12910 - RNA, 20 nt, synthetic construct
  source 1..20: mol_type = other RNA
tgaattaaacgacacaattg

SEQ ID NO: 12911 - RNA, 20 nt, synthetic construct
  source 1..20: mol_type = other RNA
aagttagcaattgtgtcgtt

SEQ ID NO: 12912 - RNA, 20 nt, synthetic construct
  source 1..20: mol_type = other RNA
catttgagtccaagttagca

SEQ ID NO: 12913 - RNA, 20 nt, synthetic construct
  source 1..20: mol_type = other RNA
tggaagcattgtaggggggt

SEQ ID NO: 12914 - RNA, 20 nt, synthetic construct
  source 1..20: mol_type = other RNA
gtctcagaacaaggtaagaa

SEQ ID NO: 12915 - RNA, 20 nt, synthetic construct
  source 1..20: mol_type = other RNA
cagaacaaggtaagaacagg

SEQ ID NO: 12916 - RNA, 20 nt, synthetic construct
  source 1..20: mol_type = other RNA
ttccatgtaagccccacaaa

SEQ ID NO: 12917 - RNA, 20 nt, synthetic construct
  source 1..20: mol_type = other RNA
cactgtcagatgaaaagaaa

SEQ ID NO: 12918 - RNA, 20 nt, synthetic construct
  source 1..20: mol_type = other RNA
gatgaaaagaaagggaagtt

SEQ ID NO: 12919 - RNA, 20 nt, synthetic construct
  source 1..20: mol_type = other RNA
catttctaaaaacttccctt

SEQ ID NO: 12920 - RNA, 20 nt, synthetic construct
  source 1..20: mol_type = other RNA
tccctcactgcaaagtgtca

SEQ ID NO: 12921 - RNA, 20 nt, synthetic construct
  source 1..20: mol_type = other RNA
atcacaggcacagatttttt

SEQ ID NO: 12922 - RNA, 20 nt, synthetic construct
  source 1..20: mol_type = other RNA
aggttctgtgggttcggact

SEQ ID NO: 12923 - RNA, 20 nt, synthetic construct
  source 1..20: mol_type = other RNA
gaacccacagaacctggaca

SEQ ID NO: 12924 - RNA, 20 nt, synthetic construct
  source 1..20: mol_type = other RNA
tatgtgttcttcctaagaga

SEQ ID NO: 12925 - RNA, 20 nt, synthetic construct
  source 1..20: mol_type = other RNA
cttaggaagaacacatagga

SEQ ID NO: 12926 - RNA, 20 nt, synthetic construct
  source 1..20: mol_type = other RNA
gtgtcctatgtgttcttcct

SEQ ID NO: 12927 - RNA, 20 nt, synthetic construct
  source 1..20: mol_type = other RNA
ctttagaggagaacagcaat

SEQ ID NO: 12928 - RNA, 20 nt, synthetic construct
  source 1..20: mol_type = other RNA
atggcatttcacaaacttac

SEQ ID NO: 12929 - RNA, 20 nt, synthetic construct
  source 1..20: mol_type = other RNA
gtgaggacatagaccaccac

SEQ ID NO: 12930 - RNA, 20 nt, synthetic construct
  source 1..20: mol_type = other RNA
atgtcctcactgactatcaa

SEQ ID NO: 12931 - RNA, 20 nt, synthetic construct
  source 1..20: mol_type = other RNA
tcactgactatcaacatact

SEQ ID NO: 12932 - RNA, 20 nt, synthetic construct
  source 1..20: mol_type = other RNA
tagaaagtaagtgagtcaag

SEQ ID NO: 12933 - RNA, 20 nt, synthetic construct
  source 1..20: mol_type = other RNA
agaaacatcccccaaaagta

SEQ ID NO: 12934 - RNA, 20 nt, synthetic construct
  source 1..20: mol_type = other RNA
tctgatcttacctgaaaagt

SEQ ID NO: 12935 - RNA, 20 nt, synthetic construct
  source 1..20: mol_type = other RNA
ctgctgctcaggatcgtatc

SEQ ID NO: 12936 - RNA, 20 nt, synthetic construct
  source 1..20: mol_type = other RNA
ctcttcaaggagccagatac

SEQ ID NO: 12937 - RNA, 20 nt, synthetic construct
  source 1..20: mol_type = other RNA
ctttcattttttatgacaag

SEQ ID NO: 12938 - RNA, 20 nt, synthetic construct
  source 1..20: mol_type = other RNA
taaaaaatgaaagagacctt

SEQ ID NO: 12939 - RNA, 20 nt, synthetic construct
  source 1..20: mol_type = other RNA
tgggctggtcacttttgtca

SEQ ID NO: 12940 - RNA, 20 nt, synthetic construct
  source 1..20: mol_type = other RNA
cttttgtcagagtccagggc

SEQ ID NO: 12941 - RNA, 20 nt, synthetic construct
  source 1..20: mol_type = other RNA
gagtccagggctgtggggtg

SEQ ID NO: 12942 - RNA, 20 nt, synthetic construct
  source 1..20: mol_type = other RNA
agggctgtggggtgaaagcc

SEQ ID NO: 12943 - RNA, 20 nt, synthetic construct
  source 1..20: mol_type = other RNA
ccaggagagcaaagctaagt

SEQ ID NO: 12944 - RNA, 20 nt, synthetic construct
  source 1..20: mol_type = other RNA
cttagctttgctctcctggg

SEQ ID NO: 12945 - RNA, 20 nt, synthetic construct
  source 1..20: mol_type = other RNA
ggatagtagaaacttcgagc

SEQ ID NO: 12946 - RNA, 20 nt, synthetic construct
  source 1..20: mol_type = other RNA
tttgctttgggaatatgaac

SEQ ID NO: 12947 - RNA, 20 nt, synthetic construct
  source 1..20: mol_type = other RNA
tcctggctttctgtacaatg

SEQ ID NO: 12948 - RNA, 20 nt, synthetic construct
  source 1..20: mol_type = other RNA
aattggatggtttgttctac

SEQ ID NO: 12949 - RNA, 20 nt, synthetic construct
  source 1..20: mol_type = other RNA
tgaagataagaccccatgtc

SEQ ID NO: 12950 - RNA, 20 nt, synthetic construct
  source 1..20: mol_type = other RNA
tatcttcaagacttttttcc

SEQ ID NO: 12951 - RNA, 20 nt, synthetic construct
  source 1..20: mol_type = other RNA
tccctctgcagattccctct

SEQ ID NO: 12952 - RNA, 20 nt, synthetic construct
  source 1..20: mol_type = other RNA
aaaaaatcacttgcactggg

SEQ ID NO: 12953 - RNA, 20 nt, synthetic construct
  source 1..20: mol_type = other RNA
tgcggtttatacaggtccaa

SEQ ID NO: 12954 - RNA, 20 nt, synthetic construct
  source 1..20: mol_type = other RNA
tctcctctgcttctgtgtgg

SEQ ID NO: 12955 - RNA, 20 nt, synthetic construct
  source 1..20: mol_type = other RNA
catggccagagcaggagcaa

SEQ ID NO: 12956 - RNA, 20 nt, synthetic construct
  source 1..20: mol_type = other RNA
cttgctcctgctctggccat

SEQ ID NO: 12957 - RNA, 20 nt, synthetic construct
  source 1..20: mol_type = other RNA
tttggtattgtgcagcaccc

SEQ ID NO: 12958 - RNA, 20 nt, synthetic construct
  source 1..20: mol_type = other RNA
ggtcatttggtattgtgcag

SEQ ID NO: 12959 - RNA, 20 nt, synthetic construct
  source 1..20: mol_type = other RNA
ccagtgatggagctatggcc

SEQ ID NO: 12960 - RNA, 20 nt, synthetic construct
  source 1..20: mol_type = other RNA
ccacctaaatctcgtgttca

SEQ ID NO: 12961 - RNA, 20 nt, synthetic construct
  source 1..20: mol_type = other RNA
ctgatgaaacagattgagaa

SEQ ID NO: 12962 - RNA, 20 nt, synthetic construct
  source 1..20: mol_type = other RNA
gttctcaatctgtttcatca

SEQ ID NO: 12963 - RNA, 20 nt, synthetic construct
  source 1..20: mol_type = other RNA
gtttccagcaaattgtgaat

SEQ ID NO: 12964 - RNA, 20 nt, synthetic construct
  source 1..20: mol_type = other RNA
ctgattctgggtggccgagg

SEQ ID NO: 12965 - RNA, 20 nt, synthetic construct
  source 1..20: mol_type = other RNA
ctctgacaccctcggccacc

SEQ ID NO: 12966 - RNA, 20 nt, synthetic construct
  source 1..20: mol_type = other RNA
gagggacagcgccaagttca

SEQ ID NO: 12967 - RNA, 20 nt, synthetic construct
  source 1..20: mol_type = other RNA
agccccttcaggtatcctct

SEQ ID NO: 12968 - RNA, 20 nt, synthetic construct
  source 1..20: mol_type = other RNA
agagaaaaatatggtccagc

SEQ ID NO: 12969 - RNA, 20 nt, synthetic construct
  source 1..20: mol_type = other RNA
tcaaggccttcatcctacaa

SEQ ID NO: 12970 - RNA, 20 nt, synthetic construct
  source 1..20: mol_type = other RNA
tcctgggtgcacaccaagaa

SEQ ID NO: 12971 - RNA, 20 nt, synthetic construct
  source 1..20: mol_type = other RNA
aggctgttcttggagcccac

SEQ ID NO: 12972 - RNA, 20 nt, synthetic construct
  source 1..20: mol_type = other RNA
tcaccccacgctggtgaaga

SEQ ID NO: 12973 - RNA, 20 nt, synthetic construct
  source 1..20: mol_type = other RNA
gggttttatgggccatggcc

SEQ ID NO: 12974 - RNA, 20 nt, synthetic construct
  source 1..20: mol_type = other RNA
atcacatgaaaggctcaagg

SEQ ID NO: 12975 - RNA, 20 nt, synthetic construct
  source 1..20: mol_type = other RNA
ccaaagcccttgagcctttc

SEQ ID NO: 12976 - RNA, 20 nt, synthetic construct
  source 1..20: mol_type = other RNA
gcctcctgaatagcagtgat

SEQ ID NO: 12977 - RNA, 20 nt, synthetic construct
  source 1..20: mol_type = other RNA
tgggctcaagcaattcttcc

SEQ ID NO: 12978 - RNA, 20 nt, synthetic construct
  source 1..20: mol_type = other RNA
cccagcctggagtgcagtgg

SEQ ID NO: 12979 - RNA, 20 nt, synthetic construct
  source 1..20: mol_type = other RNA
tgatctgtcacccagcctgg

SEQ ID NO: 12980 - RNA, 20 nt, synthetic construct
  source 1..20: mol_type = other RNA
caacaaaagaaaagaaaaca

SEQ ID NO: 12981 - RNA, 20 nt, synthetic construct
  source 1..20: mol_type = other RNA
aaaaaaaaaaaaacccacac

SEQ ID NO: 12982 - RNA, 20 nt, synthetic construct
  source 1..20: mol_type = other RNA
tctttgattttctctttcct

SEQ ID NO: 12983 - RNA, 20 nt, synthetic construct
  source 1..20: mol_type = other RNA
ggcttaataaaacaaaattt

SEQ ID NO: 12984 - RNA, 20 nt, synthetic construct
  source 1..20: mol_type = other RNA
aaatagactaactttaagtg

SEQ ID NO: 12985 - RNA, 20 nt, synthetic construct
  source 1..20: mol_type = other RNA
cctaggtccaaatagactaa

SEQ ID NO: 12986 - RNA, 20 nt, synthetic construct
  source 1..20: mol_type = other RNA
atttggacctaggtgacagt

SEQ ID NO: 12987 - RNA, 20 nt, synthetic construct
  source 1..20: mol_type = other RNA
caaacctgcctctcctacaa

SEQ ID NO: 12988 - RNA, 20 nt, synthetic construct
  source 1..20: mol_type = other RNA
cctgtcccaaacctgcctct

SEQ ID NO: 12989 - RNA, 20 nt, synthetic construct
  source 1..20: mol_type = other RNA
gcattgacaccctgccttcc

SEQ ID NO: 12990 - RNA, 20 nt, synthetic construct
  source 1..20: mol_type = other RNA
atgcagacagggatgagcat

SEQ ID NO: 12991 - RNA, 20 nt, synthetic construct
  source 1..20: mol_type = other RNA
caagcccatggcagcttctc

SEQ ID NO: 12992 - RNA, 20 nt, synthetic construct
  source 1..20: mol_type = other RNA
gtgaactgaggggtgatgtc

SEQ ID NO: 12993 - RNA, 20 nt, synthetic construct
  source 1..20: mol_type = other RNA
gaggattccaggacatcacc

SEQ ID NO: 12994 - RNA, 20 nt, synthetic construct
  source 1..20: mol_type = other RNA
tggaatcctctgacactcta

SEQ ID NO: 12995 - RNA, 20 nt, synthetic construct
  source 1..20: mol_type = other RNA
tccccaccatcccagcaaat

SEQ ID NO: 12996 - RNA, 20 nt, synthetic construct
  source 1..20: mol_type = other RNA
tcagagagctggggtgttct

SEQ ID NO: 12997 - RNA, 20 nt, synthetic construct
  source 1..20: mol_type = other RNA
cttaggaaatgtggggtttt

SEQ ID NO: 12998 - RNA, 20 nt, synthetic construct
  source 1..20: mol_type = other RNA
agggcatttagtgctccatg

SEQ ID NO: 12999 - RNA, 20 nt, synthetic construct
  source 1..20: mol_type = other RNA
tcactctacaggttccctca

SEQ ID NO: 13000 - RNA, 20 nt, synthetic construct
  source 1..20: mol_type = other RNA
agaagcagaaagtgtgtctg

SEQ ID NO: 13001 - RNA, 20 nt, synthetic construct
  source 1..20: mol_type = other RNA
gcttcaaagttggtgctaat

SEQ ID NO: 13002 - RNA, 20 nt, synthetic construct
  source 1..20: mol_type = other RNA
gaatacggcatttctcattt

SEQ ID NO: 13003 - RNA, 20 nt, synthetic construct
  source 1..20: mol_type = other RNA
aaaaaccagagttctaatct

SEQ ID NO: 13004 - RNA, 20 nt, synthetic construct
  source 1..20: mol_type = other RNA
ctgggattctaaggtatatg

SEQ ID NO: 13005 - RNA, 20 nt, synthetic construct
  source 1..20: mol_type = other RNA
ttggaaaacaataccattta

SEQ ID NO: 13006 - RNA, 20 nt, synthetic construct
  source 1..20: mol_type = other RNA
agcattttactgcattctta

SEQ ID NO: 13007 - RNA, 20 nt, synthetic construct
  source 1..20: mol_type = other RNA
ggctgagacatcatcaagag

SEQ ID NO: 13008 - RNA, 20 nt, synthetic construct
  source 1..20: mol_type = other RNA
cagccagacattctgcccag

SEQ ID NO: 13009 - RNA, 20 nt, synthetic construct
  source 1..20: mol_type = other RNA
tcaatgccctcttcaattaa

SEQ ID NO: 13010 - RNA, 20 nt, synthetic construct
  source 1..20: mol_type = other RNA
tttcatattaattgaagagg

SEQ ID NO: 13011 - RNA, 20 nt, synthetic construct
  source 1..20: mol_type = other RNA
tccctactttcaaaggctaa

SEQ ID NO: 13012 - RNA, 20 nt, synthetic construct
  source 1..20: mol_type = other RNA
ataggcaaccacaggcaaat

SEQ ID NO: 13013 - RNA, 20 nt, synthetic construct
  source 1..20: mol_type = other RNA
gtgaagcaaggcagtgccag

SEQ ID NO: 13014 - RNA, 20 nt, synthetic construct
  source 1..20: mol_type = other RNA
tcactgacaaagtaatgcca

SEQ ID NO: 13015 - RNA, 20 nt, synthetic construct
  source 1..20: mol_type = other RNA
aaaacaatttgttacgtggg

SEQ ID NO: 13016 - RNA, 20 nt, synthetic construct
  source 1..20: mol_type = other RNA
ggagtgggtagaccacattc

SEQ ID NO: 13017 - RNA, 20 nt, synthetic construct
  source 1..20: mol_type = other RNA
aggcaaagtcaggagtgggt

SEQ ID NO: 13018 - RNA, 20 nt, synthetic construct
  source 1..20: mol_type = other RNA
acccactcctgactttgcct

SEQ ID NO: 13019 - RNA, 20 nt, synthetic construct
  source 1..20: mol_type = other RNA
atgtctccataatcagtctt

SEQ ID NO: 13020 - RNA, 20 nt, synthetic construct
  source 1..20: mol_type = other RNA
cttgaagactgattatggag

SEQ ID NO: 13021 - RNA, 20 nt, synthetic construct
  source 1..20: mol_type = other RNA
ccataatcagtcttcaaggg

SEQ ID NO: 13022 - RNA, 20 nt, synthetic construct
  source 1..20: mol_type = other RNA
tcaagggacttgggcaaggg

SEQ ID NO: 13023 - RNA, 20 nt, synthetic construct
  source 1..20: mol_type = other RNA
ctctcttttttgttttcaga

SEQ ID NO: 13024 - RNA, 20 nt, synthetic construct
  source 1..20: mol_type = other RNA
ttgagtctcttaatcataat

SEQ ID NO: 13025 - RNA, 20 nt, synthetic construct
  source 1..20: mol_type = other RNA
cttaatcataatttcagcat

SEQ ID NO: 13026 - RNA, 20 nt, synthetic construct
  source 1..20: mol_type = other RNA
aaaccccacttacctgggga

SEQ ID NO: 13027 - RNA, 20 nt, synthetic construct
  source 1..20: mol_type = other RNA
aatttcacatgaaaaataat

SEQ ID NO: 13028 - RNA, 20 nt, synthetic construct
  source 1..20: mol_type = other RNA
gtctaatttcacatgaaaaa

SEQ ID NO: 13029 - RNA, 20 nt, synthetic construct
  source 1..20: mol_type = other RNA
ttactgttttgcaccatgtt

SEQ ID NO: 13030 - RNA, 20 nt, synthetic construct
  source 1..20: mol_type = other RNA
aatgtgtgtgtgagggtgtt

SEQ ID NO: 13031 - RNA, 20 nt, synthetic construct
  source 1..20: mol_type = other RNA
cctgcctaacaccctcacac

SEQ ID NO: 13032 - RNA, 20 nt, synthetic construct
  source 1..20: mol_type = other RNA
gcctctcccccagcttcagg

SEQ ID NO: 13033 - RNA, 20 nt, synthetic construct
  source 1..20: mol_type = other RNA
aggatggcatttggtattgg

SEQ ID NO: 13034 - RNA, 20 nt, synthetic construct
  source 1..20: mol_type = other RNA
gggcataccgcaaagagaag

SEQ ID NO: 13035 - RNA, 20 nt, synthetic construct
  source 1..20: mol_type = other RNA
gccttacccccttggcagta

SEQ ID NO: 13036 - RNA, 20 nt, synthetic construct
  source 1..20: mol_type = other RNA
taaagtctcagctctacttt

SEQ ID NO: 13037 - RNA, 20 nt, synthetic construct
  source 1..20: mol_type = other RNA
cagctctactttctcagagg

SEQ ID NO: 13038 - RNA, 20 nt, synthetic construct
  source 1..20: mol_type = other RNA
gaacagttttccagggcccc

SEQ ID NO: 13039 - RNA, 20 nt, synthetic construct
  source 1..20: mol_type = other RNA
ggggccctggaaaactgttc

SEQ ID NO: 13040 - RNA, 20 nt, synthetic construct
  source 1..20: mol_type = other RNA
atctggcaagtggcagagtc

SEQ ID NO: 13041 - RNA, 20 nt, synthetic construct
  source 1..20: mol_type = other RNA
agttcaggtctatctggcaa

SEQ ID NO: 13042 - RNA, 20 nt, synthetic construct
  source 1..20: mol_type = other RNA
ttttcctattatttttaaaa

SEQ ID NO: 13043 - RNA, 20 nt, synthetic construct
  source 1..20: mol_type = other RNA
aggaggtgaggttttaaaaa

SEQ ID NO: 13044 - RNA, 20 nt, synthetic construct
  source 1..20: mol_type = other RNA
gggagcactgaggccaggta

SEQ ID NO: 13045 - RNA, 20 nt, synthetic construct
  source 1..20: mol_type = other RNA
gtaccaccctccaccttctc

SEQ ID NO: 13046 - RNA, 20 nt, synthetic construct
  source 1..20: mol_type = other RNA
tgacagcccataggcaggag

SEQ ID NO: 13047 - RNA, 20 nt, synthetic construct
  source 1..20: mol_type = other RNA
ggacttagaaaagtcgtgag

SEQ ID NO: 13048 - RNA, 20 nt, synthetic construct
  source 1..20: mol_type = other RNA
tgagctctcgctgattgttt

SEQ ID NO: 13049 - RNA, 20 nt, synthetic construct
  source 1..20: mol_type = other RNA
cttgcaagaaagaatcatgt

SEQ ID NO: 13050 - RNA, 20 nt, synthetic construct
  source 1..20: mol_type = other RNA
tcccaatcatggagtaggca

SEQ ID NO: 13051 - RNA, 20 nt, synthetic construct
  source 1..20: mol_type = other RNA
cctttgtgcccccaaatagt

SEQ ID NO: 13052 - RNA, 20 nt, synthetic construct
  source 1..20: mol_type = other RNA
gcccactctgagaagtcaaa

SEQ ID NO: 13053 - RNA, 20 nt, synthetic construct
  source 1..20: mol_type = other RNA
aacttgggtcacagtcctgc

SEQ ID NO: 13054 - RNA, 20 nt, synthetic construct
  source 1..20: mol_type = other RNA
cagtcctgcccctgaaccca

SEQ ID NO: 13055 - RNA, 20 nt, synthetic construct
  source 1..20: mol_type = other RNA
gtgatgggttcaggggcagg

SEQ ID NO: 13056 - RNA, 20 nt, synthetic construct
  source 1..20: mol_type = other RNA
tgcccctgaacccatcactg

SEQ ID NO: 13057 - RNA, 20 nt, synthetic construct
  source 1..20: mol_type = other RNA
gagccagtcagtgatgggtt

SEQ ID NO: 13058 - RNA, 20 nt, synthetic construct
  source 1..20: mol_type = other RNA
tgccttcacctccaacatgg

SEQ ID NO: 13059 - RNA, 20 nt, synthetic construct
  source 1..20: mol_type = other RNA
catggaagatgggagagcca

SEQ ID NO: 13060 - RNA, 20 nt, synthetic construct
  source 1..20: mol_type = other RNA
accactaccaccatcatccc

SEQ ID NO: 13061 - RNA, 20 nt, synthetic construct
  source 1..20: mol_type = other RNA
acatcattaccaccatcacc

SEQ ID NO: 13062 - RNA, 20 nt, synthetic construct
  source 1..20: mol_type = other RNA
tgctgatagtagtgggacag

SEQ ID NO: 13063 - RNA, 20 nt, synthetic construct
  source 1..20: mol_type = other RNA
cactactatcagcatgacat

SEQ ID NO: 13064 - RNA, 20 nt, synthetic construct
  source 1..20: mol_type = other RNA
ccatcataatcaccatcaac

SEQ ID NO: 13065 - RNA, 20 nt, synthetic construct
  source 1..20: mol_type = other RNA
acacccagctacaccctggt

SEQ ID NO: 13066 - RNA, 20 nt, synthetic construct
  source 1..20: mol_type = other RNA
cctctggtctcacccacatg

SEQ ID NO: 13067 - RNA, 20 nt, synthetic construct
  source 1..20: mol_type = other RNA
cacccacatgtccactgaga

SEQ ID NO: 13068 - RNA, 20 nt, synthetic construct
  source 1..20: mol_type = other RNA
actgagaaaaggattttcag

SEQ ID NO: 13069 - RNA, 20 nt, synthetic construct
  source 1..20: mol_type = other RNA
agttggtgttctgaaaatcc

SEQ ID NO: 13070 - RNA, 20 nt, synthetic construct
  source 1..20: mol_type = other RNA
ttattaacatgtagaaagtt

SEQ ID NO: 13071 - RNA, 20 nt, synthetic construct
  source 1..20: mol_type = other RNA
aaattctccccctctcccct

SEQ ID NO: 13072 - RNA, 20 nt, synthetic construct
  source 1..20: mol_type = other RNA
ggacacatgaaggggagagg

SEQ ID NO: 13073 - RNA, 20 nt, synthetic construct
  source 1..20: mol_type = other RNA
agaccttcccggatttggat

SEQ ID NO: 13074 - RNA, 20 nt, synthetic construct
  source 1..20: mol_type = other RNA
catctgcaatcactgggctg

SEQ ID NO: 13075 - RNA, 20 nt, synthetic construct
  source 1..20: mol_type = other RNA
ccagggcgccatcagagagg

SEQ ID NO: 13076 - RNA, 20 nt, synthetic construct
  source 1..20: mol_type = other RNA
ctgctctcagatttgctctc

SEQ ID NO: 13077 - RNA, 20 nt, synthetic construct
  source 1..20: mol_type = other RNA
aggtgatgcatcccatgccc

SEQ ID NO: 13078 - RNA, 20 nt, synthetic construct
  source 1..20: mol_type = other RNA
ggaggagcttcctccatgca

SEQ ID NO: 13079 - RNA, 20 nt, synthetic construct
  source 1..20: mol_type = other RNA
cttccgcagagctgcatgga

SEQ ID NO: 13080 - RNA, 20 nt, synthetic construct
  source 1..20: mol_type = other RNA
gaaaactgacaccgaatctg

SEQ ID NO: 13081 - RNA, 20 nt, synthetic construct
  source 1..20: mol_type = other RNA
tcggtgtcagaaaactgaca

SEQ ID NO: 13082 - RNA, 20 nt, synthetic construct
  source 1..20: mol_type = other RNA
gttttctgacaccgaagaca

SEQ ID NO: 13083 - RNA, 20 nt, synthetic construct
  source 1..20: mol_type = other RNA
agggctttggggaaagcagg

SEQ ID NO: 13084 - RNA, 20 nt, synthetic construct
  source 1..20: mol_type = other RNA
atctggaaaaacagcatttc

SEQ ID NO: 13085 - RNA, 20 nt, synthetic construct
  source 1..20: mol_type = other RNA
ctagtatttcttctccctaa

SEQ ID NO: 13086 - RNA, 20 nt, synthetic construct
  source 1..20: mol_type = other RNA
aggaagtgtaaattagaaaa

SEQ ID NO: 13087 - RNA, 20 nt, synthetic construct
  source 1..20: mol_type = other RNA
tgattcattttctaatttac

SEQ ID NO: 13088 - RNA, 20 nt, synthetic construct
  source 1..20: mol_type = other RNA
ctggaaaacaattactttgc

SEQ ID NO: 13089 - RNA, 20 nt, synthetic construct
  source 1..20: mol_type = other RNA
cacccttttagagaataatt

SEQ ID NO: 13090 - RNA, 20 nt, synthetic construct
  source 1..20: mol_type = other RNA
cagttcccataattatatag

SEQ ID NO: 13091 - RNA, 20 nt, synthetic construct
  source 1..20: mol_type = other RNA
atataattatgggaactgag

SEQ ID NO: 13092 - RNA, 20 nt, synthetic construct
  source 1..20: mol_type = other RNA
ctgcccaaatgcttcctccc

SEQ ID NO: 13093 - RNA, 20 nt, synthetic construct
  source 1..20: mol_type = other RNA
gcggagtcgctgcccaaatg

SEQ ID NO: 13094 - RNA, 20 nt, synthetic construct
  source 1..20: mol_type = other RNA
gggtctgcggagtcgctgcc

SEQ ID NO: 13095 - RNA, 20 nt, synthetic construct
  source 1..20: mol_type = other RNA
ttcctgttcttcagttgagg

SEQ ID NO: 13096 - RNA, 20 nt, synthetic construct
  source 1..20: mol_type = other RNA
tatgaaacaggcacttgtca

SEQ ID NO: 13097 - RNA, 20 nt, synthetic construct
  source 1..20: mol_type = other RNA
tcatttactaagaatcaacc

SEQ ID NO: 13098 - RNA, 20 nt, synthetic construct
  source 1..20: mol_type = other RNA
tggaaatatggtgacggttg

SEQ ID NO: 13099 - RNA, 20 nt, synthetic construct
  source 1..20: mol_type = other RNA
ccatatttccaggacatttt

SEQ ID NO: 13100 - RNA, 20 nt, synthetic construct
  source 1..20: mol_type = other RNA
ctcctcattaaaatattagt

SEQ ID NO: 13101 - RNA, 20 nt, synthetic construct
  source 1..20: mol_type = other RNA
tcataactaatattttaatg

SEQ ID NO: 13102 - RNA, 20 nt, synthetic construct
  source 1..20: mol_type = other RNA
gagaaatacaattgctattc

SEQ ID NO: 13103 - RNA, 20 nt, synthetic construct
  source 1..20: mol_type = other RNA
tgctgctttggggttggttg

SEQ ID NO: 13104 - RNA, 20 nt, synthetic construct
  source 1..20: mol_type = other RNA
tataagattttatgttccca

SEQ ID NO: 13105 - RNA, 20 nt, synthetic construct
  source 1..20: mol_type = other RNA
tgggaacataaaatcttata

SEQ ID NO: 13106 - RNA, 20 nt, synthetic construct
  source 1..20: mol_type = other RNA
gagagtccagtggcattggg

SEQ ID NO: 13107 - RNA, 20 nt, synthetic construct
  source 1..20: mol_type = other RNA
agtggcattgggagctgcct

SEQ ID NO: 13108 - RNA, 20 nt, synthetic construct
  source 1..20: mol_type = other RNA
gtgaggctgcagaacacaag

SEQ ID NO: 13109 - RNA, 20 nt, synthetic construct
  source 1..20: mol_type = other RNA
gtccgtgaggctgcagaaca

SEQ ID NO: 13110 - RNA, 20 nt, synthetic construct
  source 1..20: mol_type = other RNA
agctccactgctctgttctt

SEQ ID NO: 13111 - RNA, 20 nt, synthetic construct
  source 1..20: mol_type = other RNA
caaaggtacctgtgtttaaa

SEQ ID NO: 13112 - RNA, 20 nt, synthetic construct
  source 1..20: mol_type = other RNA
tgtgctctcccgtctcagtc

SEQ ID NO: 13113 - RNA, 20 nt, synthetic construct
  source 1..20: mol_type = other RNA
aagggactgagactgagacg

SEQ ID NO: 13114 - RNA, 20 nt, synthetic construct
  source 1..20: mol_type = other RNA
cagtctcagtcccttagacg

SEQ ID NO: 13115 - RNA, 20 nt, synthetic construct
  source 1..20: mol_type = other RNA
cagtcccttagacgtcagtc

SEQ ID NO: 13116 - RNA, 20 nt, synthetic construct
  source 1..20: mol_type = other RNA
cttagacgtcagtcccaaag

SEQ ID NO: 13117 - RNA, 20 nt, synthetic construct
  source 1..20: mol_type = other RNA
gtcccaaagtggcaaattca

SEQ ID NO: 13118 - RNA, 20 nt, synthetic construct
  source 1..20: mol_type = other RNA
caaagtggcaaattcaggaa

SEQ ID NO: 13119 - RNA, 20 nt, synthetic construct
  source 1..20: mol_type = other RNA
tccactgacaaaaccttcct

SEQ ID NO: 13120 - RNA, 20 nt, synthetic construct
  source 1..20: mol_type = other RNA
gtggaagaccccagtctaag

SEQ ID NO: 13121 - RNA, 20 nt, synthetic construct
  source 1..20: mol_type = other RNA
aagtgttgctcagaaactcc

SEQ ID NO: 13122 - RNA, 20 nt, synthetic construct
  source 1..20: mol_type = other RNA
ctgaatgcatattcagatca

SEQ ID NO: 13123 - RNA, 20 nt, synthetic construct
  source 1..20: mol_type = other RNA
ccttagatgatctgaatatg

SEQ ID NO: 13124 - RNA, 20 nt, synthetic construct
  source 1..20: mol_type = other RNA
tggggcttgagttccagatc

SEQ ID NO: 13125 - RNA, 20 nt, synthetic construct
  source 1..20: mol_type = other RNA
ctggtgaccagcacacacca

SEQ ID NO: 13126 - RNA, 20 nt, synthetic construct
  source 1..20: mol_type = other RNA
ccagtgactgaagtggtggc

SEQ ID NO: 13127 - RNA, 20 nt, synthetic construct
  source 1..20: mol_type = other RNA
tgtaccctctaccttcctct

SEQ ID NO: 13128 - RNA, 20 nt, synthetic construct
  source 1..20: mol_type = other RNA
cggtcctgtaccctctacct

SEQ ID NO: 13129 - RNA, 20 nt, synthetic construct
  source 1..20: mol_type = other RNA
aggctagcccagtctaaagg

SEQ ID NO: 13130 - RNA, 20 nt, synthetic construct
  source 1..20: mol_type = other RNA
aaaggaaacaccaagttagg

SEQ ID NO: 13131 - RNA, 20 nt, synthetic construct
  source 1..20: mol_type = other RNA
attcaacaaaaccacatcac

SEQ ID NO: 13132 - RNA, 20 nt, synthetic construct
  source 1..20: mol_type = other RNA
ccctaaacagaggtagggga

SEQ ID NO: 13133 - RNA, 20 nt, synthetic construct
  source 1..20: mol_type = other RNA
ttctcgaagcaaaccagagg

SEQ ID NO: 13134 - RNA, 20 nt, synthetic construct
  source 1..20: mol_type = other RNA
cttcttggggtcttggctgt

SEQ ID NO: 13135 - RNA, 20 nt, synthetic construct
  source 1..20: mol_type = other RNA
tggctgtgcacgccccaata

SEQ ID NO: 13136 - RNA, 20 nt, synthetic construct
  source 1..20: mol_type = other RNA
atgctcgtgtttcaaggttt

SEQ ID NO: 13137 - RNA, 20 nt, synthetic construct
  source 1..20: mol_type = other RNA
aattaattatttctcatcat

SEQ ID NO: 13138 - RNA, 20 nt, synthetic construct
  source 1..20: mol_type = other RNA
cccgtccaattaattatttc

SEQ ID NO: 13139 - RNA, 20 nt, synthetic construct
  source 1..20: mol_type = other RNA
tcaaaattttcatgctcttt

SEQ ID NO: 13140 - RNA, 20 nt, synthetic construct
  source 1..20: mol_type = other RNA
aaaaaataaaaataaaaata

SEQ ID NO: 13141 - RNA, 20 nt, synthetic construct
  source 1..20: mol_type = other RNA
tggggtacatgtgcagaatg

SEQ ID NO: 13142 - RNA, 20 nt, synthetic construct
  source 1..20: mol_type = other RNA
tctaattcggtatttctttt

SEQ ID NO: 13143 - RNA, 20 nt, synthetic construct
  source 1..20: mol_type = other RNA
aggggtggagggctagggga

SEQ ID NO: 13144 - RNA, 20 nt, synthetic construct
  source 1..20: mol_type = other RNA
atgtgttctcattgttcaac

SEQ ID NO: 13145 - RNA, 20 nt, synthetic construct
  source 1..20: mol_type = other RNA
tttgcagggacatggatgaa

SEQ ID NO: 13146 - RNA, 20 nt, synthetic construct
  source 1..20: mol_type = other RNA
ctgcaaaggacatgaactca

SEQ ID NO: 13147 - RNA, 20 nt, synthetic construct
  source 1..20: mol_type = other RNA
aatggtgtttctggtgctag

SEQ ID NO: 13148 - RNA, 20 nt, synthetic construct
  source 1..20: mol_type = other RNA
tccacaatggttgaactaat

SEQ ID NO: 13149 - RNA, 20 nt, synthetic construct
  source 1..20: mol_type = other RNA
ggaaacaacagatgctggag

SEQ ID NO: 13150 - RNA, 20 nt, synthetic construct
  source 1..20: mol_type = other RNA
gatggatagatggcaaaaat

SEQ ID NO: 13151 - RNA, 20 nt, synthetic construct
  source 1..20: mol_type = other RNA
attttggcttttgttaccat

SEQ ID NO: 13152 - RNA, 20 nt, synthetic construct
  source 1..20: mol_type = other RNA
tgaagtcttctcccatgcta

SEQ ID NO: 13153 - RNA, 20 nt, synthetic construct
  source 1..20: mol_type = other RNA
tctcccatgctatgtcctga

SEQ ID NO: 13154 - RNA, 20 nt, synthetic construct
  source 1..20: mol_type = other RNA
tgaatggtattgcctaagtt

SEQ ID NO: 13155 - RNA, 20 nt, synthetic construct
  source 1..20: mol_type = other RNA
ttaatccatcttgagttaat

SEQ ID NO: 13156 - RNA, 20 nt, synthetic construct
  source 1..20: mol_type = other RNA
cttttgatctttgttggctt

SEQ ID NO: 13157 - RNA, 20 nt, synthetic construct
  source 1..20: mol_type = other RNA
ctgataaaatatactttaag

SEQ ID NO: 13158 - RNA, 20 nt, synthetic construct
  source 1..20: mol_type = other RNA
gcacatgagataggtttcct

SEQ ID NO: 13159 - RNA, 20 nt, synthetic construct
  source 1..20: mol_type = other RNA
agacccattggtgtgctgta

SEQ ID NO: 13160 - RNA, 20 nt, synthetic construct
  source 1..20: mol_type = other RNA
tgactctttattcaatttgc

SEQ ID NO: 13161 - RNA, 20 nt, synthetic construct
  source 1..20: mol_type = other RNA
gtgtcttttaattgggggca

SEQ ID NO: 13162 - RNA, 20 nt, synthetic construct
  source 1..20: mol_type = other RNA
tttaattgggggcatttagt

SEQ ID NO: 13163 - RNA, 20 nt, synthetic construct
  source 1..20: mol_type = other RNA
atttacatttaaggttaata

SEQ ID NO: 13164 - RNA, 20 nt, synthetic construct
  source 1..20: mol_type = other RNA
ttatgatgctagcgggttat

SEQ ID NO: 13165 - RNA, 20 nt, synthetic construct
  source 1..20: mol_type = other RNA
ccacaaggcctgcctcacaa

SEQ ID NO: 13166 - RNA, 20 nt, synthetic construct
  source 1..20: mol_type = other RNA
gtaaaggattttatttctcc

SEQ ID NO: 13167 - RNA, 20 nt, synthetic construct
  source 1..20: mol_type = other RNA
gattggcttccctttccggg

SEQ ID NO: 13168 - RNA, 20 nt, synthetic construct
  source 1..20: mol_type = other RNA
gattcaccaaggttgaaatg

SEQ ID NO: 13169 - RNA, 20 nt, synthetic construct
  source 1..20: mol_type = other RNA
tgaggtggctcttctcgagg

SEQ ID NO: 13170 - RNA, 20 nt, synthetic construct
  source 1..20: mol_type = other RNA
gtcttgctaggttggggaag

SEQ ID NO: 13171 - RNA, 20 nt, synthetic construct
  source 1..20: mol_type = other RNA
tgctaggttggggaagctct

SEQ ID NO: 13172 - RNA, 20 nt, synthetic construct
  source 1..20: mol_type = other RNA
tttcacatagtcccatattt

SEQ ID NO: 13173 - RNA, 20 nt, synthetic construct
  source 1..20: mol_type = other RNA
catatttcttggagcctttg

SEQ ID NO: 13174 - RNA, 20 nt, synthetic construct
  source 1..20: mol_type = other RNA
tcttgctttatttcattaag

SEQ ID NO: 13175 - RNA, 20 nt, synthetic construct
  source 1..20: mol_type = other RNA
gatcaggtcatttatgttct

SEQ ID NO: 13176 - RNA, 20 nt, synthetic construct
  source 1..20: mol_type = other RNA
tttatgttcttctctaaact

SEQ ID NO: 13177 - RNA, 20 nt, synthetic construct
  source 1..20: mol_type = other RNA
acaaaacaaccagaaagcaa

SEQ ID NO: 13178 - RNA, 20 nt, synthetic construct
  source 1..20: mol_type = other RNA
ttttattggaaaatttaatc

SEQ ID NO: 13179 - RNA, 20 nt, synthetic construct
  source 1..20: mol_type = other RNA
ttacaggtgaagtgagtgtg

SEQ ID NO: 13180 - RNA, 20 nt, synthetic construct
  source 1..20: mol_type = other RNA
gtttgagtccttacaggtga

SEQ ID NO: 13181 - RNA, 20 nt, synthetic construct
  source 1..20: mol_type = other RNA
attctcacactgctataaag

SEQ ID NO: 13182 - RNA, 20 nt, synthetic construct
  source 1..20: mol_type = other RNA
ctttgtagtattctttatag

SEQ ID NO: 13183 - RNA, 20 nt, synthetic construct
  source 1..20: mol_type = other RNA
tgccaccttgtgaagaaggt

SEQ ID NO: 13184 - RNA, 20 nt, synthetic construct
  source 1..20: mol_type = other RNA
aacacttataaaaccatcag

SEQ ID NO: 13185 - RNA, 20 nt, synthetic construct
  source 1..20: mol_type = other RNA
agggaggagcccagtgggag

SEQ ID NO: 13186 - RNA, 20 nt, synthetic construct
  source 1..20: mol_type = other RNA
cacccaaatctcatcgtgaa

SEQ ID NO: 13187 - RNA, 20 nt, synthetic construct
  source 1..20: mol_type = other RNA
gctttacctcatgttgagtt

SEQ ID NO: 13188 - RNA, 20 nt, synthetic construct
  source 1..20: mol_type = other RNA
ctttttacagtttttgactt

SEQ ID NO: 13189 - RNA, 20 nt, synthetic construct
  source 1..20: mol_type = other RNA
aaaactgtaaaaagagacga

SEQ ID NO: 13190 - RNA, 20 nt, synthetic construct
  source 1..20: mol_type = other RNA
attagtgaaagtggagctat

SEQ ID NO: 13191 - RNA, 20 nt, synthetic construct
  source 1..20: mol_type = other RNA
ggatgatctgtccattagtg

SEQ ID NO: 13192 - RNA, 20 nt, synthetic construct
  source 1..20: mol_type = other RNA
cgtgtttccatattgattct

SEQ ID NO: 13193 - RNA, 20 nt, synthetic construct
  source 1..20: mol_type = other RNA
acttggctaaagtgtagttt

SEQ ID NO: 13194 - RNA, 20 nt, synthetic construct
  source 1..20: mol_type = other RNA
caaaactagtcaaaaaatgt

SEQ ID NO: 13195 - RNA, 20 nt, synthetic construct
  source 1..20: mol_type = other RNA
aaaaatgtaagaagattgaa

SEQ ID NO: 13196 - RNA, 20 nt, synthetic construct
  source 1..20: mol_type = other RNA
aagaagatattaaaagagga

SEQ ID NO: 13197 - RNA, 20 nt, synthetic construct
  source 1..20: mol_type = other RNA
tgattttttaaaatttcctc

SEQ ID NO: 13198 - RNA, 20 nt, synthetic construct
  source 1..20: mol_type = other RNA
ctgcaaaggacatgaactca

SEQ ID NO: 13199 - RNA, 20 nt, synthetic construct
  source 1..20: mol_type = other RNA
tttgcagggacatgaatgaa

SEQ ID NO: 13200 - RNA, 20 nt, synthetic construct
  source 1..20: mol_type = other RNA
ttatgatagtttgctgagaa

SEQ ID NO: 13201 - RNA, 20 nt, synthetic construct
  source 1..20: mol_type = other RNA
gggggtgggaagctggtgaa

SEQ ID NO: 13202 - RNA, 20 nt, synthetic construct
  source 1..20: mol_type = other RNA
tttacattagatatttctcc

SEQ ID NO: 13203 - RNA, 20 nt, synthetic construct
  source 1..20: mol_type = other RNA
gattggcatataaatcaaaa

SEQ ID NO: 13204 - RNA, 20 nt, synthetic construct
  source 1..20: mol_type = other RNA
cttgctttaaaacataataa

SEQ ID NO: 13205 - RNA, 20 nt, synthetic construct
  source 1..20: mol_type = other RNA
tgagttgtttttgttttcaa

SEQ ID NO: 13206 - RNA, 20 nt, synthetic construct
  source 1..20: mol_type = other RNA
attttcctttgtcttgagtt

SEQ ID NO: 13207 - RNA, 20 nt, synthetic construct
  source 1..20: mol_type = other RNA
agtttgttgaggtgtaatct

SEQ ID NO: 13208 - RNA, 20 nt, synthetic construct
  source 1..20: mol_type = other RNA
ttactatttctgatgtgatc

SEQ ID NO: 13209 - RNA, 20 nt, synthetic construct
  source 1..20: mol_type = other RNA
attttgttattttattgaaa

SEQ ID NO: 13210 - RNA, 20 nt, synthetic construct
  source 1..20: mol_type = other RNA
aaagccttttctgcatctat

SEQ ID NO: 13211 - RNA, 20 nt, synthetic construct
  source 1..20: mol_type = other RNA
gcatctatcaagataatcat

SEQ ID NO: 13212 - RNA, 20 nt, synthetic construct
  source 1..20: mol_type = other RNA
acatatgtaaatcaataaaa

SEQ ID NO: 13213 - RNA, 20 nt, synthetic construct
  source 1..20: mol_type = other RNA
tccctgggatgtaagattgg

SEQ ID NO: 13214 - RNA, 20 nt, synthetic construct
  source 1..20: mol_type = other RNA
ggctgatatccttgatgaac

SEQ ID NO: 13215 - RNA, 20 nt, synthetic construct
  source 1..20: mol_type = other RNA
tcaaggatatcagcctgaag

SEQ ID NO: 13216 - RNA, 20 nt, synthetic construct
  source 1..20: mol_type = other RNA
ggttttggtatcaggatgat

SEQ ID NO: 13217 - RNA, 20 nt, synthetic construct
  source 1..20: mol_type = other RNA
atgaggccagcatcatcctg

SEQ ID NO: 13218 - RNA, 20 nt, synthetic construct
  source 1..20: mol_type = other RNA
cattttattctatgaggcca

SEQ ID NO: 13219 - RNA, 20 nt, synthetic construct
  source 1..20: mol_type = other RNA
tcaattttttttgacgtttc

SEQ ID NO: 13220 - RNA, 20 nt, synthetic construct
  source 1..20: mol_type = other RNA
tactgaaacgtcaaaaaaaa

SEQ ID NO: 13221 - RNA, 20 nt, synthetic construct
  source 1..20: mol_type = other RNA
gtaggaatggtactagctct

SEQ ID NO: 13222 - RNA, 20 nt, synthetic construct
  source 1..20: mol_type = other RNA
accagatgtgcaaagaagag

SEQ ID NO: 13223 - RNA, 20 nt, synthetic construct
  source 1..20: mol_type = other RNA
ttgcacatctggtagaattc

SEQ ID NO: 13224 - RNA, 20 nt, synthetic construct
  source 1..20: mol_type = other RNA
cagctgaattctaccagatg

SEQ ID NO: 13225 - RNA, 20 nt, synthetic construct
  source 1..20: mol_type = other RNA
gctgtgaatctatctggtcc

SEQ ID NO: 13226 - RNA, 20 nt, synthetic construct
  source 1..20: mol_type = other RNA
tagtaggctattcattactg

SEQ ID NO: 13227 - RNA, 20 nt, synthetic construct
  source 1..20: mol_type = other RNA
ttactgattcaattttggag

SEQ ID NO: 13228 - RNA, 20 nt, synthetic construct
  source 1..20: mol_type = other RNA
attttggagatcattgtggt

SEQ ID NO: 13229 - RNA, 20 nt, synthetic construct
  source 1..20: mol_type = other RNA
ttgaacagaaccacaatgat

SEQ ID NO: 13230 - RNA, 20 nt, synthetic construct
  source 1..20: mol_type = other RNA
gttcaaggaatcaatttctt

SEQ ID NO: 13231 - RNA, 20 nt, synthetic construct
  source 1..20: mol_type = other RNA
aggaatcaatttcttcctgg

SEQ ID NO: 13232 - RNA, 20 nt, synthetic construct
  source 1..20: mol_type = other RNA
tcctggttctgtcttgggag

SEQ ID NO: 13233 - RNA, 20 nt, synthetic construct
  source 1..20: mol_type = other RNA
tggttctgtcttgggagggt

SEQ ID NO: 13234 - RNA, 20 nt, synthetic construct
  source 1..20: mol_type = other RNA
gtcttgggagggtgtatgtg

SEQ ID NO: 13235 - RNA, 20 nt, synthetic construct
  source 1..20: mol_type = other RNA
agattttctagtttgtgtgc

SEQ ID NO: 13236 - RNA, 20 nt, synthetic construct
  source 1..20: mol_type = other RNA
agtttgtgtgcatagagctg

SEQ ID NO: 13237 - RNA, 20 nt, synthetic construct
  source 1..20: mol_type = other RNA
gatggttatttttatttttg

SEQ ID NO: 13238 - RNA, 20 nt, synthetic construct
  source 1..20: mol_type = other RNA
ctctcttttcttctttatta

SEQ ID NO: 13239 - RNA, 20 nt, synthetic construct
  source 1..20: mol_type = other RNA
tctttattagccaggtagca

SEQ ID NO: 13240 - RNA, 20 nt, synthetic construct
  source 1..20: mol_type = other RNA
ttattagccaggtagcaaac

SEQ ID NO: 13241 - RNA, 20 nt, synthetic construct
  source 1..20: mol_type = other RNA
aaaaaccaactcttggattt

SEQ ID NO: 13242 - RNA, 20 nt, synthetic construct
  source 1..20: mol_type = other RNA
aaagatcaacaaatccaaga

SEQ ID NO: 13243 - RNA, 20 nt, synthetic construct
  source 1..20: mol_type = other RNA
tgtcttgactttcttcattt

SEQ ID NO: 13244 - RNA, 20 nt, synthetic construct
  source 1..20: mol_type = other RNA
tcatttcaactctgattttg

SEQ ID NO: 13245 - RNA, 20 nt, synthetic construct
  source 1..20: mol_type = other RNA
tttcaactctgattttggtt

SEQ ID NO: 13246 - RNA, 20 nt, synthetic construct
  source 1..20: mol_type = other RNA
actctgattttggttttcct

SEQ ID NO: 13247 - RNA, 20 nt, synthetic construct
  source 1..20: mol_type = other RNA
ttgcctgctgctagttttgg

SEQ ID NO: 13248 - RNA, 20 nt, synthetic construct
  source 1..20: mol_type = other RNA
ctaattcttcaagttgtgat

SEQ ID NO: 13249 - RNA, 20 nt, synthetic construct
  source 1..20: mol_type = other RNA
tcaagttgtgatgttaggtt

SEQ ID NO: 13250 - RNA, 20 nt, synthetic construct
  source 1..20: mol_type = other RNA
agttgtgatgttaggttctt

SEQ ID NO: 13251 - RNA, 20 nt, synthetic construct
  source 1..20: mol_type = other RNA
tactttgggatctttctttt

SEQ ID NO: 13252 - RNA, 20 nt, synthetic construct
  source 1..20: mol_type = other RNA
ttttgatgtgagcttttaat

SEQ ID NO: 13253 - RNA, 20 nt, synthetic construct
  source 1..20: mol_type = other RNA
tagcattaaaagctcacatc

SEQ ID NO: 13254 - RNA, 20 nt, synthetic construct
  source 1..20: mol_type = other RNA
ctcttaacactaccttagct

SEQ ID NO: 13255 - RNA, 20 nt, synthetic construct
  source 1..20: mol_type = other RNA
agtatgttgtttcttaattc

SEQ ID NO: 13256 - RNA, 20 nt, synthetic construct
  source 1..20: mol_type = other RNA
ttgaaactaaagagaattaa

SEQ ID NO: 13257 - RNA, 20 nt, synthetic construct
  source 1..20: mol_type = other RNA
taattctctttagtttcaaa

SEQ ID NO: 13258 - RNA, 20 nt, synthetic construct
  source 1..20: mol_type = other RNA
ctttagtttcaaagaacttc

SEQ ID NO: 13259 - RNA, 20 nt, synthetic construct
  source 1..20: mol_type = other RNA
aagaacttcttgatttctgc

SEQ ID NO: 13260 - RNA, 20 nt, synthetic construct
  source 1..20: mol_type = other RNA
tgatttctgccttagtttta

SEQ ID NO: 13261 - RNA, 20 nt, synthetic construct
  source 1..20: mol_type = other RNA
gccttagttttattatttac

SEQ ID NO: 13262 - RNA, 20 nt, synthetic construct
  source 1..20: mol_type = other RNA
ggagcatgttgtttaattcc

SEQ ID NO: 13263 - RNA, 20 nt, synthetic construct
  source 1..20: mol_type = other RNA
catgtaattgcatggttttg

SEQ ID NO: 13264 - RNA, 20 nt, synthetic construct
  source 1..20: mol_type = other RNA
tagtcttggcttctattttt

SEQ ID NO: 13265 - RNA, 20 nt, synthetic construct
  source 1..20: mol_type = other RNA
atttttattgagctgtcgtc

SEQ ID NO: 13266 - RNA, 20 nt, synthetic construct
  source 1..20: mol_type = other RNA
tttgcatttgctgaggattg

SEQ ID NO: 13267 - RNA, 20 nt, synthetic construct
  source 1..20: mol_type = other RNA
ctaaaaatcaaccacataat

SEQ ID NO: 13268 - RNA, 20 nt, synthetic construct
  source 1..20: mol_type = other RNA
cataatcacatggcacattc

SEQ ID NO: 13269 - RNA, 20 nt, synthetic construct
  source 1..20: mol_type = other RNA
attgtttgggggtagagagt

SEQ ID NO: 13270 - RNA, 20 nt, synthetic construct
  source 1..20: mol_type = other RNA
gtggaggtctatcagatcca

SEQ ID NO: 13271 - RNA, 20 nt, synthetic construct
  source 1..20: mol_type = other RNA
ggacctgaactcaacattgg

SEQ ID NO: 13272 - RNA, 20 nt, synthetic construct
  source 1..20: mol_type = other RNA
ggtcctgaatatctttgtaa

SEQ ID NO: 13273 - RNA, 20 nt, synthetic construct
  source 1..20: mol_type = other RNA
gcctcaatgatctgtctaat

SEQ ID NO: 13274 - RNA, 20 nt, synthetic construct
  source 1..20: mol_type = other RNA
ctgacagtattagacagatc

SEQ ID NO: 13275 - RNA, 20 nt, synthetic construct
  source 1..20: mol_type = other RNA
gcagttcactgacagtatta

SEQ ID NO: 13276 - RNA, 20 nt, synthetic construct
  source 1..20: mol_type = other RNA
tagagacctacaaagagact

SEQ ID NO: 13277 - RNA, 20 nt, synthetic construct
  source 1..20: mol_type = other RNA
taaagaaagttcttagagac

SEQ ID NO: 13278 - RNA, 20 nt, synthetic construct
  source 1..20: mol_type = other RNA
ttatgaagctgggtgctctt

SEQ ID NO: 13279 - RNA, 20 nt, synthetic construct
  source 1..20: mol_type = other RNA
acaagaccaactatcctaaa

SEQ ID NO: 13280 - RNA, 20 nt, synthetic construct
  source 1..20: mol_type = other RNA
attcaacaagaccaactatc

SEQ ID NO: 13281 - RNA, 20 nt, synthetic construct
  source 1..20: mol_type = other RNA
ttgtcttttttggtctttgt

SEQ ID NO: 13282 - RNA, 20 nt, synthetic construct
  source 1..20: mol_type = other RNA
gacaaaacagactttaaacc

SEQ ID NO: 13283 - RNA, 20 nt, synthetic construct
  source 1..20: mol_type = other RNA
gatttccatttgcgtggtag

SEQ ID NO: 13284 - RNA, 20 nt, synthetic construct
  source 1..20: mol_type = other RNA
atttgcgtggtagattctcc

SEQ ID NO: 13285 - RNA, 20 nt, synthetic construct
  source 1..20: mol_type = other RNA
cctccatctctttattttga

SEQ ID NO: 13286 - RNA, 20 nt, synthetic construct
  source 1..20: mol_type = other RNA
cttgacaacagcatacaatt

SEQ ID NO: 13287 - RNA, 20 nt, synthetic construct
  source 1..20: mol_type = other RNA
cacataccaatacttgcctt

SEQ ID NO: 13288 - RNA, 20 nt, synthetic construct
  source 1..20: mol_type = other RNA
aggcaagtattggtatgtgt

SEQ ID NO: 13289 - RNA, 20 nt, synthetic construct
  source 1..20: mol_type = other RNA
caaaccagtgacactataaa

SEQ ID NO: 13290 - RNA, 20 nt, synthetic construct
  source 1..20: mol_type = other RNA
tttctatagttggtgctctt

SEQ ID NO: 13291 - RNA, 20 nt, synthetic construct
  source 1..20: mol_type = other RNA
atagttggtgctcttttcaa

SEQ ID NO: 13292 - RNA, 20 nt, synthetic construct
  source 1..20: mol_type = other RNA
agatctcttgtaaggcaggt

SEQ ID NO: 13293 - RNA, 20 nt, synthetic construct
  source 1..20: mol_type = other RNA
taagcaacagagaaataaga

SEQ ID NO: 13294 - RNA, 20 nt, synthetic construct
  source 1..20: mol_type = other RNA
ctgttgcttaggaagcttag

SEQ ID NO: 13295 - RNA, 20 nt, synthetic construct
  source 1..20: mol_type = other RNA
tatccaaccaaactaagctt

SEQ ID NO: 13296 - RNA, 20 nt, synthetic construct
  source 1..20: mol_type = other RNA
gccaaaaatttcatatccaa

SEQ ID NO: 13297 - RNA, 20 nt, synthetic construct
  source 1..20: mol_type = other RNA
acattttaaaatatatatat

SEQ ID NO: 13298 - RNA, 20 nt, synthetic construct
  source 1..20: mol_type = other RNA
ggcttgcagaggttcagctg

SEQ ID NO: 13299 - RNA, 20 nt, synthetic construct
  source 1..20: mol_type = other RNA
gctgagaggtatgctgttag

SEQ ID NO: 13300 - RNA, 20 nt, synthetic construct
  source 1..20: mol_type = other RNA
ctttgtagatgacctgccct

SEQ ID NO: 13301 - RNA, 20 nt, synthetic construct
  source 1..20: mol_type = other RNA
ctctagttgcctttaacatt

SEQ ID NO: 13302 - RNA, 20 nt, synthetic construct
  source 1..20: mol_type = other RNA
aaggtcaaaatgaaagacag

SEQ ID NO: 13303 - RNA, 20 nt, synthetic construct
  source 1..20: mol_type = other RNA
gtctttcattttgaccttgg

SEQ ID NO: 13304 - RNA, 20 nt, synthetic construct
  source 1..20: mol_type = other RNA
ttttgaccttggaaaagctg

SEQ ID NO: 13305 - RNA, 20 nt, synthetic construct
  source 1..20: mol_type = other RNA
acacaagaagatcatcccaa

SEQ ID NO: 13306 - RNA, 20 nt, synthetic construct
  source 1..20: mol_type = other RNA
tgtgtagaatctggcaggga

SEQ ID NO: 13307 - RNA, 20 nt, synthetic construct
  source 1..20: mol_type = other RNA
gaaaatacagagaatccctg

SEQ ID NO: 13308 - RNA, 20 nt, synthetic construct
  source 1..20: mol_type = other RNA
ctgtattttctgaatttgac

SEQ ID NO: 13309 - RNA, 20 nt, synthetic construct
  source 1..20: mol_type = other RNA
gaatttgactgttggcctct

SEQ ID NO: 13310 - RNA, 20 nt, synthetic construct
  source 1..20: mol_type = other RNA
ccaatcttgctagagaggcc

SEQ ID NO: 13311 - RNA, 20 nt, synthetic construct
  source 1..20: mol_type = other RNA
tggttggtatcctaaattgt

SEQ ID NO: 13312 - RNA, 20 nt, synthetic construct
  source 1..20: mol_type = other RNA
agattgttagctttctcccc

SEQ ID NO: 13313 - RNA, 20 nt, synthetic construct
  source 1..20: mol_type = other RNA
ccccatccctttcagagatg

SEQ ID NO: 13314 - RNA, 20 nt, synthetic construct
  source 1..20: mol_type = other RNA
gagatgccaatgatttgtag

SEQ ID NO: 13315 - RNA, 20 nt, synthetic construct
  source 1..20: mol_type = other RNA
ccatatttcttgtaggtttt

SEQ ID NO: 13316 - RNA, 20 nt, synthetic construct
  source 1..20: mol_type = other RNA
tgtaggttttgttcattcat

SEQ ID NO: 13317 - RNA, 20 nt, synthetic construct
  source 1..20: mol_type = other RNA
ttcattttccttcttttttc

SEQ ID NO: 13318 - RNA, 20 nt, synthetic construct
  source 1..20: mol_type = other RNA
ttttccttcttttttcttca

SEQ ID NO: 13319 - RNA, 20 nt, synthetic construct
  source 1..20: mol_type = other RNA
ttcttttttcttcatttttg

SEQ ID NO: 13320 - RNA, 20 nt, synthetic construct
  source 1..20: mol_type = other RNA
tttttcttcatttttgtcaa

SEQ ID NO: 13321 - RNA, 20 nt, synthetic construct
  source 1..20: mol_type = other RNA
tcatttttgtcaactgtctg

SEQ ID NO: 13322 - RNA, 20 nt, synthetic construct
  source 1..20: mol_type = other RNA
tttttgtcaactgtctgatt

SEQ ID NO: 13323 - RNA, 20 nt, synthetic construct
  source 1..20: mol_type = other RNA
atttctgagatcctttcctc

SEQ ID NO: 13324 - RNA, 20 nt, synthetic construct
  source 1..20: mol_type = other RNA
gagatcctttcctcagcttg

SEQ ID NO: 13325 - RNA, 20 nt, synthetic construct
  source 1..20: mol_type = other RNA
tcagcttggtctattctcct

SEQ ID NO: 13326 - RNA, 20 nt, synthetic construct
  source 1..20: mol_type = other RNA
cctattaatacttggattgc

SEQ ID NO: 13327 - RNA, 20 nt, synthetic construct
  source 1..20: mol_type = other RNA
caatgcaatccaagtattaa

SEQ ID NO: 13328 - RNA, 20 nt, synthetic construct
  source 1..20: mol_type = other RNA
tatagtttgtttctcagctc

SEQ ID NO: 13329 - RNA, 20 nt, synthetic construct
  source 1..20: mol_type = other RNA
cagctctcagctctgtcaga

SEQ ID NO: 13330 - RNA, 20 nt, synthetic construct
  source 1..20: mol_type = other RNA
ttttttataccagcaattta

SEQ ID NO: 13331 - RNA, 20 nt, synthetic construct
  source 1..20: mol_type = other RNA
gcctctatattattttattg

SEQ ID NO: 13332 - RNA, 20 nt, synthetic construct
  source 1..20: mol_type = other RNA
aggaaattaaaaatcacaat

SEQ ID NO: 13333 - RNA, 20 nt, synthetic construct
  source 1..20: mol_type = other RNA
ttgaattggattttgccatt

SEQ ID NO: 13334 - RNA, 20 nt, synthetic construct
  source 1..20: mol_type = other RNA
tttgtatccgtagtctgaat

SEQ ID NO: 13335 - RNA, 20 nt, synthetic construct
  source 1..20: mol_type = other RNA
tacgttggttctttctcatg

SEQ ID NO: 13336 - RNA, 20 nt, synthetic construct
  source 1..20: mol_type = other RNA
ttctcatgtctctgtgtggg

SEQ ID NO: 13337 - RNA, 20 nt, synthetic construct
  source 1..20: mol_type = other RNA
catgtctctgtgtgggtgtt

SEQ ID NO: 13338 - RNA, 20 nt, synthetic construct
  source 1..20: mol_type = other RNA
ttaactgcagtgtagattga

SEQ ID NO: 13339 - RNA, 20 nt, synthetic construct
  source 1..20: mol_type = other RNA
tgtctttggtttcatagtgg

SEQ ID NO: 13340 - RNA, 20 nt, synthetic construct
  source 1..20: mol_type = other RNA
gcttgttttaggtataaagg

SEQ ID NO: 13341 - RNA, 20 nt, synthetic construct
  source 1..20: mol_type = other RNA
tttatacctaaaacaagcag

SEQ ID NO: 13342 - RNA, 20 nt, synthetic construct
  source 1..20: mol_type = other RNA
gagactcaaagacctttact

SEQ ID NO: 13343 - RNA, 20 nt, synthetic construct
  source 1..20: mol_type = other RNA
taactccagcattcatattg

SEQ ID NO: 13344 - RNA, 20 nt, synthetic construct
  source 1..20: mol_type = other RNA
tattgcttcctcaggtaagt

SEQ ID NO: 13345 - RNA, 20 nt, synthetic construct
  source 1..20: mol_type = other RNA
tcaggtaagtggggttttca

SEQ ID NO: 13346 - RNA, 20 nt, synthetic construct
  source 1..20: mol_type = other RNA
cccagcccttaagggtgtta

SEQ ID NO: 13347 - RNA, 20 nt, synthetic construct
  source 1..20: mol_type = other RNA
cataaaaaataatctaacac

SEQ ID NO: 13348 - RNA, 20 nt, synthetic construct
  source 1..20: mol_type = other RNA
aaacatgatgtaaaacaata

SEQ ID NO: 13349 - RNA, 20 nt, synthetic construct
  source 1..20: mol_type = other RNA
taccaaatccacatgtctaa

SEQ ID NO: 13350 - RNA, 20 nt, synthetic construct
  source 1..20: mol_type = other RNA
ctcacccatcaaccaatacc

SEQ ID NO: 13351 - RNA, 20 nt, synthetic construct
  source 1..20: mol_type = other RNA
ctctctttctctcacccatc

SEQ ID NO: 13352 - RNA, 20 nt, synthetic construct
  source 1..20: mol_type = other RNA
ttcttcatttttcagtatgc

SEQ ID NO: 13353 - RNA, 20 nt, synthetic construct
  source 1..20: mol_type = other RNA
tcatttttcagtatgccctg

SEQ ID NO: 13354 - RNA, 20 nt, synthetic construct
  source 1..20: mol_type = other RNA
tttttcagtatgccctgaca

SEQ ID NO: 13355 - RNA, 20 nt, synthetic construct
  source 1..20: mol_type = other RNA
gtatgccctgacaataatta

SEQ ID NO: 13356 - RNA, 20 nt, synthetic construct
  source 1..20: mol_type = other RNA
agtggtcaagggggtaagtc

SEQ ID NO: 13357 - RNA, 20 nt, synthetic construct
  source 1..20: mol_type = other RNA
cagaggtgctggtgaggaca

SEQ ID NO: 13358 - RNA, 20 nt, synthetic construct
  source 1..20: mol_type = other RNA
agactcataatgtcctcacc

SEQ ID NO: 13359 - RNA, 20 nt, synthetic construct
  source 1..20: mol_type = other RNA
aggttccagactcataatgt

SEQ ID NO: 13360 - RNA, 20 nt, synthetic construct
  source 1..20: mol_type = other RNA
gactctgctgactttctcag

SEQ ID NO: 13361 - RNA, 20 nt, synthetic construct
  source 1..20: mol_type = other RNA
cagaggtgctggtgaggaca

SEQ ID NO: 13362 - RNA, 20 nt, synthetic construct
  source 1..20: mol_type = other RNA
agggctccagactcataatg

SEQ ID NO: 13363 - RNA, 20 nt, synthetic construct
  source 1..20: mol_type = other RNA
gactctgccactagccagac

SEQ ID NO: 13364 - RNA, 20 nt, synthetic construct
  source 1..20: mol_type = other RNA
agtggtgttttccacatcag

SEQ ID NO: 13365 - RNA, 20 nt, synthetic construct
  source 1..20: mol_type = other RNA
acatcagccttttgcataag

SEQ ID NO: 13366 - RNA, 20 nt, synthetic construct
  source 1..20: mol_type = other RNA
aatgacagcttatgcaaaag

SEQ ID NO: 13367 - RNA, 20 nt, synthetic construct
  source 1..20: mol_type = other RNA
tcaaatgacagcttatgcaa

SEQ ID NO: 13368 - RNA, 20 nt, synthetic construct
  source 1..20: mol_type = other RNA
tttttctgtgctttttctac

SEQ ID NO: 13369 - RNA, 20 nt, synthetic construct
  source 1..20: mol_type = other RNA
gtgctttttctactattttt

SEQ ID NO: 13370 - RNA, 20 nt, synthetic construct
  source 1..20: mol_type = other RNA
actatttttaaaatgtcatc

SEQ ID NO: 13371 - RNA, 20 nt, synthetic construct
  source 1..20: mol_type = other RNA
tgatccccctttctgcactc

SEQ ID NO: 13372 - RNA, 20 nt, synthetic construct
  source 1..20: mol_type = other RNA
cagactcaggagtgcagaaa

SEQ ID NO: 13373 - RNA, 20 nt, synthetic construct
  source 1..20: mol_type = other RNA
gcactcctgagtctgggaac

SEQ ID NO: 13374 - RNA, 20 nt, synthetic construct
  source 1..20: mol_type = other RNA
ttttagttggcctcagtgtt

SEQ ID NO: 13375 - RNA, 20 nt, synthetic construct
  source 1..20: mol_type = other RNA
tcttttgccaagtttccttt

SEQ ID NO: 13376 - RNA, 20 nt, synthetic construct
  source 1..20: mol_type = other RNA
tcacttgtaaaataggaaca

SEQ ID NO: 13377 - RNA, 20 nt, synthetic construct
  source 1..20: mol_type = other RNA
tattttacaagtgaggaacc

SEQ ID NO: 13378 - RNA, 20 nt, synthetic construct
  source 1..20: mol_type = other RNA
ctgagcctcaggttcctcac

SEQ ID NO: 13379 - RNA, 20 nt, synthetic construct
  source 1..20: mol_type = other RNA
ggtctccctgtgccatcctg

SEQ ID NO: 13380 - RNA, 20 nt, synthetic construct
  source 1..20: mol_type = other RNA
aattcaggtctccctgtgcc

SEQ ID NO: 13381 - RNA, 20 nt, synthetic construct
  source 1..20: mol_type = other RNA
cacttactggctgtcgggac

SEQ ID NO: 13382 - RNA, 20 nt, synthetic construct
  source 1..20: mol_type = other RNA
aagtcccgacagccagtaag

SEQ ID NO: 13383 - RNA, 20 nt, synthetic construct
  source 1..20: mol_type = other RNA
tgacttttctaagtcccgac

SEQ ID NO: 13384 - RNA, 20 nt, synthetic construct
  source 1..20: mol_type = other RNA
tataagaaaacaatcaatga

SEQ ID NO: 13385 - RNA, 20 nt, synthetic construct
  source 1..20: mol_type = other RNA
tatatgaaatgggggctgca

SEQ ID NO: 13386 - RNA, 20 nt, synthetic construct
  source 1..20: mol_type = other RNA
cccccgacaaccctgcagcc

SEQ ID NO: 13387 - RNA, 20 nt, synthetic construct
  source 1..20: mol_type = other RNA
tattgtttctcccccgacaa

SEQ ID NO: 13388 - RNA, 20 nt, synthetic construct
  source 1..20: mol_type = other RNA
gtatattagtaggagctgcc

SEQ ID NO: 13389 - RNA, 20 nt, synthetic construct
  source 1..20: mol_type = other RNA
gtcacttgcaagaaagagtc

SEQ ID NO: 13390 - RNA, 20 nt, synthetic construct
  source 1..20: mol_type = other RNA
tgcaagtgacagaaaatcca

SEQ ID NO: 13391 - RNA, 20 nt, synthetic construct
  source 1..20: mol_type = other RNA
ccttttttgcttaatccatc

SEQ ID NO: 13392 - RNA, 20 nt, synthetic construct
  source 1..20: mol_type = other RNA
gctcaacaagaattcccctt

SEQ ID NO: 13393 - RNA, 20 nt, synthetic construct
  source 1..20: mol_type = other RNA
tgttgagctgaaaagtcttt

SEQ ID NO: 13394 - RNA, 20 nt, synthetic construct
  source 1..20: mol_type = other RNA
tgtggtggcagatgctgtgg

SEQ ID NO: 13395 - RNA, 20 nt, synthetic construct
  source 1..20: mol_type = other RNA
tggcaaagcaagagctgcca

SEQ ID NO: 13396 - RNA, 20 nt, synthetic construct
  source 1..20: mol_type = other RNA
tcagtctttcctggcaaagc

SEQ ID NO: 13397 - RNA, 20 nt, synthetic construct
  source 1..20: mol_type = other RNA
cttaatggggacagtggcct

SEQ ID NO: 13398 - RNA, 20 nt, synthetic construct
  source 1..20: mol_type = other RNA
acctctcagacctggccaac

SEQ ID NO: 13399 - RNA, 20 nt, synthetic construct
  source 1..20: mol_type = other RNA
gggacaggcctgtgacccaa

SEQ ID NO: 13400 - RNA, 20 nt, synthetic construct
  source 1..20: mol_type = other RNA
gggtatgagtggggtcctgc

SEQ ID NO: 13401 - RNA, 20 nt, synthetic construct
  source 1..20: mol_type = other RNA
ggctgcccagcagtctatca

SEQ ID NO: 13402 - RNA, 20 nt, synthetic construct
  source 1..20: mol_type = other RNA
tcagttgaggtattggagag

SEQ ID NO: 13403 - RNA, 20 nt, synthetic construct
  source 1..20: mol_type = other RNA
cacccagatccttatgattt

SEQ ID NO: 13404 - RNA, 20 nt, synthetic construct
  source 1..20: mol_type = other RNA
ggctctaccatcttccatgt

SEQ ID NO: 13405 - RNA, 20 nt, synthetic construct
  source 1..20: mol_type = other RNA
atgtgacattgggcagttat

SEQ ID NO: 13406 - RNA, 20 nt, synthetic construct
  source 1..20: mol_type = other RNA
tacctgtactaacatataag

SEQ ID NO: 13407 - RNA, 20 nt, synthetic construct
  source 1..20: mol_type = other RNA
tcaacatcatcaccaccgcc

SEQ ID NO: 13408 - RNA, 20 nt, synthetic construct
  source 1..20: mol_type = other RNA
accaccatcaccatcattcc

SEQ ID NO: 13409 - RNA, 20 nt, synthetic construct
  source 1..20: mol_type = other RNA
accatcaccattatcattac

SEQ ID NO: 13410 - RNA, 20 nt, synthetic construct
  source 1..20: mol_type = other RNA
accaccatcaccattatcat

SEQ ID NO: 13411 - RNA, 20 nt, synthetic construct
  source 1..20: mol_type = other RNA
accaccatcacaattattac

SEQ ID NO: 13412 - RNA, 20 nt, synthetic construct
  source 1..20: mol_type = other RNA
tctgccccacaaccatccac

SEQ ID NO: 13413 - RNA, 20 nt, synthetic construct
  source 1..20: mol_type = other RNA
gccccacaaccatccacaca

SEQ ID NO: 13414 - RNA, 20 nt, synthetic construct
  source 1..20: mol_type = other RNA
aaccaccatcccccactagg

SEQ ID NO: 13415 - RNA, 20 nt, synthetic construct
  source 1..20: mol_type = other RNA
gcctcgcctggtctcacctg

SEQ ID NO: 13416 - RNA, 20 nt, synthetic construct
  source 1..20: mol_type = other RNA
cagtggacctgcaggtgaga

SEQ ID NO: 13417 - RNA, 20 nt, synthetic construct
  source 1..20: mol_type = other RNA
gagaatcattttctcagtgg

SEQ ID NO: 13418 - RNA, 20 nt, synthetic construct
  source 1..20: mol_type = other RNA
cagaacactaactagaccat

SEQ ID NO: 13419 - RNA, 20 nt, synthetic construct
  source 1..20: mol_type = other RNA
tcaattttctacatgtcaat

SEQ ID NO: 13420 - RNA, 20 nt, synthetic construct
  source 1..20: mol_type = other RNA
acatgtcaataatgacatca

SEQ ID NO: 13421 - RNA, 20 nt, synthetic construct
  source 1..20: mol_type = other RNA
cagcctctgagagggaggtc

SEQ ID NO: 13422 - RNA, 20 nt, synthetic construct
  source 1..20: mol_type = other RNA
tgctctccccttcatgtttc

SEQ ID NO: 13423 - RNA, 20 nt, synthetic construct
  source 1..20: mol_type = other RNA
tgtttccaggtgttccctga

SEQ ID NO: 13424 - RNA, 20 nt, synthetic construct
  source 1..20: mol_type = other RNA
aggtgttccctgacttggat

SEQ ID NO: 13425 - RNA, 20 nt, synthetic construct
  source 1..20: mol_type = other RNA
ctgacttggatcaaatgcag

SEQ ID NO: 13426 - RNA, 20 nt, synthetic construct
  source 1..20: mol_type = other RNA
aggtcagtcgtcatccacaa

SEQ ID NO: 13427 - RNA, 20 nt, synthetic construct
  source 1..20: mol_type = other RNA
atgctgctcatgtcaactcc

SEQ ID NO: 13428 - RNA, 20 nt, synthetic construct
  source 1..20: mol_type = other RNA
gaaacctgactgcatctgga

SEQ ID NO: 13429 - RNA, 20 nt, synthetic construct
  source 1..20: mol_type = other RNA
gaaccaaagtcaatgatcta

SEQ ID NO: 13430 - RNA, 20 nt, synthetic construct
  source 1..20: mol_type = other RNA
cccagagcctttgactgcac

SEQ ID NO: 13431 - RNA, 20 nt, synthetic construct
  source 1..20: mol_type = other RNA
tcccccagagcctttgactg

SEQ ID NO: 13432 - RNA, 20 nt, synthetic construct
  source 1..20: mol_type = other RNA
ttagaattttgcaaaaatcc

SEQ ID NO: 13433 - RNA, 20 nt, synthetic construct
  source 1..20: mol_type = other RNA
aatgaaagctgggcttgcaa

SEQ ID NO: 13434 - RNA, 20 nt, synthetic construct
  source 1..20: mol_type = other RNA
aattttgcaagcccagcttt

SEQ ID NO: 13435 - RNA, 20 nt, synthetic construct
  source 1..20: mol_type = other RNA
cacaaataatccagttttct

SEQ ID NO: 13436 - RNA, 20 nt, synthetic construct
  source 1..20: mol_type = other RNA
gtgttctcacaaataatcca

SEQ ID NO: 13437 - RNA, 20 nt, synthetic construct
  source 1..20: mol_type = other RNA
agatggacacacccagggat

SEQ ID NO: 13438 - RNA, 20 nt, synthetic construct
  source 1..20: mol_type = other RNA
tctggcaattttgcaaccgt

SEQ ID NO: 13439 - RNA, 20 nt, synthetic construct
  source 1..20: mol_type = other RNA
aatagaacggttgcaaaatt

SEQ ID NO: 13440 - RNA, 20 nt, synthetic construct
  source 1..20: mol_type = other RNA
ttgccaaattcaaatagaac

SEQ ID NO: 13441 - RNA, 20 nt, synthetic construct
  source 1..20: mol_type = other RNA
atttgaatttggcaaagaaa

SEQ ID NO: 13442 - RNA, 20 nt, synthetic construct
  source 1..20: mol_type = other RNA
tttgtgaaaaactgctttat

SEQ ID NO: 13443 - RNA, 20 nt, synthetic construct
  source 1..20: mol_type = other RNA
caaaagaataaacacaacca

SEQ ID NO: 13444 - RNA, 20 nt, synthetic construct
  source 1..20: mol_type = other RNA
cctggttgtgtttattcttt

SEQ ID NO: 13445 - RNA, 20 nt, synthetic construct
  source 1..20: mol_type = other RNA
ttgacaatttgggagagtga

SEQ ID NO: 13446 - RNA, 20 nt, synthetic construct
  source 1..20: mol_type = other RNA
ctctcccaaattgtcaaaga

SEQ ID NO: 13447 - RNA, 20 nt, synthetic construct
  source 1..20: mol_type = other RNA
aatttatacttctttgacaa

SEQ ID NO: 13448 - RNA, 20 nt, synthetic construct
  source 1..20: mol_type = other RNA
ttttctaatttatacttctt

SEQ ID NO: 13449 - RNA, 20 nt, synthetic construct
  source 1..20: mol_type = other RNA
acctgttagattagctaata

SEQ ID NO: 13450 - RNA, 20 nt, synthetic construct
  source 1..20: mol_type = other RNA
atttttaaatattagctaat

SEQ ID NO: 13451 - RNA, 20 nt, synthetic construct
  source 1..20: mol_type = other RNA
ccacacttgtatgagtgttc

SEQ ID NO: 13452 - RNA, 20 nt, synthetic construct
  source 1..20: mol_type = other RNA
agtgacattttacactgtca

SEQ ID NO: 13453 - RNA, 20 nt, synthetic construct
  source 1..20: mol_type = other RNA
agaaggttatgacagtgtaa

SEQ ID NO: 13454 - RNA, 20 nt, synthetic construct
  source 1..20: mol_type = other RNA
agaaaataaattggcagtgt

SEQ ID NO: 13455 - RNA, 20 nt, synthetic construct
  source 1..20: mol_type = other RNA
gtctcccaataacactgcca

SEQ ID NO: 13456 - RNA, 20 nt, synthetic construct
  source 1..20: mol_type = other RNA
cataaattatatagacatat

SEQ ID NO: 13457 - RNA, 20 nt, synthetic construct
  source 1..20: mol_type = other RNA
gagcctaagttcccataaat

SEQ ID NO: 13458 - RNA, 20 nt, synthetic construct
  source 1..20: mol_type = other RNA
ttaatattttctgagcctaa

SEQ ID NO: 13459 - RNA, 20 nt, synthetic construct
  source 1..20: mol_type = other RNA
tattccttaatattttctga

SEQ ID NO: 13460 - RNA, 20 nt, synthetic construct
  source 1..20: mol_type = other RNA
ttcttattccttaatatttt

SEQ ID NO: 13461 - RNA, 20 nt, synthetic construct
  source 1..20: mol_type = other RNA
taaagttcattcttattcct

SEQ ID NO: 13462 - RNA, 20 nt, synthetic construct
  source 1..20: mol_type = other RNA
aaccctccacatctttgttc

SEQ ID NO: 13463 - RNA, 20 nt, synthetic construct
  source 1..20: mol_type = other RNA
tccccgtgcgcgttggcccc

SEQ ID NO: 13464 - RNA, 20 nt, synthetic construct
  source 1..20: mol_type = other RNA
acctgagcctgggtctgcgg

SEQ ID NO: 13465 - RNA, 20 nt, synthetic construct
  source 1..20: mol_type = other RNA
ttaactgtagagcaggagtg

SEQ ID NO: 13466 - RNA, 20 nt, synthetic construct
  source 1..20: mol_type = other RNA
atcactcctgctctacagtt

SEQ ID NO: 13467 - RNA, 20 nt, synthetic construct
  source 1..20: mol_type = other RNA
tcctcacaacagtcctatga

SEQ ID NO: 13468 - RNA, 20 nt, synthetic construct
  source 1..20: mol_type = other RNA
taggactgttgtgaggatga

SEQ ID NO: 13469 - RNA, 20 nt, synthetic construct
  source 1..20: mol_type = other RNA
aggcacaagcttataatgtg

SEQ ID NO: 13470 - RNA, 20 nt, synthetic construct
  source 1..20: mol_type = other RNA
tttttattgcaataaaatgt

SEQ ID NO: 13471 - RNA, 20 nt, synthetic construct
  source 1..20: mol_type = other RNA
cagtggtgtgcaaccatcat

SEQ ID NO: 13472 - RNA, 20 nt, synthetic construct
  source 1..20: mol_type = other RNA
ggaaatatgatgatggttgc

SEQ ID NO: 13473 - RNA, 20 nt, synthetic construct
  source 1..20: mol_type = other RNA
agaatattttcctcatcccc

SEQ ID NO: 13474 - RNA, 20 nt, synthetic construct
  source 1..20: mol_type = other RNA
tttggggatgaggaaaatat

SEQ ID NO: 13475 - RNA, 20 nt, synthetic construct
  source 1..20: mol_type = other RNA
tcatccccaaaggaaacctc

SEQ ID NO: 13476 - RNA, 20 nt, synthetic construct
  source 1..20: mol_type = other RNA
taactaatattttaaaggag

SEQ ID NO: 13477 - RNA, 20 nt, synthetic construct
  source 1..20: mol_type = other RNA
ctcaacattacataatgagt

SEQ ID NO: 13478 - RNA, 20 nt, synthetic construct
  source 1..20: mol_type = other RNA
caccctgattttttcactca

SEQ ID NO: 13479 - RNA, 20 nt, synthetic construct
  source 1..20: mol_type = other RNA
ctaattacatcatatcacaa

SEQ ID NO: 13480 - RNA, 20 nt, synthetic construct
  source 1..20: mol_type = other RNA
ttcactaattacatcatatc

SEQ ID NO: 13481 - RNA, 20 nt, synthetic construct
  source 1..20: mol_type = other RNA
gactttttgtatgcttcttt

SEQ ID NO: 13482 - RNA, 20 nt, synthetic construct
  source 1..20: mol_type = other RNA
cagactctacatttaaacat

SEQ ID NO: 13483 - RNA, 20 nt, synthetic construct
  source 1..20: mol_type = other RNA
ttgcttttaaaaccataaag

SEQ ID NO: 13484 - RNA, 20 nt, synthetic construct
  source 1..20: mol_type = other RNA
ttatggttttaaaagcaaag

SEQ ID NO: 13485 - RNA, 20 nt, synthetic construct
  source 1..20: mol_type = other RNA
ttacctttttctttgctttt

SEQ ID NO: 13486 - RNA, 20 nt, synthetic construct
  source 1..20: mol_type = other RNA
aaaaacctggatttaacaat

SEQ ID NO: 13487 - RNA, 20 nt, synthetic construct
  source 1..20: mol_type = other RNA
gagagtctggcagcattggg

SEQ ID NO: 13488 - RNA, 20 nt, synthetic construct
  source 1..20: mol_type = other RNA
acagcctcacggacagacag

SEQ ID NO: 13489 - RNA, 20 nt, synthetic construct
  source 1..20: mol_type = other RNA
caaggaaactccagaagaac

SEQ ID NO: 13490 - RNA, 20 nt, synthetic construct
  source 1..20: mol_type = other RNA
tctggagtttccttgtgaac

SEQ ID NO: 13491 - RNA, 20 nt, synthetic construct
  source 1..20: mol_type = other RNA
ggagtttccttgtgaacatg

SEQ ID NO: 13492 - RNA, 20 nt, synthetic construct
  source 1..20: mol_type = other RNA
ttgtgaacatgttgtggacg

SEQ ID NO: 13493 - RNA, 20 nt, synthetic construct
  source 1..20: mol_type = other RNA
ttcatctttttaaacacagg

SEQ ID NO: 13494 - RNA, 20 nt, synthetic construct
  source 1..20: mol_type = other RNA
tctttttaaacacaggtacc

SEQ ID NO: 13495 - RNA, 20 nt, synthetic construct
  source 1..20: mol_type = other RNA
ttgagaaagccagccccaaa

SEQ ID NO: 13496 - RNA, 20 nt, synthetic construct
  source 1..20: mol_type = other RNA
caaggaagcccagctccctg

SEQ ID NO: 13497 - RNA, 20 nt, synthetic construct
  source 1..20: mol_type = other RNA
caatcacagggagctgggct

SEQ ID NO: 13498 - RNA, 20 nt, synthetic construct
  source 1..20: mol_type = other RNA
gaaactcatagcgattgcac

SEQ ID NO: 13499 - RNA, 20 nt, synthetic construct
  source 1..20: mol_type = other RNA
attcagaaactcatagcgat

SEQ ID NO: 13500 - RNA, 20 nt, synthetic construct
  source 1..20: mol_type = other RNA
gaatggaagagtcaaatcca

SEQ ID NO: 13501 - RNA, 20 nt, synthetic construct
  source 1..20: mol_type = other RNA
taccttgcaactgtcaatgc

SEQ ID NO: 13502 - RNA, 20 nt, synthetic construct
  source 1..20: mol_type = other RNA
ctactttgggactcaagtct

SEQ ID NO: 13503 - RNA, 20 nt, synthetic construct
  source 1..20: mol_type = other RNA
attgattaaatcctacttga

SEQ ID NO: 13504 - RNA, 20 nt, synthetic construct
  source 1..20: mol_type = other RNA
agtaggatttaatcaatgga

SEQ ID NO: 13505 - RNA, 20 nt, synthetic construct
  source 1..20: mol_type = other RNA
gagcaacacttagactgggg

SEQ ID NO: 13506 - RNA, 20 nt, synthetic construct
  source 1..20: mol_type = other RNA
gatcatccaaggggacttct

SEQ ID NO: 13507 - RNA, 20 nt, synthetic construct
  source 1..20: mol_type = other RNA
tggggcttgagttccagatc

SEQ ID NO: 13508 - RNA, 20 nt, synthetic construct
  source 1..20: mol_type = other RNA
agatcagcagcaagggagcc

SEQ ID NO: 13509 - RNA, 20 nt, synthetic construct
  source 1..20: mol_type = other RNA
ctaccagaaaaatcaccact

SEQ ID NO: 13510 - RNA, 20 nt, synthetic construct
  source 1..20: mol_type = other RNA
ggtagggaaggaggtagagg

SEQ ID NO: 13511 - RNA, 20 nt, synthetic construct
  source 1..20: mol_type = other RNA
acttaattctaccactcttg

SEQ ID NO: 13512 - RNA, 20 nt, synthetic construct
  source 1..20: mol_type = other RNA
accactcttgctttacttca

SEQ ID NO: 13513 - RNA, 20 nt, synthetic construct
  source 1..20: mol_type = other RNA
catgaagtaaagcaagagtg

SEQ ID NO: 13514 - RNA, 20 nt, synthetic construct
  source 1..20: mol_type = other RNA
ttctcatgaagtaaagcaag

SEQ ID NO: 13515 - RNA, 20 nt, synthetic construct
  source 1..20: mol_type = other RNA
tgagaacgaaaatgtaagat

SEQ ID NO: 13516 - RNA, 20 nt, synthetic construct
  source 1..20: mol_type = other RNA
tggtgcaatcttacattttc

SEQ ID NO: 13517 - RNA, 20 nt, synthetic construct
  source 1..20: mol_type = other RNA
gcaaatgaattcatggtgca

SEQ ID NO: 13518 - RNA, 20 nt, synthetic construct
  source 1..20: mol_type = other RNA
tttgcggaaagattgatact

SEQ ID NO: 13519 - RNA, 20 nt, synthetic construct
  source 1..20: mol_type = other RNA
accggggtgagagtctcaat

SEQ ID NO: 13520 - RNA, 20 nt, synthetic construct
  source 1..20: mol_type = other RNA
cttgaacccaggaggtggaa

SEQ ID NO: 13521 - RNA, 20 nt, synthetic construct
  source 1..20: mol_type = other RNA
acctcctgggttcaagtgaa

SEQ ID NO: 13522 - RNA, 20 nt, synthetic construct
  source 1..20: mol_type = other RNA
agtgaatactccagcctccc

SEQ ID NO: 13523 - RNA, 20 nt, synthetic construct
  source 1..20: mol_type = other RNA
ccacattggcctggctggtc

SEQ ID NO: 13524 - RNA, 20 nt, synthetic construct
  source 1..20: mol_type = other RNA
agtagttgtggcttaaataa

SEQ ID NO: 13525 - RNA, 20 nt, synthetic construct
  source 1..20: mol_type = other RNA
tattctagtagttgtggctt

SEQ ID NO: 13526 - RNA, 20 nt, synthetic construct
  source 1..20: mol_type = other RNA
ttcctgagacattcttgctc

SEQ ID NO: 13527 - RNA, 20 nt, synthetic construct
  source 1..20: mol_type = other RNA
tgagacattcttgctctgtc

SEQ ID NO: 13528 - RNA, 20 nt, synthetic construct
  source 1..20: mol_type = other RNA
tgctctgtcacccaggctgg

SEQ ID NO: 13529 - RNA, 20 nt, synthetic construct
  source 1..20: mol_type = other RNA
tggctcactgcaacctccat

SEQ ID NO: 13530 - RNA, 20 nt, synthetic construct
  source 1..20: mol_type = other RNA
agcaattctagtgcctcagc

SEQ ID NO: 13531 - RNA, 20 nt, synthetic construct
  source 1..20: mol_type = other RNA
agtgcctcagcctacttagt

SEQ ID NO: 13532 - RNA, 20 nt, synthetic construct
  source 1..20: mol_type = other RNA
gtaattataaattatgttat

SEQ ID NO: 13533 - RNA, 20 nt, synthetic construct
  source 1..20: mol_type = other RNA
tagtgaactcacatgttttc

SEQ ID NO: 13534 - RNA, 20 nt, synthetic construct
  source 1..20: mol_type = other RNA
aaatttatttattcctagtg

SEQ ID NO: 13535 - RNA, 20 nt, synthetic construct
  source 1..20: mol_type = other RNA
ctaggaataaataaattttg

SEQ ID NO: 13536 - RNA, 20 nt, synthetic construct
  source 1..20: mol_type = other RNA
ggtcttagtttacgagcaag

SEQ ID NO: 13537 - RNA, 20 nt, synthetic construct
  source 1..20: mol_type = other RNA
cgaggttgtgtcgctaccca

SEQ ID NO: 13538 - RNA, 20 nt, synthetic construct
  source 1..20: mol_type = other RNA
aacaggcagtgctgtacgag

SEQ ID NO: 13539 - RNA, 20 nt, synthetic construct
  source 1..20: mol_type = other RNA
atgaccagaccctctgccaa

SEQ ID NO: 13540 - RNA, 20 nt, synthetic construct
  source 1..20: mol_type = other RNA
tttggataaaataaaatcat

SEQ ID NO: 13541 - RNA, 20 nt, synthetic construct
  source 1..20: mol_type = other RNA
ctttcttttggataaaataa

SEQ ID NO: 13542 - RNA, 20 nt, synthetic construct
  source 1..20: mol_type = other RNA
ttctctttcttttggataaa

SEQ ID NO: 13543 - RNA, 20 nt, synthetic construct
  source 1..20: mol_type = other RNA
ttcattctctttcttttgga

SEQ ID NO: 13544 - RNA, 20 nt, synthetic construct
  source 1..20: mol_type = other RNA
tcccctcttctttcattctc

SEQ ID NO: 13545 - RNA, 20 nt, synthetic construct
  source 1..20: mol_type = other RNA
ctcacccctagaccttcatc

SEQ ID NO: 13546 - RNA, 20 nt, synthetic construct
  source 1..20: mol_type = other RNA
ccacttcccagcatctattg

SEQ ID NO: 13547 - RNA, 20 nt, synthetic construct
  source 1..20: mol_type = other RNA
aacattaccttgaatataga

SEQ ID NO: 13548 - RNA, 20 nt, synthetic construct
  source 1..20: mol_type = other RNA
aggtaatgtttgaaccctgc

SEQ ID NO: 13549 - RNA, 20 nt, synthetic construct
  source 1..20: mol_type = other RNA
ctcagagacccatgccactg

SEQ ID NO: 13550 - RNA, 20 nt, synthetic construct
  source 1..20: mol_type = other RNA
gggcactgctggccagtccc

SEQ ID NO: 13551 - RNA, 20 nt, synthetic construct
  source 1..20: mol_type = other RNA
attttgggactggccagcag

SEQ ID NO: 13552 - RNA, 20 nt, synthetic construct
  source 1..20: mol_type = other RNA
ttatgttccattttgggact

SEQ ID NO: 13553 - RNA, 20 nt, synthetic construct
  source 1..20: mol_type = other RNA
gaaataaaagaagtagaaga

SEQ ID NO: 13554 - RNA, 20 nt, synthetic construct
  source 1..20: mol_type = other RNA
tctacttcttttatttctga

SEQ ID NO: 13555 - RNA, 20 nt, synthetic construct
  source 1..20: mol_type = other RNA
acttcttttatttctgaaat

SEQ ID NO: 13556 - RNA, 20 nt, synthetic construct
  source 1..20: mol_type = other RNA
tttatttctgaaatcaggta

SEQ ID NO: 13557 - RNA, 20 nt, synthetic construct
  source 1..20: mol_type = other RNA
gaaatcaggtaagacatagt

SEQ ID NO: 13558 - RNA, 20 nt, synthetic construct
  source 1..20: mol_type = other RNA
tataatttaaaaaaactatg

SEQ ID NO: 13559 - RNA, 20 nt, synthetic construct
  source 1..20: mol_type = other RNA
cccacaatgtagtaaaaata

SEQ ID NO: 13560 - RNA, 20 nt, synthetic construct
  source 1..20: mol_type = other RNA
tgaatcaaaaattaaatgaa

SEQ ID NO: 13561 - RNA, 20 nt, synthetic construct
  source 1..20: mol_type = other RNA
tttaatttttgattcatgaa

SEQ ID NO: 13562 - RNA, 20 nt, synthetic construct
  source 1..20: mol_type = other RNA
tgaaattcccagttcaaaat

SEQ ID NO: 13563 - RNA, 20 nt, synthetic construct
  source 1..20: mol_type = other RNA
atcatatacaagattttgaa

SEQ ID NO: 13564 - RNA, 20 nt, synthetic construct
  source 1..20: mol_type = other RNA
aaatcttgtatatgattgaa

SEQ ID NO: 13565 - RNA, 20 nt, synthetic construct
  source 1..20: mol_type = other RNA
taaaaaaataagtttaattt

SEQ ID NO: 13566 - RNA, 20 nt, synthetic construct
  source 1..20: mol_type = other RNA
ttccagcaccgtgacagtct

SEQ ID NO: 13567 - RNA, 20 nt, synthetic construct
  source 1..20: mol_type = other RNA
aatctaaaagagtgtgccta

SEQ ID NO: 13568 - RNA, 20 nt, synthetic construct
  source 1..20: mol_type = other RNA
gccagactggccatcatgta

SEQ ID NO: 13569 - RNA, 20 nt, synthetic construct
  source 1..20: mol_type = other RNA
cttggttctcagtttcatta

SEQ ID NO: 13570 - RNA, 20 nt, synthetic construct
  source 1..20: mol_type = other RNA
cagtttcattaatttatatc

SEQ ID NO: 13571 - RNA, 20 nt, synthetic construct
  source 1..20: mol_type = other RNA
ttaatttatatcatctctgt

SEQ ID NO: 13572 - RNA, 20 nt, synthetic construct
  source 1..20: mol_type = other RNA
ggtgccatgctcccctcact

SEQ ID NO: 13573 - RNA, 20 nt, synthetic construct
  source 1..20: mol_type = other RNA
acttgctagtgaggggagca

SEQ ID NO: 13574 - RNA, 20 nt, synthetic construct
  source 1..20: mol_type = other RNA
ttgtttcaacttgctagtga

SEQ ID NO: 13575 - RNA, 20 nt, synthetic construct
  source 1..20: mol_type = other RNA
aagagttatttcattgtttc

SEQ ID NO: 13576 - RNA, 20 nt, synthetic construct
  source 1..20: mol_type = other RNA
ttgacctgttcatggagtgg

SEQ ID NO: 13577 - RNA, 20 nt, synthetic construct
  source 1..20: mol_type = other RNA
tggagtgggactcagcattt

SEQ ID NO: 13578 - RNA, 20 nt, synthetic construct
  source 1..20: mol_type = other RNA
ctctttgttatggcctgagt

SEQ ID NO: 13579 - RNA, 20 nt, synthetic construct
  source 1..20: mol_type = other RNA
atcggtatacatttgcttct

SEQ ID NO: 13580 - RNA, 20 nt, synthetic construct
  source 1..20: mol_type = other RNA
ccagggataagaagcaaatg

SEQ ID NO: 13581 - RNA, 20 nt, synthetic construct
  source 1..20: mol_type = other RNA
tatccctggagaaattatac

SEQ ID NO: 13582 - RNA, 20 nt, synthetic construct
  source 1..20: mol_type = other RNA
acaaatactcagggtatttg

SEQ ID NO: 13583 - RNA, 20 nt, synthetic construct
  source 1..20: mol_type = other RNA
caatcacacacggtgtgtat

SEQ ID NO: 13584 - RNA, 20 nt, synthetic construct
  source 1..20: mol_type = other RNA
ttgtttataaaatggggatg

SEQ ID NO: 13585 - RNA, 20 nt, synthetic construct
  source 1..20: mol_type = other RNA
taagtctagatttctttgtt

SEQ ID NO: 13586 - RNA, 20 nt, synthetic construct
  source 1..20: mol_type = other RNA
ttgatttgggaatttggtca

SEQ ID NO: 13587 - RNA, 20 nt, synthetic construct
  source 1..20: mol_type = other RNA
ttatttccttgatttgggaa

SEQ ID NO: 13588 - RNA, 20 nt, synthetic construct
  source 1..20: mol_type = other RNA
caaatcaaggaaataaagaa

SEQ ID NO: 13589 - RNA, 20 nt, synthetic construct
  source 1..20: mol_type = other RNA
tggaaatctggcttaaatcc

SEQ ID NO: 13590 - RNA, 20 nt, synthetic construct
  source 1..20: mol_type = other RNA
aagaaaaaatctagggctct

SEQ ID NO: 13591 - RNA, 20 nt, synthetic construct
  source 1..20: mol_type = other RNA
cactttttcatctttgttcc

SEQ ID NO: 13592 - RNA, 20 nt, synthetic construct
  source 1..20: mol_type = other RNA
aatgttggaacaaagatgaa

SEQ ID NO: 13593 - RNA, 20 nt, synthetic construct
  source 1..20: mol_type = other RNA
tctttgttccaacatttgaa

SEQ ID NO: 13594 - RNA, 20 nt, synthetic construct
  source 1..20: mol_type = other RNA
aacatttgaaaaaataaatc

SEQ ID NO: 13595 - RNA, 20 nt, synthetic construct
  source 1..20: mol_type = other RNA
gttacattggaatgtgttta

SEQ ID NO: 13596 - RNA, 20 nt, synthetic construct
  source 1..20: mol_type = other RNA
aatgtaactgaagagcaggt

SEQ ID NO: 13597 - RNA, 20 nt, synthetic construct
  source 1..20: mol_type = other RNA
gcaagtggcaaacaattaac

SEQ ID NO: 13598 - RNA, 20 nt, synthetic construct
  source 1..20: mol_type = other RNA
taattggattctgcaagtgg

SEQ ID NO: 13599 - RNA, 20 nt, synthetic construct
  source 1..20: mol_type = other RNA
ctcttcttaattggattctg

SEQ ID NO: 13600 - RNA, 20 nt, synthetic construct
  source 1..20: mol_type = other RNA
ttataccagacttctctctt

SEQ ID NO: 13601 - RNA, 20 nt, synthetic construct
  source 1..20: mol_type = other RNA
cctaagctagctttggaagc

SEQ ID NO: 13602 - RNA, 20 nt, synthetic construct
  source 1..20: mol_type = other RNA
tcccctaagctagctttgga

SEQ ID NO: 13603 - RNA, 20 nt, synthetic construct
  source 1..20: mol_type = other RNA
aaagctagcttaggggaaga

SEQ ID NO: 13604 - RNA, 20 nt, synthetic construct
  source 1..20: mol_type = other RNA
gctcctaaagtgaagtagta

SEQ ID NO: 13605 - RNA, 20 nt, synthetic construct
  source 1..20: mol_type = other RNA
ctttaggagcagaaagtggc

SEQ ID NO: 13606 - RNA, 20 nt, synthetic construct
  source 1..20: mol_type = other RNA
ggggtccatgctagcttggg

SEQ ID NO: 13607 - RNA, 20 nt, synthetic construct
  source 1..20: mol_type = other RNA
caggtgatttataaaccaaa

SEQ ID NO: 13608 - RNA, 20 nt, synthetic construct
  source 1..20: mol_type = other RNA
agatggaactcctgagttca

SEQ ID NO: 13609 - RNA, 20 nt, synthetic construct
  source 1..20: mol_type = other RNA
atcttgaagcacatacatag

SEQ ID NO: 13610 - RNA, 20 nt, synthetic construct
  source 1..20: mol_type = other RNA
tctaactatgtatgtgcttc

SEQ ID NO: 13611 - RNA, 20 nt, synthetic construct
  source 1..20: mol_type = other RNA
tcagactctccctgcagggc

SEQ ID NO: 13612 - RNA, 20 nt, synthetic construct
  source 1..20: mol_type = other RNA
aatgtgtttgactttaaagt

SEQ ID NO: 13613 - RNA, 20 nt, synthetic construct
  source 1..20: mol_type = other RNA
actaaattcaaatgtgtttg

SEQ ID NO: 13614 - RNA, 20 nt, synthetic construct
  source 1..20: mol_type = other RNA
tgaatggcttccactaaatt

SEQ ID NO: 13615 - RNA, 20 nt, synthetic construct
  source 1..20: mol_type = other RNA
ttgatattttcttgaatggc

SEQ ID NO: 13616 - RNA, 20 nt, synthetic construct
  source 1..20: mol_type = other RNA
agaaaatatcaaagaaaata

SEQ ID NO: 13617 - RNA, 20 nt, synthetic construct
  source 1..20: mol_type = other RNA
cctgctctgtattttctttg

SEQ ID NO: 13618 - RNA, 20 nt, synthetic construct
  source 1..20: mol_type = other RNA
ccaaaaaactctttgcttaa

SEQ ID NO: 13619 - RNA, 20 nt, synthetic construct
  source 1..20: mol_type = other RNA
atgggctgaaatagaatatt

SEQ ID NO: 13620 - RNA, 20 nt, synthetic construct
  source 1..20: mol_type = other RNA
atttcagcccatggaaacta

SEQ ID NO: 13621 - RNA, 20 nt, synthetic construct
  source 1..20: mol_type = other RNA
gcaggctacacccaaaggct

SEQ ID NO: 13622 - RNA, 20 nt, synthetic construct
  source 1..20: mol_type = other RNA
ctgccacaggattaacatat

SEQ ID NO: 13623 - RNA, 20 nt, synthetic construct
  source 1..20: mol_type = other RNA
aaaagagcttatcagagaat

SEQ ID NO: 13624 - RNA, 20 nt, synthetic construct
  source 1..20: mol_type = other RNA
ctgataagctcttttggaaa

SEQ ID NO: 13625 - RNA, 20 nt, synthetic construct
  source 1..20: mol_type = other RNA
gtggacgtgttatctttcca

SEQ ID NO: 13626 - RNA, 20 nt, synthetic construct
  source 1..20: mol_type = other RNA
tctccccgggcattccagca

SEQ ID NO: 13627 - RNA, 20 nt, synthetic construct
  source 1..20: mol_type = other RNA
cactgagcatggctgtaaaa

SEQ ID NO: 13628 - RNA, 20 nt, synthetic construct
  source 1..20: mol_type = other RNA
tttacagccatgctcagtga

SEQ ID NO: 13629 - RNA, 20 nt, synthetic construct
  source 1..20: mol_type = other RNA
ccgcttctcactgagcatgg

SEQ ID NO: 13630 - RNA, 20 nt, synthetic construct
  source 1..20: mol_type = other RNA
tcactgtggtgtgtgaatgt

SEQ ID NO: 13631 - RNA, 20 nt, synthetic construct
  source 1..20: mol_type = other RNA
tcctcactgtggtgtgtgaa

SEQ ID NO: 13632 - RNA, 20 nt, synthetic construct
  source 1..20: mol_type = other RNA
cacaccacagtgaggaagaa

SEQ ID NO: 13633 - RNA, 20 nt, synthetic construct
  source 1..20: mol_type = other RNA
cacaccattaataaaataca

SEQ ID NO: 13634 - RNA, 20 nt, synthetic construct
  source 1..20: mol_type = other RNA
gtagcaatatacatctacat

SEQ ID NO: 13635 - RNA, 20 nt, synthetic construct
  source 1..20: mol_type = other RNA
tattaaaagatttgtttaat

SEQ ID NO: 13636 - RNA, 20 nt, synthetic construct
  source 1..20: mol_type = other RNA
tcaccaacaaataaacccta

SEQ ID NO: 13637 - RNA, 20 nt, synthetic construct
  source 1..20: mol_type = other RNA
ccaacaaataaaccctatta

SEQ ID NO: 13638 - RNA, 20 nt, synthetic construct
  source 1..20: mol_type = other RNA
cctccagggctcatatggca

SEQ ID NO: 13639 - RNA, 20 nt, synthetic construct
  source 1..20: mol_type = other RNA
ctgattcacctccagggctc

SEQ ID NO: 13640 - RNA, 20 nt, synthetic construct
  source 1..20: mol_type = other RNA
acaatccttttgtttctctg

SEQ ID NO: 13641 - RNA, 20 nt, synthetic construct
  source 1..20: mol_type = other RNA
ttttttaacctgatgatttt

SEQ ID NO: 13642 - RNA, 20 nt, synthetic construct
  source 1..20: mol_type = other RNA
gttttgggatatttcctagc

SEQ ID NO: 13643 - RNA, 20 nt, synthetic construct
  source 1..20: mol_type = other RNA
tagcaacatgagctggggag

SEQ ID NO: 13644 - RNA, 20 nt, synthetic construct
  source 1..20: mol_type = other RNA
tagagcatcactgctgagat

SEQ ID NO: 13645 - RNA, 20 nt, synthetic construct
  source 1..20: mol_type = other RNA
ccctttaactaagttacctg

SEQ ID NO: 13646 - RNA, 20 nt, synthetic construct
  source 1..20: mol_type = other RNA
atttatttccccctttaact

SEQ ID NO: 13647 - RNA, 20 nt, synthetic construct
  source 1..20: mol_type = other RNA
aaaagaggaaacttccattt

SEQ ID NO: 13648 - RNA, 20 nt, synthetic construct
  source 1..20: mol_type = other RNA
tctttttgaatatcaattgt

SEQ ID NO: 13649 - RNA, 20 nt, synthetic construct
  source 1..20: mol_type = other RNA
aaaacactcttcaaaatgtt

SEQ ID NO: 13650 - RNA, 20 nt, synthetic construct
  source 1..20: mol_type = other RNA
gttaaacattttgaagagtg

SEQ ID NO: 13651 - RNA, 20 nt, synthetic construct
  source 1..20: mol_type = other RNA
aaatgtttaactgaactcac

SEQ ID NO: 13652 - RNA, 20 nt, synthetic construct
  source 1..20: mol_type = other RNA
tacagtgagttcagttaaac

SEQ ID NO: 13653 - RNA, 20 nt, synthetic construct
  source 1..20: mol_type = other RNA
aaacacacaataaattaata

SEQ ID NO: 13654 - RNA, 20 nt, synthetic construct
  source 1..20: mol_type = other RNA
atagctcacagtgtgacttc

SEQ ID NO: 13655 - RNA, 20 nt, synthetic construct
  source 1..20: mol_type = other RNA
aggaagagttgtgcttgggt

SEQ ID NO: 13656 - RNA, 20 nt, synthetic construct
  source 1..20: mol_type = other RNA
catttgaactctcttttcca

SEQ ID NO: 13657 - RNA, 20 nt, synthetic construct
  source 1..20: mol_type = other RNA
tggaaaagagagttcaaatg

SEQ ID NO: 13658 - RNA, 20 nt, synthetic construct
  source 1..20: mol_type = other RNA
ccccgcactgtttctcattt

SEQ ID NO: 13659 - RNA, 20 nt, synthetic construct
  source 1..20: mol_type = other RNA
aatgagaaacagtgcggggt

SEQ ID NO: 13660 - RNA, 20 nt, synthetic construct
  source 1..20: mol_type = other RNA
caatgatattttgatatatc

SEQ ID NO: 13661 - RNA, 20 nt, synthetic construct
  source 1..20: mol_type = other RNA
gaacctaatccactaaaaag

SEQ ID NO: 13662 - RNA, 20 nt, synthetic construct
  source 1..20: mol_type = other RNA
gaatgcatcagccaatgcct

SEQ ID NO: 13663 - RNA, 20 nt, synthetic construct
  source 1..20: mol_type = other RNA
cagaaaggcctgtcctgacc

SEQ ID NO: 13664 - RNA, 20 nt, synthetic construct
  source 1..20: mol_type = other RNA
cattctcagaaaggcctgtc

SEQ ID NO: 13665 - RNA, 20 nt, synthetic construct
  source 1..20: mol_type = other RNA
gagaatgagaatctgttcat

SEQ ID NO: 13666 - RNA, 20 nt, synthetic construct
  source 1..20: mol_type = other RNA
gaaagatgacacactgcaga

SEQ ID NO: 13667 - RNA, 20 nt, synthetic construct
  source 1..20: mol_type = other RNA
gagccaggcttctctcctgc

SEQ ID NO: 13668 - RNA, 20 nt, synthetic construct
  source 1..20: mol_type = other RNA
ttttattagcctcttttggc

SEQ ID NO: 13669 - RNA, 20 nt, synthetic construct
  source 1..20: mol_type = other RNA
cagggtgagaggccaaaaga

SEQ ID NO: 13670 - RNA, 20 nt, synthetic construct
  source 1..20: mol_type = other RNA
aagcctggagatgccagctc

SEQ ID NO: 13671 - RNA, 20 nt, synthetic construct
  source 1..20: mol_type = other RNA
gcagccctcttccaagcctg

SEQ ID NO: 13672 - RNA, 20 nt, synthetic construct
  source 1..20: mol_type = other RNA
cattgcaaggctactgagca

SEQ ID NO: 13673 - RNA, 20 nt, synthetic construct
  source 1..20: mol_type = other RNA
gcctggttgtggcaaagggt

SEQ ID NO: 13674 - RNA, 20 nt, synthetic construct
  source 1..20: mol_type = other RNA
aaagctgctttctgcctggt

SEQ ID NO: 13675 - RNA, 20 nt, synthetic construct
  source 1..20: mol_type = other RNA
ttgagatcaaatctgaggca

SEQ ID NO: 13676 - RNA, 20 nt, synthetic construct
  source 1..20: mol_type = other RNA
gaggaaattgtaaaaaagca

SEQ ID NO: 13677 - RNA, 20 nt, synthetic construct
  source 1..20: mol_type = other RNA
gcttttttacaatttcctct

SEQ ID NO: 13678 - RNA, 20 nt, synthetic construct
  source 1..20: mol_type = other RNA
tctgaaatctggatgcctat

SEQ ID NO: 13679 - RNA, 20 nt, synthetic construct
  source 1..20: mol_type = other RNA
aaggtgttgataggcatcca

SEQ ID NO: 13680 - RNA, 20 nt, synthetic construct
  source 1..20: mol_type = other RNA
gtttttccaaggtgttgata

SEQ ID NO: 13681 - RNA, 20 nt, synthetic construct
  source 1..20: mol_type = other RNA
ccccaactaatagtggtgtg

SEQ ID NO: 13682 - RNA, 20 nt, synthetic construct
  source 1..20: mol_type = other RNA
ttgtggaggagcttcatatc

SEQ ID NO: 13683 - RNA, 20 nt, synthetic construct
  source 1..20: mol_type = other RNA
tatcctccattttttttttg

SEQ ID NO: 13684 - RNA, 20 nt, synthetic construct
  source 1..20: mol_type = other RNA
catcttgggcaaaaattaag

SEQ ID NO: 13685 - RNA, 20 nt, synthetic construct
  source 1..20: mol_type = other RNA
ctttttatttattcccaaca

SEQ ID NO: 13686 - RNA, 20 nt, synthetic construct
  source 1..20: mol_type = other RNA
caacatcatccatgcaccaa

SEQ ID NO: 13687 - RNA, 20 nt, synthetic construct
  source 1..20: mol_type = other RNA
gaatggtccctcctttagtt

SEQ ID NO: 13688 - RNA, 20 nt, synthetic construct
  source 1..20: mol_type = other RNA
gaagatgcttatcaactgtc

SEQ ID NO: 13689 - RNA, 20 nt, synthetic construct
  source 1..20: mol_type = other RNA
tacaatatgtgcattggttg

SEQ ID NO: 13690 - RNA, 20 nt, synthetic construct
  source 1..20: mol_type = other RNA
tttctacacagggattagca

SEQ ID NO: 13691 - RNA, 20 nt, synthetic construct
  source 1..20: mol_type = other RNA
acacagggattagcagatca

SEQ ID NO: 13692 - RNA, 20 nt, synthetic construct
  source 1..20: mol_type = other RNA
tatttaagattttatggtta

SEQ ID NO: 13693 - RNA, 20 nt, synthetic construct
  source 1..20: mol_type = other RNA
acctcctgctcatatctagc

SEQ ID NO: 13694 - RNA, 20 nt, synthetic construct
  source 1..20: mol_type = other RNA
ctcaggggcttccacctcct

SEQ ID NO: 13695 - RNA, 20 nt, synthetic construct
  source 1..20: mol_type = other RNA
ccagacctccattctctcag

SEQ ID NO: 13696 - RNA, 20 nt, synthetic construct
  source 1..20: mol_type = other RNA
gattctccagacctccattc

SEQ ID NO: 13697 - RNA, 20 nt, synthetic construct
  source 1..20: mol_type = other RNA
ccctcctccactcatgtcta

SEQ ID NO: 13698 - RNA, 20 nt, synthetic construct
  source 1..20: mol_type = other RNA
acctaggtattccccctcct

SEQ ID NO: 13699 - RNA, 20 nt, synthetic construct
  source 1..20: mol_type = other RNA
tttctacctaggtattcccc

SEQ ID NO: 13700 - RNA, 20 nt, synthetic construct
  source 1..20: mol_type = other RNA
gaaaagttaactgcacagtg

SEQ ID NO: 13701 - RNA, 20 nt, synthetic construct
  source 1..20: mol_type = other RNA
gaatgctgctagatacatgc

SEQ ID NO: 13702 - RNA, 20 nt, synthetic construct
  source 1..20: mol_type = other RNA
ctccctatcagcatgtatct

SEQ ID NO: 13703 - RNA, 20 nt, synthetic construct
  source 1..20: mol_type = other RNA
cctttgccctcttccctccc

SEQ ID NO: 13704 - RNA, 20 nt, synthetic construct
  source 1..20: mol_type = other RNA
taagagatacacggttgcag

SEQ ID NO: 13705 - RNA, 20 nt, synthetic construct
  source 1..20: mol_type = other RNA
tgccaccacccaaagaaggt

SEQ ID NO: 13706 - RNA, 20 nt, synthetic construct
  source 1..20: mol_type = other RNA
ttgggtggtggcaagaagca

SEQ ID NO: 13707 - RNA, 20 nt, synthetic construct
  source 1..20: mol_type = other RNA
acgtaatggctgcattgctt

SEQ ID NO: 13708 - RNA, 20 nt, synthetic construct
  source 1..20: mol_type = other RNA
tatcaaacacctgtatcaca

SEQ ID NO: 13709 - RNA, 20 nt, synthetic construct
  source 1..20: mol_type = other RNA
ttaacacctgtgatacaggt

SEQ ID NO: 13710 - RNA, 20 nt, synthetic construct
  source 1..20: mol_type = other RNA
tgtttctttaacacctgtga

SEQ ID NO: 13711 - RNA, 20 nt, synthetic construct
  source 1..20: mol_type = other RNA
tgtattcttaataatgattt

SEQ ID NO: 13712 - RNA, 20 nt, synthetic construct
  source 1..20: mol_type = other RNA
taataatgatttgcaatatt

SEQ ID NO: 13713 - RNA, 20 nt, synthetic construct
  source 1..20: mol_type = other RNA
aacctaaagaaatacttttt

SEQ ID NO: 13714 - RNA, 20 nt, synthetic construct
  source 1..20: mol_type = other RNA
ttaggttggaattacttcta

SEQ ID NO: 13715 - RNA, 20 nt, synthetic construct
  source 1..20: mol_type = other RNA
acgcattgacttatcttcct

SEQ ID NO: 13716 - RNA, 20 nt, synthetic construct
  source 1..20: mol_type = other RNA
tgggtttcattagccgtacc

SEQ ID NO: 13717 - RNA, 20 nt, synthetic construct
  source 1..20: mol_type = other RNA
ttagccgtacccgttgtact

SEQ ID NO: 13718 - RNA, 20 nt, synthetic construct
  source 1..20: mol_type = other RNA
tccttaccactgtttatctc

SEQ ID NO: 13719 - RNA, 20 nt, synthetic construct
  source 1..20: mol_type = other RNA
ttaccactgtttatctcaaa

SEQ ID NO: 13720 - RNA, 20 nt, synthetic construct
  source 1..20: mol_type = other RNA
ggactctcacggacctccag

SEQ ID NO: 13721 - RNA, 20 nt, synthetic construct
  source 1..20: mol_type = other RNA
ataaggcagctacactgtgc

SEQ ID NO: 13722 - RNA, 20 nt, synthetic construct
  source 1..20: mol_type = other RNA
gcactggtccctgcccctac

SEQ ID NO: 13723 - RNA, 20 nt, synthetic construct
  source 1..20: mol_type = other RNA
tcactgggcagagcacagcc

SEQ ID NO: 13724 - RNA, 20 nt, synthetic construct
  source 1..20: mol_type = other RNA
ggcagggccagggtggctgt

SEQ ID NO: 13725 - RNA, 20 nt, synthetic construct
  source 1..20: mol_type = other RNA
tccccagagaagcacagagc

SEQ ID NO: 13726 - RNA, 20 nt, synthetic construct
  source 1..20: mol_type = other RNA
ctggggaggaaatccaagag

SEQ ID NO: 13727 - RNA, 20 nt, synthetic construct
  source 1..20: mol_type = other RNA
gctgcagcagtaccaccgtt

SEQ ID NO: 13728 - RNA, 20 nt, synthetic construct
  source 1..20: mol_type = other RNA
caagcccaagggcattaacg

SEQ ID NO: 13729 - RNA, 20 nt, synthetic construct
  source 1..20: mol_type = other RNA
ttctcaagcccaagggcatt

SEQ ID NO: 13730 - RNA, 20 nt, synthetic construct
  source 1..20: mol_type = other RNA
ctgacacctccagcacacag

SEQ ID NO: 13731 - RNA, 20 nt, synthetic construct
  source 1..20: mol_type = other RNA
ctgctgtgtgctggaggtgt

SEQ ID NO: 13732 - RNA, 20 nt, synthetic construct
  source 1..20: mol_type = other RNA
ttccctgctgtgtgctggag

SEQ ID NO: 13733 - RNA, 20 nt, synthetic construct
  source 1..20: mol_type = other RNA
agtttctctttcttgtgagc

SEQ ID NO: 13734 - RNA, 20 nt, synthetic construct
  source 1..20: mol_type = other RNA
ctttcttgtgagctttcacc

SEQ ID NO: 13735 - RNA, 20 nt, synthetic construct
  source 1..20: mol_type = other RNA
tgtgagctttcacctgctac

SEQ ID NO: 13736 - RNA, 20 nt, synthetic construct
  source 1..20: mol_type = other RNA
cctgctactcttcaccaggc

SEQ ID NO: 13737 - RNA, 20 nt, synthetic construct
  source 1..20: mol_type = other RNA
ccaggcaaggctcctggctt

SEQ ID NO: 13738 - RNA, 20 nt, synthetic construct
  source 1..20: mol_type = other RNA
aggtgcctgcactgtgggcc

SEQ ID NO: 13739 - RNA, 20 nt, synthetic construct
  source 1..20: mol_type = other RNA
actgagttcgaggtgcctgc

SEQ ID NO: 13740 - RNA, 20 nt, synthetic construct
  source 1..20: mol_type = other RNA
actggctgcactctgtgttt

SEQ ID NO: 13741 - RNA, 20 nt, synthetic construct
  source 1..20: mol_type = other RNA
ccccacaaaaacacagagtg

SEQ ID NO: 13742 - RNA, 20 nt, synthetic construct
  source 1..20: mol_type = other RNA
gtcacctctgggagcttcac

SEQ ID NO: 13743 - RNA, 20 nt, synthetic construct
  source 1..20: mol_type = other RNA
gccactaacactgcagtcat

SEQ ID NO: 13744 - RNA, 20 nt, synthetic construct
  source 1..20: mol_type = other RNA
ctagtccaagtacagcaagg

SEQ ID NO: 13745 - RNA, 20 nt, synthetic construct
  source 1..20: mol_type = other RNA
ttccctagtccaagtacagc

SEQ ID NO: 13746 - RNA, 20 nt, synthetic construct
  source 1..20: mol_type = other RNA
atagggtggctggggcacac

SEQ ID NO: 13747 - RNA, 20 nt, synthetic construct
  source 1..20: mol_type = other RNA
ggctctacagcttgggggca

SEQ ID NO: 13748 - RNA, 20 nt, synthetic construct
  source 1..20: mol_type = other RNA
gccagctttatattctggct

SEQ ID NO: 13749 - RNA, 20 nt, synthetic construct
  source 1..20: mol_type = other RNA
cctgtgctggatccttcctg

SEQ ID NO: 13750 - RNA, 20 nt, synthetic construct
  source 1..20: mol_type = other RNA
agagcaggaaggatccagca

SEQ ID NO: 13751 - RNA, 20 nt, synthetic construct
  source 1..20: mol_type = other RNA
tgctcttgaacatcggactc

SEQ ID NO: 13752 - RNA, 20 nt, synthetic construct
  source 1..20: mol_type = other RNA
tcagctgtgggacttggact

SEQ ID NO: 13753 - RNA, 20 nt, synthetic construct
  source 1..20: mol_type = other RNA
gctgtgggacttggactgtc

SEQ ID NO: 13754 - RNA, 20 nt, synthetic construct
  source 1..20: mol_type = other RNA
ttgctcctcagattgcaggt

SEQ ID NO: 13755 - RNA, 20 nt, synthetic construct
  source 1..20: mol_type = other RNA
ctagagggacagaactaata

SEQ ID NO: 13756 - RNA, 20 nt, synthetic construct
  source 1..20: mol_type = other RNA
gtccctctagagaaccccga

SEQ ID NO: 13757 - RNA, 20 nt, synthetic construct
  source 1..20: mol_type = other RNA
ggtatgaaaatctgtattag

SEQ ID NO: 13758 - RNA, 20 nt, synthetic construct
  source 1..20: mol_type = other RNA
tcaagaaccacttctggtat

SEQ ID NO: 13759 - RNA, 20 nt, synthetic construct
  source 1..20: mol_type = other RNA
taccagaagtggttcttgag

SEQ ID NO: 13760 - RNA, 20 nt, synthetic construct
  source 1..20: mol_type = other RNA
gttcctcaagaaccacttct

SEQ ID NO: 13761 - RNA, 20 nt, synthetic construct
  source 1..20: mol_type = other RNA
tgaggaacagaatattaagg

SEQ ID NO: 13762 - RNA, 20 nt, synthetic construct
  source 1..20: mol_type = other RNA
atccttaatattctgttcct

SEQ ID NO: 13763 - RNA, 20 nt, synthetic construct
  source 1..20: mol_type = other RNA
ttcattggttttgggacttc

SEQ ID NO: 13764 - RNA, 20 nt, synthetic construct
  source 1..20: mol_type = other RNA
ttggttttgggacttctggt

SEQ ID NO: 13765 - RNA, 20 nt, synthetic construct
  source 1..20: mol_type = other RNA
ggtgttggctgattaatatg

SEQ ID NO: 13766 - RNA, 20 nt, synthetic construct
  source 1..20: mol_type = other RNA
ccatactattagaagtagag

SEQ ID NO: 13767 - RNA, 20 nt, synthetic construct
  source 1..20: mol_type = other RNA
aatagtatggagaacactga

SEQ ID NO: 13768 - RNA, 20 nt, synthetic construct
  source 1..20: mol_type = other RNA
ggccaagtactatcagtgtt

SEQ ID NO: 13769 - RNA, 20 nt, synthetic construct
  source 1..20: mol_type = other RNA
tcacttatgagaggcaagga

SEQ ID NO: 13770 - RNA, 20 nt, synthetic construct
  source 1..20: mol_type = other RNA
ccacatatagtcaaaggtat

SEQ ID NO: 13771 - RNA, 20 nt, synthetic construct
  source 1..20: mol_type = other RNA
ttggttctccacatatagtc

SEQ ID NO: 13772 - RNA, 20 nt, synthetic construct
  source 1..20: mol_type = other RNA
ttatgttccttggttctcca

SEQ ID NO: 13773 - RNA, 20 nt, synthetic construct
  source 1..20: mol_type = other RNA
ccagagaacttaggagcaat

SEQ ID NO: 13774 - RNA, 20 nt, synthetic construct
  source 1..20: mol_type = other RNA
tctctttctccagagaactt

SEQ ID NO: 13775 - RNA, 20 nt, synthetic construct
  source 1..20: mol_type = other RNA
ttcatctctttctccagaga

SEQ ID NO: 13776 - RNA, 20 nt, synthetic construct
  source 1..20: mol_type = other RNA
ctggagaaagagatgaaaga

SEQ ID NO: 13777 - RNA, 20 nt, synthetic construct
  source 1..20: mol_type = other RNA
gaaggtgggagacagatccc

SEQ ID NO: 13778 - RNA, 20 nt, synthetic construct
  source 1..20: mol_type = other RNA
gaagcagatactgagccaca

SEQ ID NO: 13779 - RNA, 20 nt, synthetic construct
  source 1..20: mol_type = other RNA
gggcaatcttagcagatttg

SEQ ID NO: 13780 - RNA, 20 nt, synthetic construct
  source 1..20: mol_type = other RNA
ctacaggagttaaaactctc

SEQ ID NO: 13781 - RNA, 20 nt, synthetic construct
  source 1..20: mol_type = other RNA
actctttctctacaggagtt

SEQ ID NO: 13782 - RNA, 20 nt, synthetic construct
  source 1..20: mol_type = other RNA
caatttcaactctttctcta

SEQ ID NO: 13783 - RNA, 20 nt, synthetic construct
  source 1..20: mol_type = other RNA
agtcaatgccctcactttaa

SEQ ID NO: 13784 - RNA, 20 nt, synthetic construct
  source 1..20: mol_type = other RNA
agggtcccatttttttccag

SEQ ID NO: 13785 - RNA, 20 nt, synthetic construct
  source 1..20: mol_type = other RNA
cccacacatccccactccaa

SEQ ID NO: 13786 - RNA, 20 nt, synthetic construct
  source 1..20: mol_type = other RNA
tcagggttctcccacacatc

SEQ ID NO: 13787 - RNA, 20 nt, synthetic construct
  source 1..20: mol_type = other RNA
caaactcagtgtcctcagct

SEQ ID NO: 13788 - RNA, 20 nt, synthetic construct
  source 1..20: mol_type = other RNA
tcagagttcacaaactcagt

SEQ ID NO: 13789 - RNA, 20 nt, synthetic construct
  source 1..20: mol_type = other RNA
ggcaaaaaagtttcatcaga

SEQ ID NO: 13790 - RNA, 20 nt, synthetic construct
  source 1..20: mol_type = other RNA
tctggcaaaaaagtttcatc

SEQ ID NO: 13791 - RNA, 20 nt, synthetic construct
  source 1..20: mol_type = other RNA
ccatccccagtagtggtaac

SEQ ID NO: 13792 - RNA, 20 nt, synthetic construct
  source 1..20: mol_type = other RNA
acctttgtctgaggatgtaa

SEQ ID NO: 13793 - RNA, 20 nt, synthetic construct
  source 1..20: mol_type = other RNA
ctgaggcagctgccaggcaa

SEQ ID NO: 13794 - RNA, 20 nt, synthetic construct
  source 1..20: mol_type = other RNA
cctcaagaggcacccctaat

SEQ ID NO: 13795 - RNA, 20 nt, synthetic construct
  source 1..20: mol_type = other RNA
ggggcattaggggtgcctct

SEQ ID NO: 13796 - RNA, 20 nt, synthetic construct
  source 1..20: mol_type = other RNA
agacctataactaggctaaa

SEQ ID NO: 13797 - RNA, 20 nt, synthetic construct
  source 1..20: mol_type = other RNA
ttgcgggccccagaggtgag

SEQ ID NO: 13798 - RNA, 20 nt, synthetic construct
  source 1..20: mol_type = other RNA
gagtgtgacccatgaggagg

SEQ ID NO: 13799 - RNA, 20 nt, synthetic construct
  source 1..20: mol_type = other RNA
tttagagtataatgcacctc

SEQ ID NO: 13800 - RNA, 20 nt, synthetic construct
  source 1..20: mol_type = other RNA
gccaatataaattagaaagc

SEQ ID NO: 13801 - RNA, 20 nt, synthetic construct
  source 1..20: mol_type = other RNA
aatttatattggcagaaatc

SEQ ID NO: 13802 - RNA, 20 nt, synthetic construct
  source 1..20: mol_type = other RNA
ccagatttctgccaatataa

SEQ ID NO: 13803 - RNA, 20 nt, synthetic construct
  source 1..20: mol_type = other RNA
catgcctgttctccagattt

SEQ ID NO: 13804 - RNA, 20 nt, synthetic construct
  source 1..20: mol_type = other RNA
accattatcccttaccctta

SEQ ID NO: 13805 - RNA, 20 nt, synthetic construct
  source 1..20: mol_type = other RNA
gcttgatccaactctatgtc

SEQ ID NO: 13806 - RNA, 20 nt, synthetic construct
  source 1..20: mol_type = other RNA
gcatttaatgttgcagctcg

SEQ ID NO: 13807 - RNA, 20 nt, synthetic construct
  source 1..20: mol_type = other RNA
aagtccccgagctgcaacat

SEQ ID NO: 13808 - RNA, 20 nt, synthetic construct
  source 1..20: mol_type = other RNA
gatagggccgggagcagtgg

SEQ ID NO: 13809 - RNA, 20 nt, synthetic construct
  source 1..20: mol_type = other RNA
ccattttagccagaattgtc

SEQ ID NO: 13810 - RNA, 20 nt, synthetic construct
  source 1..20: mol_type = other RNA
ggctaaaatggtgaaacccc

SEQ ID NO: 13811 - RNA, 20 nt, synthetic construct
  source 1..20: mol_type = other RNA
cttgcctcagcctcccaagt

SEQ ID NO: 13812 - RNA, 20 nt, synthetic construct
  source 1..20: mol_type = other RNA
agcagttctcttgcctcagc

SEQ ID NO: 13813 - RNA, 20 nt, synthetic construct
  source 1..20: mol_type = other RNA
agcctggtaacagagcaaga

SEQ ID NO: 13814 - RNA, 20 nt, synthetic construct
  source 1..20: mol_type = other RNA
aaaaaaaaaaaaaaaaaagt

SEQ ID NO: 13815 - RNA, 20 nt, synthetic construct
  source 1..20: mol_type = other RNA
gctaaccaagcaaataaact

SEQ ID NO: 13816 - RNA, 20 nt, synthetic construct
  source 1..20: mol_type = other RNA
agctcactaacattggacca

SEQ ID NO: 13817 - RNA, 20 nt, synthetic construct
  source 1..20: mol_type = other RNA
tctacattaaaccaaggcat

SEQ ID NO: 13818 - RNA, 20 nt, synthetic construct
  source 1..20: mol_type = other RNA
ggaccctcccagctgggatg

SEQ ID NO: 13819 - RNA, 20 nt, synthetic construct
  source 1..20: mol_type = other RNA
gccaagggtgtatcttctgg

SEQ ID NO: 13820 - RNA, 20 nt, synthetic construct
  source 1..20: mol_type = other RNA
caaagcttcggccaagggtg

SEQ ID NO: 13821 - RNA, 20 nt, synthetic construct
  source 1..20: mol_type = other RNA
aaaatacaggtgctgctctc

SEQ ID NO: 13822 - RNA, 20 nt, synthetic construct
  source 1..20: mol_type = other RNA
ctgtatgtcagatctaacag

SEQ ID NO: 13823 - RNA, 20 nt, synthetic construct
  source 1..20: mol_type = other RNA
tactgttagatctgacatac

SEQ ID NO: 13824 - RNA, 20 nt, synthetic construct
  source 1..20: mol_type = other RNA
cattgtatttaaattttgta

SEQ ID NO: 13825 - RNA, 20 nt, synthetic construct
  source 1..20: mol_type = other RNA
gtgccaacacttggcccctg

SEQ ID NO: 13826 - RNA, 20 nt, synthetic construct
  source 1..20: mol_type = other RNA
gatggctgctttgcctctgc

SEQ ID NO: 13827 - RNA, 20 nt, synthetic construct
  source 1..20: mol_type = other RNA
aggaacaccatgattaatta

SEQ ID NO: 13828 - RNA, 20 nt, synthetic construct
  source 1..20: mol_type = other RNA
cttctaggaacaccatgatt

SEQ ID NO: 13829 - RNA, 20 nt, synthetic construct
  source 1..20: mol_type = other RNA
catcaatttcacttctagga

SEQ ID NO: 13830 - RNA, 20 nt, synthetic construct
  source 1..20: mol_type = other RNA
tagaagtgaaattgatggga

SEQ ID NO: 13831 - RNA, 20 nt, synthetic construct
  source 1..20: mol_type = other RNA
tacttgatttatataaacaa

SEQ ID NO: 13832 - RNA, 20 nt, synthetic construct
  source 1..20: mol_type = other RNA
acctggcagttttttgttta

SEQ ID NO: 13833 - RNA, 20 nt, synthetic construct
  source 1..20: mol_type = other RNA
gattagtctttagtccattc

SEQ ID NO: 13834 - RNA, 20 nt, synthetic construct
  source 1..20: mol_type = other RNA
ctgtttttataattcagatt

SEQ ID NO: 13835 - RNA, 20 nt, synthetic construct
  source 1..20: mol_type = other RNA
agtctggaaattgattgagg

SEQ ID NO: 13836 - RNA, 20 nt, synthetic construct
  source 1..20: mol_type = other RNA
agactcgaacctgttacagt

SEQ ID NO: 13837 - RNA, 20 nt, synthetic construct
  source 1..20: mol_type = other RNA
ggaactgtaacaggttcgag

SEQ ID NO: 13838 - RNA, 20 nt, synthetic construct
  source 1..20: mol_type = other RNA
gtgggttctggaactgtaac

SEQ ID NO: 13839 - RNA, 20 nt, synthetic construct
  source 1..20: mol_type = other RNA
ttcagtgggttctggaactg

SEQ ID NO: 13840 - RNA, 20 nt, synthetic construct
  source 1..20: mol_type = other RNA
agaacccactgaatgaaggg

SEQ ID NO: 13841 - RNA, 20 nt, synthetic construct
  source 1..20: mol_type = other RNA
tcaaggggatccagcctccc

SEQ ID NO: 13842 - RNA, 20 nt, synthetic construct
  source 1..20: mol_type = other RNA
cccatccttccctaaggaga

SEQ ID NO: 13843 - RNA, 20 nt, synthetic construct
  source 1..20: mol_type = other RNA
ctaaggagacctctggcctt

SEQ ID NO: 13844 - RNA, 20 nt, synthetic construct
  source 1..20: mol_type = other RNA
ccagtacacacagttaccct

SEQ ID NO: 13845 - RNA, 20 nt, synthetic construct
  source 1..20: mol_type = other RNA
ctttctccagtacacacagt

SEQ ID NO: 13846 - RNA, 20 nt, synthetic construct
  source 1..20: mol_type = other RNA
gaaatgtctcattacttccc

SEQ ID NO: 13847 - RNA, 20 nt, synthetic construct
  source 1..20: mol_type = other RNA
gaaagtactggacactggct

SEQ ID NO: 13848 - RNA, 20 nt, synthetic construct
  source 1..20: mol_type = other RNA
agggtacccaaaacgttatt

SEQ ID NO: 13849 - RNA, 20 nt, synthetic construct
  source 1..20: mol_type = other RNA
ccagttaaagtaggggctta

SEQ ID NO: 13850 - RNA, 20 nt, synthetic construct
  source 1..20: mol_type = other RNA
gacttacagtggttccagtg

SEQ ID NO: 13851 - RNA, 20 nt, synthetic construct
  source 1..20: mol_type = other RNA
agtgggtccctggacttatc

SEQ ID NO: 13852 - RNA, 20 nt, synthetic construct
  source 1..20: mol_type = other RNA
cagtgccaaaatgcataatt

SEQ ID NO: 13853 - RNA, 20 nt, synthetic construct
  source 1..20: mol_type = other RNA
gccagctaataagtatgtct

SEQ ID NO: 13854 - RNA, 20 nt, synthetic construct
  source 1..20: mol_type = other RNA
caccataatagccctcatcc

SEQ ID NO: 13855 - RNA, 20 nt, synthetic construct
  source 1..20: mol_type = other RNA
gtttggcctttcccaccata

SEQ ID NO: 13856 - RNA, 20 nt, synthetic construct
  source 1..20: mol_type = other RNA
aggtagagacagctctaatg

SEQ ID NO: 13857 - RNA, 20 nt, synthetic construct
  source 1..20: mol_type = other RNA
gtccctccagggatgggata

SEQ ID NO: 13858 - RNA, 20 nt, synthetic construct
  source 1..20: mol_type = other RNA
agtccttgatggtgacacta

SEQ ID NO: 13859 - RNA, 20 nt, synthetic construct
  source 1..20: mol_type = other RNA
caccacatccctgttcaact

SEQ ID NO: 13860 - RNA, 20 nt, synthetic construct
  source 1..20: mol_type = other RNA
actctcccatttgacctgtg

SEQ ID NO: 13861 - RNA, 20 nt, synthetic construct
  source 1..20: mol_type = other RNA
aagatccatctgtcctctgc

SEQ ID NO: 13862 - RNA, 20 nt, synthetic construct
  source 1..20: mol_type = other RNA
ccattcctgtccataagacc

SEQ ID NO: 13863 - RNA, 20 nt, synthetic construct
  source 1..20: mol_type = other RNA
ggtgggtcttatggacagga

SEQ ID NO: 13864 - RNA, 20 nt, synthetic construct
  source 1..20: mol_type = other RNA
tgtccataagacccaccaga

SEQ ID NO: 13865 - RNA, 20 nt, synthetic construct
  source 1..20: mol_type = other RNA
gctgacaaggccagcattat

SEQ ID NO: 13866 - RNA, 20 nt, synthetic construct
  source 1..20: mol_type = other RNA
cttccacgagatataacact

SEQ ID NO: 13867 - RNA, 20 nt, synthetic construct
  source 1..20: mol_type = other RNA
acgagatataacactggtcc

SEQ ID NO: 13868 - RNA, 20 nt, synthetic construct
  source 1..20: mol_type = other RNA
tgacattatgatgattggat

SEQ ID NO: 13869 - RNA, 20 nt, synthetic construct
  source 1..20: mol_type = other RNA
tgctcactgtatccaatcat

SEQ ID NO: 13870 - RNA, 20 nt, synthetic construct
  source 1..20: mol_type = other RNA
gtgtgtttgctacttcttgc

SEQ ID NO: 13871 - RNA, 20 nt, synthetic construct
  source 1..20: mol_type = other RNA
catcctctggcatacaaatg

SEQ ID NO: 13872 - RNA, 20 nt, synthetic construct
  source 1..20: mol_type = other RNA
acctcggtaaaatttctagg

SEQ ID NO: 13873 - RNA, 20 nt, synthetic construct
  source 1..20: mol_type = other RNA
agggttccagtggcatgaga

SEQ ID NO: 13874 - RNA, 20 nt, synthetic construct
  source 1..20: mol_type = other RNA
agtggcatgagacctatgga

SEQ ID NO: 13875 - RNA, 20 nt, synthetic construct
  source 1..20: mol_type = other RNA
ccttagaaggaatatctcca

SEQ ID NO: 13876 - RNA, 20 nt, synthetic construct
  source 1..20: mol_type = other RNA
ttctaaggtgaagcataact

SEQ ID NO: 13877 - RNA, 20 nt, synthetic construct
  source 1..20: mol_type = other RNA
aaggtgaagcataacttgct

SEQ ID NO: 13878 - RNA, 20 nt, synthetic construct
  source 1..20: mol_type = other RNA
tggttgtaagaggggccaaa

SEQ ID NO: 13879 - RNA, 20 nt, synthetic construct
  source 1..20: mol_type = other RNA
tcgtttgggtgtgttactct

SEQ ID NO: 13880 - RNA, 20 nt, synthetic construct
  source 1..20: mol_type = other RNA
ggtcactcgataaatgggcc

SEQ ID NO: 13881 - RNA, 20 nt, synthetic construct
  source 1..20: mol_type = other RNA
agactgcacttaaatctggc

SEQ ID NO: 13882 - RNA, 20 nt, synthetic construct
  source 1..20: mol_type = other RNA
tttgttctagactgcactta

SEQ ID NO: 13883 - RNA, 20 nt, synthetic construct
  source 1..20: mol_type = other RNA
gagccttcttttgttctaga

SEQ ID NO: 13884 - RNA, 20 nt, synthetic construct
  source 1..20: mol_type = other RNA
cagcagcctggacctgtttc

SEQ ID NO: 13885 - RNA, 20 nt, synthetic construct
  source 1..20: mol_type = other RNA
cctatgggggcctgccaaag

SEQ ID NO: 13886 - RNA, 20 nt, synthetic construct
  source 1..20: mol_type = other RNA
gcagataactactctccttt

SEQ ID NO: 13887 - RNA, 20 nt, synthetic construct
  source 1..20: mol_type = other RNA
gttaccaccaaagcccaata

SEQ ID NO: 13888 - RNA, 20 nt, synthetic construct
  source 1..20: mol_type = other RNA
ggtagcatggtgactttatg

SEQ ID NO: 13889 - RNA, 20 nt, synthetic construct
  source 1..20: mol_type = other RNA
tgataggcaggttcaggtag

SEQ ID NO: 13890 - RNA, 20 nt, synthetic construct
  source 1..20: mol_type = other RNA
tggctagatgggtcagaaag

SEQ ID NO: 13891 - RNA, 20 nt, synthetic construct
  source 1..20: mol_type = other RNA
gacccatctagccatgaagt

SEQ ID NO: 13892 - RNA, 20 nt, synthetic construct
  source 1..20: mol_type = other RNA
atttgatgatgaaatgccgc

SEQ ID NO: 13893 - RNA, 20 nt, synthetic construct
  source 1..20: mol_type = other RNA
tcatcaaattgaagtggtgt

SEQ ID NO: 13894 - RNA, 20 nt, synthetic construct
  source 1..20: mol_type = other RNA
ggacctgctcaagcccgatc

SEQ ID NO: 13895 - RNA, 20 nt, synthetic construct
  source 1..20: mol_type = other RNA
ttatgtaacttacttgtgcc

SEQ ID NO: 13896 - RNA, 20 nt, synthetic construct
  source 1..20: mol_type = other RNA
ccactcatgccaccctgcct

SEQ ID NO: 13897 - RNA, 20 nt, synthetic construct
  source 1..20: mol_type = other RNA
ctcccccagcctgcaccaat

SEQ ID NO: 13898 - RNA, 20 nt, synthetic construct
  source 1..20: mol_type = other RNA
tctgtcaactgatcataggg

SEQ ID NO: 13899 - RNA, 20 nt, synthetic construct
  source 1..20: mol_type = other RNA
ctatgatcagttgacagagg

SEQ ID NO: 13900 - RNA, 20 nt, synthetic construct
  source 1..20: mol_type = other RNA
cttcctctgtcaactgatca

SEQ ID NO: 13901 - RNA, 20 nt, synthetic construct
  source 1..20: mol_type = other RNA
tagatggttctgcacgatat

SEQ ID NO: 13902 - RNA, 20 nt, synthetic construct
  source 1..20: mol_type = other RNA
gcacgatatgcaggcaccac

SEQ ID NO: 13903 - RNA, 20 nt, synthetic construct
  source 1..20: mol_type = other RNA
ggtggtgcctgcatatcgtg

SEQ ID NO: 13904 - RNA, 20 nt, synthetic construct
  source 1..20: mol_type = other RNA
aaatgcatgtgtacacttgt

SEQ ID NO: 13905 - RNA, 20 nt, synthetic construct
  source 1..20: mol_type = other RNA
tagcacaagtgtacacatgc

SEQ ID NO: 13906 - RNA, 20 nt, synthetic construct
  source 1..20: mol_type = other RNA
tttatttttcctttatcatg

SEQ ID NO: 13907 - RNA, 20 nt, synthetic construct
  source 1..20: mol_type = other RNA
tttatcatgtgaccttagat

SEQ ID NO: 13908 - RNA, 20 nt, synthetic construct
  source 1..20: mol_type = other RNA
catcagcatttaagcattta

SEQ ID NO: 13909 - RNA, 20 nt, synthetic construct
  source 1..20: mol_type = other RNA
tatcagcatttaaatattgt

SEQ ID NO: 13910 - RNA, 20 nt, synthetic construct
  source 1..20: mol_type = other RNA
ggttgtatgaggatagttgt

SEQ ID NO: 13911 - RNA, 20 nt, synthetic construct
  source 1..20: mol_type = other RNA
aataaagacaataataaggt

SEQ ID NO: 13912 - RNA, 20 nt, synthetic construct
  source 1..20: mol_type = other RNA
ggatgtgtgtatgggttcaa

SEQ ID NO: 13913 - RNA, 20 nt, synthetic construct
  source 1..20: mol_type = other RNA
agttgacaaggagttggact

SEQ ID NO: 13914 - RNA, 20 nt, synthetic construct
  source 1..20: mol_type = other RNA
atccaatcaagttgacagta

SEQ ID NO: 13915 - RNA, 20 nt, synthetic construct
  source 1..20: mol_type = other RNA
cagcccactgactcaaatgt

SEQ ID NO: 13916 - RNA, 20 nt, synthetic construct
  source 1..20: mol_type = other RNA
agtgtggccagattgtaaag

SEQ ID NO: 13917 - RNA, 20 nt, synthetic construct
  source 1..20: mol_type = other RNA
ccctgctttacaatctggcc

SEQ ID NO: 13918 - RNA, 20 nt, synthetic construct
  source 1..20: mol_type = other RNA
catttttctccctgctttac

SEQ ID NO: 13919 - RNA, 20 nt, synthetic construct
  source 1..20: mol_type = other RNA
gtctagtcttttcacatttt

SEQ ID NO: 13920 - RNA, 20 nt, synthetic construct
  source 1..20: mol_type = other RNA
cagcctacatctttctcctg

SEQ ID NO: 13921 - RNA, 20 nt, synthetic construct
  source 1..20: mol_type = other RNA
cctgtgccaaatgcttcctg

SEQ ID NO: 13922 - RNA, 20 nt, synthetic construct
  source 1..20: mol_type = other RNA
agagcaggaagcatttggca

SEQ ID NO: 13923 - RNA, 20 nt, synthetic construct
  source 1..20: mol_type = other RNA
tgctcttgaacatcggactc

SEQ ID NO: 13924 - RNA, 20 nt, synthetic construct
  source 1..20: mol_type = other RNA
tcagcgttgggagttggact

SEQ ID NO: 13925 - RNA, 20 nt, synthetic construct
  source 1..20: mol_type = other RNA
gcgttgggagttggactggc

SEQ ID NO: 13926 - RNA, 20 nt, synthetic construct
  source 1..20: mol_type = other RNA
tgctcctcagcttgcagagg

SEQ ID NO: 13927 - RNA, 20 nt, synthetic construct
  source 1..20: mol_type = other RNA
acaacaggccctctgcaagc

SEQ ID NO: 13928 - RNA, 20 nt, synthetic construct
  source 1..20: mol_type = other RNA
ctagagggacagaactaata

SEQ ID NO: 13929 - RNA, 20 nt, synthetic construct
  source 1..20: mol_type = other RNA
gtccctctagagaaccctga

SEQ ID NO: 13930 - RNA, 20 nt, synthetic construct
  source 1..20: mol_type = other RNA
atgtatacaaatcaataaat

SEQ ID NO: 13931 - RNA, 20 nt, synthetic construct
  source 1..20: mol_type = other RNA
tgggatataaggttggttca

SEQ ID NO: 13932 - RNA, 20 nt, synthetic construct
  source 1..20: mol_type = other RNA
caataaaataccagcaattg

SEQ ID NO: 13933 - RNA, 20 nt, synthetic construct
  source 1..20: mol_type = other RNA
attgctggtattttattgag

SEQ ID NO: 13934 - RNA, 20 nt, synthetic construct
  source 1..20: mol_type = other RNA
agccaatatccttgatgaac

SEQ ID NO: 13935 - RNA, 20 nt, synthetic construct
  source 1..20: mol_type = other RNA
tcaaggatattggcttgaag

SEQ ID NO: 13936 - RNA, 20 nt, synthetic construct
  source 1..20: mol_type = other RNA
gatatggaacaacaaaaaaa

SEQ ID NO: 13937 - RNA, 20 nt, synthetic construct
  source 1..20: mol_type = other RNA
ttttttgttgttccatatca

SEQ ID NO: 13938 - RNA, 20 nt, synthetic construct
  source 1..20: mol_type = other RNA
atatcagaatgatgacgacc

SEQ ID NO: 13939 - RNA, 20 nt, synthetic construct
  source 1..20: mol_type = other RNA
atgaggtcgtcatcattctg

SEQ ID NO: 13940 - RNA, 20 nt, synthetic construct
  source 1..20: mol_type = other RNA
aaaagataaaagaggacaga

SEQ ID NO: 13941 - RNA, 20 nt, synthetic construct
  source 1..20: mol_type = other RNA
ggaggcttgatatcagctct

SEQ ID NO: 13942 - RNA, 20 nt, synthetic construct
  source 1..20: mol_type = other RNA
ttatatgactggtatacttt

SEQ ID NO: 13943 - RNA, 20 nt, synthetic construct
  source 1..20: mol_type = other RNA
tagccaaagtataccagtca

SEQ ID NO: 13944 - RNA, 20 nt, synthetic construct
  source 1..20: mol_type = other RNA
ggtgtaggtttttaattact

SEQ ID NO: 13945 - RNA, 20 nt, synthetic construct
  source 1..20: mol_type = other RNA
gaagttgaatcagtaattaa

SEQ ID NO: 13946 - RNA, 20 nt, synthetic construct
  source 1..20: mol_type = other RNA
acttcagaactcattactca

SEQ ID NO: 13947 - RNA, 20 nt, synthetic construct
  source 1..20: mol_type = other RNA
gaactcattactcattattg

SEQ ID NO: 13948 - RNA, 20 nt, synthetic construct
  source 1..20: mol_type = other RNA
aaaactcactttcatgtact

SEQ ID NO: 13949 - RNA, 20 nt, synthetic construct
  source 1..20: mol_type = other RNA
tgtactcttcaaaagactgt

SEQ ID NO: 13950 - RNA, 20 nt, synthetic construct
  source 1..20: mol_type = other RNA
aaagactgtcttcttctgtt

SEQ ID NO: 13951 - RNA, 20 nt, synthetic construct
  source 1..20: mol_type = other RNA
tctgttgttgagcggggtgt

SEQ ID NO: 13952 - RNA, 20 nt, synthetic construct
  source 1..20: mol_type = other RNA
gttgttgagcggggtgttct

SEQ ID NO: 13953 - RNA, 20 nt, synthetic construct
  source 1..20: mol_type = other RNA
cctaaacgaccttgagagaa

SEQ ID NO: 13954 - RNA, 20 nt, synthetic construct
  source 1..20: mol_type = other RNA
ctcaaggtcgtttaggtgaa

SEQ ID NO: 13955 - RNA, 20 nt, synthetic construct
  source 1..20: mol_type = other RNA
tctgtatccttactgcttgt

SEQ ID NO: 13956 - RNA, 20 nt, synthetic construct
  source 1..20: mol_type = other RNA
gtatccttactgcttgtctt

SEQ ID NO: 13957 - RNA, 20 nt, synthetic construct
  source 1..20: mol_type = other RNA
ctttttttattgactactga

SEQ ID NO: 13958 - RNA, 20 nt, synthetic construct
  source 1..20: mol_type = other RNA
cttttagattgtaactctgt

SEQ ID NO: 13959 - RNA, 20 nt, synthetic construct
  source 1..20: mol_type = other RNA
aaatatataaaacagagtta

SEQ ID NO: 13960 - RNA, 20 nt, synthetic construct
  source 1..20: mol_type = other RNA
tgatgatgacctttatcatt

SEQ ID NO: 13961 - RNA, 20 nt, synthetic construct
  source 1..20: mol_type = other RNA
agagataagaagaaacatta

SEQ ID NO: 13962 - RNA, 20 nt, synthetic construct
  source 1..20: mol_type = other RNA
tcttatctctggaagtattc

SEQ ID NO: 13963 - RNA, 20 nt, synthetic construct
  source 1..20: mol_type = other RNA
tatctctggaagtattcgtt

SEQ ID NO: 13964 - RNA, 20 nt, synthetic construct
  source 1..20: mol_type = other RNA
gaacaacgaatacttccaga

SEQ ID NO: 13965 - RNA, 20 nt, synthetic construct
  source 1..20: mol_type = other RNA
ttgttctgaagtctatttgt

SEQ ID NO: 13966 - RNA, 20 nt, synthetic construct
  source 1..20: mol_type = other RNA
tatcagcacaaatagacttc

SEQ ID NO: 13967 - RNA, 20 nt, synthetic construct
  source 1..20: mol_type = other RNA
gaagtctatttgtgctgata

SEQ ID NO: 13968 - RNA, 20 nt, synthetic construct
  source 1..20: mol_type = other RNA
cagctctattttcactagta

SEQ ID NO: 13969 - RNA, 20 nt, synthetic construct
  source 1..20: mol_type = other RNA
ctagtatttgtatatctttt

SEQ ID NO: 13970 - RNA, 20 nt, synthetic construct
  source 1..20: mol_type = other RNA
cagcttttaaattgagatgt

SEQ ID NO: 13971 - RNA, 20 nt, synthetic construct
  source 1..20: mol_type = other RNA
gaccatttgcattaaagtag

SEQ ID NO: 13972 - RNA, 20 nt, synthetic construct
  source 1..20: mol_type = other RNA
ctttgtcccatttaaacttt

SEQ ID NO: 13973 - RNA, 20 nt, synthetic construct
  source 1..20: mol_type = other RNA
ttttttcatatttttctgcc

SEQ ID NO: 13974 - RNA, 20 nt, synthetic construct
  source 1..20: mol_type = other RNA
tatttttctgccttcattta

SEQ ID NO: 13975 - RNA, 20 nt, synthetic construct
  source 1..20: mol_type = other RNA
gccttcatttatattgagtt

SEQ ID NO: 13976 - RNA, 20 nt, synthetic construct
  source 1..20: mol_type = other RNA
tttatattgagtttatctcc

SEQ ID NO: 13977 - RNA, 20 nt, synthetic construct
  source 1..20: mol_type = other RNA
acaatgtttataatatatac

SEQ ID NO: 13978 - RNA, 20 nt, synthetic construct
  source 1..20: mol_type = other RNA
gtcatttgaaggtggaatgt

SEQ ID NO: 13979 - RNA, 20 nt, synthetic construct
  source 1..20: mol_type = other RNA
cattccaccttcaaatgaca

SEQ ID NO: 13980 - RNA, 20 nt, synthetic construct
  source 1..20: mol_type = other RNA
accttcaaatgacagaatta

SEQ ID NO: 13981 - RNA, 20 nt, synthetic construct
  source 1..20: mol_type = other RNA
aatgacagaattatactgga

SEQ ID NO: 13982 - RNA, 20 nt, synthetic construct
  source 1..20: mol_type = other RNA
atatatccagtataattctg

SEQ ID NO: 13983 - RNA, 20 nt, synthetic construct
  source 1..20: mol_type = other RNA
ccttcctccctctcaaaatg

SEQ ID NO: 13984 - RNA, 20 nt, synthetic construct
  source 1..20: mol_type = other RNA
tccctctcaaaatgttgtgc

SEQ ID NO: 13985 - RNA, 20 nt, synthetic construct
  source 1..20: mol_type = other RNA
attatgttatagctctcata

SEQ ID NO: 13986 - RNA, 20 nt, synthetic construct
  source 1..20: mol_type = other RNA
gggtaaaaatagtgtcaatg

SEQ ID NO: 13987 - RNA, 20 nt, synthetic construct
  source 1..20: mol_type = other RNA
aaatatttgtagtcataatc

SEQ ID NO: 13988 - RNA, 20 nt, synthetic construct
  source 1..20: mol_type = other RNA
ttattttaccatttctggtg

SEQ ID NO: 13989 - RNA, 20 nt, synthetic construct
  source 1..20: mol_type = other RNA
ggtgctccttatcttttaca

SEQ ID NO: 13990 - RNA, 20 nt, synthetic construct
  source 1..20: mol_type = other RNA
atctggagtcacattctttc

SEQ ID NO: 13991 - RNA, 20 nt, synthetic construct
  source 1..20: mol_type = other RNA
cagaaagaatgtgactccag

SEQ ID NO: 13992 - RNA, 20 nt, synthetic construct
  source 1..20: mol_type = other RNA
ttctgtgaaaaacaaccttt

SEQ ID NO: 13993 - RNA, 20 nt, synthetic construct
  source 1..20: mol_type = other RNA
gtgaaaaacaacctttagca

SEQ ID NO: 13994 - RNA, 20 nt, synthetic construct
  source 1..20: mol_type = other RNA
tatagcacgggactgctgtt

SEQ ID NO: 13995 - RNA, 20 nt, synthetic construct
  source 1..20: mol_type = other RNA
gacaaagaaaagctgaaaga

SEQ ID NO: 13996 - RNA, 20 nt, synthetic construct
  source 1..20: mol_type = other RNA
tcagacaaagaaaagctgaa

SEQ ID NO: 13997 - RNA, 20 nt, synthetic construct
  source 1..20: mol_type = other RNA
gcttttctttgtctgaagaa

SEQ ID NO: 13998 - RNA, 20 nt, synthetic construct
  source 1..20: mol_type = other RNA
ttgtctgaagaagtctttat

SEQ ID NO: 13999 - RNA, 20 nt, synthetic construct
  source 1..20: mol_type = other RNA
gtttttaaaagtgattttgc

SEQ ID NO: 14000 - RNA, 20 nt, synthetic construct
  source 1..20: mol_type = other RNA
ttccttgtatcattttaaca

SEQ ID NO: 14001 - RNA, 20 nt, synthetic construct
  source 1..20: mol_type = other RNA
ttgtatcattttaacaatga

SEQ ID NO: 14002 - RNA, 20 nt, synthetic construct
  source 1..20: mol_type = other RNA
aaacggaatataatggaaca

SEQ ID NO: 14003 - RNA, 20 nt, synthetic construct
  source 1..20: mol_type = other RNA
attatattccgttttgaata

SEQ ID NO: 14004 - RNA, 20 nt, synthetic construct
  source 1..20: mol_type = other RNA
agtcagaaactattcaaaac

SEQ ID NO: 14005 - RNA, 20 nt, synthetic construct
  source 1..20: mol_type = other RNA
gttttgaatagtttctgact

SEQ ID NO: 14006 - RNA, 20 nt, synthetic construct
  source 1..20: mol_type = other RNA
gactagaaatctgatctttg

SEQ ID NO: 14007 - RNA, 20 nt, synthetic construct
  source 1..20: mol_type = other RNA
ttgtattcaatagttccttt

SEQ ID NO: 14008 - RNA, 20 nt, synthetic construct
  source 1..20: mol_type = other RNA
atagttcctttttctctgac

SEQ ID NO: 14009 - RNA, 20 nt, synthetic construct
  source 1..20: mol_type = other RNA
tttttctctgactgccttta

SEQ ID NO: 14010 - RNA, 20 nt, synthetic construct
  source 1..20: mol_type = other RNA
ctgactgcctttaagatatt

SEQ ID NO: 14011 - RNA, 20 nt, synthetic construct
  source 1..20: mol_type = other RNA
catctttgtttttcaacagt

SEQ ID NO: 14012 - RNA, 20 nt, synthetic construct
  source 1..20: mol_type = other RNA
acagtttgactataatttgt

SEQ ID NO: 14013 - RNA, 20 nt, synthetic construct
  source 1..20: mol_type = other RNA
gcttgaggtttcctgagctc

SEQ ID NO: 14014 - RNA, 20 nt, synthetic construct
  source 1..20: mol_type = other RNA
tgagctccttggatttgcag

SEQ ID NO: 14015 - RNA, 20 nt, synthetic construct
  source 1..20: mol_type = other RNA
tagccattatctattctact

SEQ ID NO: 14016 - RNA, 20 nt, synthetic construct
  source 1..20: mol_type = other RNA
actgttttgttttttttttc

SEQ ID NO: 14017 - RNA, 20 nt, synthetic construct
  source 1..20: mol_type = other RNA
cttctctctctctgtattct

SEQ ID NO: 14018 - RNA, 20 nt, synthetic construct
  source 1..20: mol_type = other RNA
ctctctctgtattcttcttt

SEQ ID NO: 14019 - RNA, 20 nt, synthetic construct
  source 1..20: mol_type = other RNA
tctttttggactgtaagtat

SEQ ID NO: 14020 - RNA, 20 nt, synthetic construct
  source 1..20: mol_type = other RNA
ttttggactgtaagtattca

SEQ ID NO: 14021 - RNA, 20 nt, synthetic construct
  source 1..20: mol_type = other RNA
aatgttagatcattcatatt

SEQ ID NO: 14022 - RNA, 20 nt, synthetic construct
  source 1..20: mol_type = other RNA
tattgcttcataaaccttat

SEQ ID NO: 14023 - RNA, 20 nt, synthetic construct
  source 1..20: mol_type = other RNA
taaaccttatatgcttcttc

SEQ ID NO: 14024 - RNA, 20 nt, synthetic construct
  source 1..20: mol_type = other RNA
tctgcttttttttttttgtc

SEQ ID NO: 14025 - RNA, 20 nt, synthetic construct
  source 1..20: mol_type = other RNA
tgacaaaaaaaaaaaagcag

SEQ ID NO: 14026 - RNA, 20 nt, synthetic construct
  source 1..20: mol_type = other RNA
gcttttttttttttgtcagg

SEQ ID NO: 14027 - RNA, 20 nt, synthetic construct
  source 1..20: mol_type = other RNA
agtagactatgttcaagttt

SEQ ID NO: 14028 - RNA, 20 nt, synthetic construct
  source 1..20: mol_type = other RNA
agtttatggattattttgtt

SEQ ID NO: 14029 - RNA, 20 nt, synthetic construct
  source 1..20: mol_type = other RNA
ctgaatgcactgaggagtca

SEQ ID NO: 14030 - RNA, 20 nt, synthetic construct
  source 1..20: mol_type = other RNA
gagaattcttcatctctgat

SEQ ID NO: 14031 - RNA, 20 nt, synthetic construct
  source 1..20: mol_type = other RNA
tcatctctgatattataaat

SEQ ID NO: 14032 - RNA, 20 nt, synthetic construct
  source 1..20: mol_type = other RNA
tctctgatattataaatctc

SEQ ID NO: 14033 - RNA, 20 nt, synthetic construct
  source 1..20: mol_type = other RNA
tagcattttcatgttactct

SEQ ID NO: 14034 - RNA, 20 nt, synthetic construct
  source 1..20: mol_type = other RNA
tgttactcttttctatagtt

SEQ ID NO: 14035 - RNA, 20 nt, synthetic construct
  source 1..20: mol_type = other RNA
gcaaagagatggaaactata

SEQ ID NO: 14036 - RNA, 20 nt, synthetic construct
  source 1..20: mol_type = other RNA
atagtttccatctctttgct

SEQ ID NO: 14037 - RNA, 20 nt, synthetic construct
  source 1..20: mol_type = other RNA
atctctttgctgaaattctc

SEQ ID NO: 14038 - RNA, 20 nt, synthetic construct
  source 1..20: mol_type = other RNA
ccccctatccatggatattg

SEQ ID NO: 14039 - RNA, 20 nt, synthetic construct
  source 1..20: mol_type = other RNA
ttaacatattaacataggta

SEQ ID NO: 14040 - RNA, 20 nt, synthetic construct
  source 1..20: mol_type = other RNA
agatggtgtcttttctgagt

SEQ ID NO: 14041 - RNA, 20 nt, synthetic construct
  source 1..20: mol_type = other RNA
gagtctgtctgtcttgattg

SEQ ID NO: 14042 - RNA, 20 nt, synthetic construct
  source 1..20: mol_type = other RNA
ctcttcagcttttggtgtgt

SEQ ID NO: 14043 - RNA, 20 nt, synthetic construct
  source 1..20: mol_type = other RNA
gcttttggtgtgtcttgtaa

SEQ ID NO: 14044 - RNA, 20 nt, synthetic construct
  source 1..20: mol_type = other RNA
tccatttatgatacccagtg

SEQ ID NO: 14045 - RNA, 20 nt, synthetic construct
  source 1..20: mol_type = other RNA
aagcataaataatatttact

SEQ ID NO: 14046 - RNA, 20 nt, synthetic construct
  source 1..20: mol_type = other RNA
acagaagatgggtgcccatt

SEQ ID NO: 14047 - RNA, 20 nt, synthetic construct
  source 1..20: mol_type = other RNA
gttgaaaatatgttttgtgg

SEQ ID NO: 14048 - RNA, 20 nt, synthetic construct
  source 1..20: mol_type = other RNA
accagttactaggttgactc

SEQ ID NO: 14049 - RNA, 20 nt, synthetic construct
  source 1..20: mol_type = other RNA
gttcaaccagttactaggtt

SEQ ID NO: 14050 - RNA, 20 nt, synthetic construct
  source 1..20: mol_type = other RNA
tccagtgatgggttgctgct

SEQ ID NO: 14051 - RNA, 20 nt, synthetic construct
  source 1..20: mol_type = other RNA
acaccccaggccccactcta

SEQ ID NO: 14052 - RNA, 20 nt, synthetic construct
  source 1..20: mol_type = other RNA
tccacaccccaggccccact

SEQ ID NO: 14053 - RNA, 20 nt, synthetic construct
  source 1..20: mol_type = other RNA
cagtgttcctatctattatt

SEQ ID NO: 14054 - RNA, 20 nt, synthetic construct
  source 1..20: mol_type = other RNA
tatctattattagattttag

SEQ ID NO: 14055 - RNA, 20 nt, synthetic construct
  source 1..20: mol_type = other RNA
atggggttagattatgtgta

SEQ ID NO: 14056 - RNA, 20 nt, synthetic construct
  source 1..20: mol_type = other RNA
tacacataatctaaccccat

SEQ ID NO: 14057 - RNA, 20 nt, synthetic construct
  source 1..20: mol_type = other RNA
ttaagaagaaacagcagttt

SEQ ID NO: 14058 - RNA, 20 nt, synthetic construct
  source 1..20: mol_type = other RNA
tcttaatgaatgctcaatct

SEQ ID NO: 14059 - RNA, 20 nt, synthetic construct
  source 1..20: mol_type = other RNA
taatgaatgctcaatctttg

SEQ ID NO: 14060 - RNA, 20 nt, synthetic construct
  source 1..20: mol_type = other RNA
accaaagattgagcattcat

SEQ ID NO: 14061 - RNA, 20 nt, synthetic construct
  source 1..20: mol_type = other RNA
gtcttagtcaggttctgcag

SEQ ID NO: 14062 - RNA, 20 nt, synthetic construct
  source 1..20: mol_type = other RNA
aagccctgcagaacctgact

SEQ ID NO: 14063 - RNA, 20 nt, synthetic construct
  source 1..20: mol_type = other RNA
cttcaaagccctgcagaacc

SEQ ID NO: 14064 - RNA, 20 nt, synthetic construct
  source 1..20: mol_type = other RNA
gcagggctttgaagggaatg

SEQ ID NO: 14065 - RNA, 20 nt, synthetic construct
  source 1..20: mol_type = other RNA
cagtattcttgtgccttatt

SEQ ID NO: 14066 - RNA, 20 nt, synthetic construct
  source 1..20: mol_type = other RNA
atccaaataaggcacaagaa

SEQ ID NO: 14067 - RNA, 20 nt, synthetic construct
  source 1..20: mol_type = other RNA
tgtgccttatttggatggaa

SEQ ID NO: 14068 - RNA, 20 nt, synthetic construct
  source 1..20: mol_type = other RNA
agttccatccaaataaggca

SEQ ID NO: 14069 - RNA, 20 nt, synthetic construct
  source 1..20: mol_type = other RNA
ctccaaacccaccacaggtt

SEQ ID NO: 14070 - RNA, 20 nt, synthetic construct
  source 1..20: mol_type = other RNA
tgtgcccagcatcctgcatt

SEQ ID NO: 14071 - RNA, 20 nt, synthetic construct
  source 1..20: mol_type = other RNA
ttggaggagagactggaaat

SEQ ID NO: 14072 - RNA, 20 nt, synthetic construct
  source 1..20: mol_type = other RNA
agtctctcctccaaggaaat

SEQ ID NO: 14073 - RNA, 20 nt, synthetic construct
  source 1..20: mol_type = other RNA
cagggataggtagatgatca

SEQ ID NO: 14074 - RNA, 20 nt, synthetic construct
  source 1..20: mol_type = other RNA
cttctcagggataggtagat

SEQ ID NO: 14075 - RNA, 20 nt, synthetic construct
  source 1..20: mol_type = other RNA
gggcaatggggggagaaaaa

SEQ ID NO: 14076 - RNA, 20 nt, synthetic construct
  source 1..20: mol_type = other RNA
ccccccattgcccagaaact

SEQ ID NO: 14077 - RNA, 20 nt, synthetic construct
  source 1..20: mol_type = other RNA
ctagaccactgctcagaaaa

SEQ ID NO: 14078 - RNA, 20 nt, synthetic construct
  source 1..20: mol_type = other RNA
gagcagtggtctagggaatt

SEQ ID NO: 14079 - RNA, 20 nt, synthetic construct
  source 1..20: mol_type = other RNA
tatttgaccctgacagccca

SEQ ID NO: 14080 - RNA, 20 nt, synthetic construct
  source 1..20: mol_type = other RNA
tgaggaccacaggacaggag

SEQ ID NO: 14081 - RNA, 20 nt, synthetic construct
  source 1..20: mol_type = other RNA
taatgttcatgaggaccaca

SEQ ID NO: 14082 - RNA, 20 nt, synthetic construct
  source 1..20: mol_type = other RNA
aaaaaagagcttgcacatga

SEQ ID NO: 14083 - RNA, 20 nt, synthetic construct
  source 1..20: mol_type = other RNA
caccagaaactatgctcatg

SEQ ID NO: 14084 - RNA, 20 nt, synthetic construct
  source 1..20: mol_type = other RNA
tctcaccagaaactatgctc

SEQ ID NO: 14085 - RNA, 20 nt, synthetic construct
  source 1..20: mol_type = other RNA
ggtgagaagaattctgatat

SEQ ID NO: 14086 - RNA, 20 nt, synthetic construct
  source 1..20: mol_type = other RNA
gatatgttaacttcctctaa

SEQ ID NO: 14087 - RNA, 20 nt, synthetic construct
  source 1..20: mol_type = other RNA
tctaaacttttaaataaaat

SEQ ID NO: 14088 - RNA, 20 nt, synthetic construct
  source 1..20: mol_type = other RNA
tagaaatattttatttaaaa

SEQ ID NO: 14089 - RNA, 20 nt, synthetic construct
  source 1..20: mol_type = other RNA
agaactttatttaattctta

SEQ ID NO: 14090 - RNA, 20 nt, synthetic construct
  source 1..20: mol_type = other RNA
aagaattaaataaagttcta

SEQ ID NO: 14091 - RNA, 20 nt, synthetic construct
  source 1..20: mol_type = other RNA
tatcattctagaactttatt

SEQ ID NO: 14092 - RNA, 20 nt, synthetic construct
  source 1..20: mol_type = other RNA
agaatgatatgaatctattc

SEQ ID NO: 14093 - RNA, 20 nt, synthetic construct
  source 1..20: mol_type = other RNA
tttggttttttgcacgtctg

SEQ ID NO: 14094 - RNA, 20 nt, synthetic construct
  source 1..20: mol_type = other RNA
cttgattagcaggcagacag

SEQ ID NO: 14095 - RNA, 20 nt, synthetic construct
  source 1..20: mol_type = other RNA
cttctcttgattagcaggca

SEQ ID NO: 14096 - RNA, 20 nt, synthetic construct
  source 1..20: mol_type = other RNA
cagagactttttcctgtttg

SEQ ID NO: 14097 - RNA, 20 nt, synthetic construct
  source 1..20: mol_type = other RNA
tgtttgtgtcataaatgact

SEQ ID NO: 14098 - RNA, 20 nt, synthetic construct
  source 1..20: mol_type = other RNA
tagaacagaaaaaaatgtga

SEQ ID NO: 14099 - RNA, 20 nt, synthetic construct
  source 1..20: mol_type = other RNA
catttttttctgttctaaga

SEQ ID NO: 14100 - RNA, 20 nt, synthetic construct
  source 1..20: mol_type = other RNA
gttctaagaactattcagct

SEQ ID NO: 14101 - RNA, 20 nt, synthetic construct
  source 1..20: mol_type = other RNA
aagaactattcagcttgatt

SEQ ID NO: 14102 - RNA, 20 nt, synthetic construct
  source 1..20: mol_type = other RNA
gcttgatttcttctgtttta

SEQ ID NO: 14103 - RNA, 20 nt, synthetic construct
  source 1..20: mol_type = other RNA
tgtgacagtggtggagtacg

SEQ ID NO: 14104 - RNA, 20 nt, synthetic construct
  source 1..20: mol_type = other RNA
aagacaaattttacttggac

SEQ ID NO: 14105 - RNA, 20 nt, synthetic construct
  source 1..20: mol_type = other RNA
tatgattaaatttttctcac

SEQ ID NO: 14106 - RNA, 20 nt, synthetic construct
  source 1..20: mol_type = other RNA
atgtgtgagaaaaatttaat

SEQ ID NO: 14107 - RNA, 20 nt, synthetic construct
  source 1..20: mol_type = other RNA
cacacatagaatgcatggca

SEQ ID NO: 14108 - RNA, 20 nt, synthetic construct
  source 1..20: mol_type = other RNA
cagacattttgccatgcatt

SEQ ID NO: 14109 - RNA, 20 nt, synthetic construct
  source 1..20: mol_type = other RNA
atcatactctttgctcaaag

SEQ ID NO: 14110 - RNA, 20 nt, synthetic construct
  source 1..20: mol_type = other RNA
cttctatcatactctttgct

SEQ ID NO: 14111 - RNA, 20 nt, synthetic construct
  source 1..20: mol_type = other RNA
tgagagtttgataaaatcag

SEQ ID NO: 14112 - RNA, 20 nt, synthetic construct
  source 1..20: mol_type = other RNA
cctgattttatcaaactctc

SEQ ID NO: 14113 - RNA, 20 nt, synthetic construct
  source 1..20: mol_type = other RNA
attattgtggcctcaccacc

SEQ ID NO: 14114 - RNA, 20 nt, synthetic construct
  source 1..20: mol_type = other RNA
gattttccattattgtggcc

SEQ ID NO: 14115 - RNA, 20 nt, synthetic construct
  source 1..20: mol_type = other RNA
acaacactcactaaaggtca

SEQ ID NO: 14116 - RNA, 20 nt, synthetic construct
  source 1..20: mol_type = other RNA
aggggtaaagatcacattga

SEQ ID NO: 14117 - RNA, 20 nt, synthetic construct
  source 1..20: mol_type = other RNA
ataattctaatctccaattc

SEQ ID NO: 14118 - RNA, 20 nt, synthetic construct
  source 1..20: mol_type = other RNA
ggaattggagattagaatta

SEQ ID NO: 14119 - RNA, 20 nt, synthetic construct
  source 1..20: mol_type = other RNA
cttcaggaattggagattag

SEQ ID NO: 14120 - RNA, 20 nt, synthetic construct
  source 1..20: mol_type = other RNA
aatctccaattcctgaagtg

SEQ ID NO: 14121 - RNA, 20 nt, synthetic construct
  source 1..20: mol_type = other RNA
tgaagtgaaggttgtgttgg

SEQ ID NO: 14122 - RNA, 20 nt, synthetic construct
  source 1..20: mol_type = other RNA
gtcttggctcacaagtaaat

SEQ ID NO: 14123 - RNA, 20 nt, synthetic construct
  source 1..20: mol_type = other RNA
atagatatgcacatatcatt

SEQ ID NO: 14124 - RNA, 20 nt, synthetic construct
  source 1..20: mol_type = other RNA
cctttccatagatatgcaca

SEQ ID NO: 14125 - RNA, 20 nt, synthetic construct
  source 1..20: mol_type = other RNA
atatctatgtctattccaac

SEQ ID NO: 14126 - RNA, 20 nt, synthetic construct
  source 1..20: mol_type = other RNA
acccgttggaatagacatag

SEQ ID NO: 14127 - RNA, 20 nt, synthetic construct
  source 1..20: mol_type = other RNA
aacgggtagaaacaccctgg

SEQ ID NO: 14128 - RNA, 20 nt, synthetic construct
  source 1..20: mol_type = other RNA
gaccactggtgctcaggacc

SEQ ID NO: 14129 - RNA, 20 nt, synthetic construct
  source 1..20: mol_type = other RNA
ttcagaccactggtgctcag

SEQ ID NO: 14130 - RNA, 20 nt, synthetic construct
  source 1..20: mol_type = other RNA
tggcaacccgtattccttca

SEQ ID NO: 14131 - RNA, 20 nt, synthetic construct
  source 1..20: mol_type = other RNA
ctcttcctggcaacccgtat

SEQ ID NO: 14132 - RNA, 20 nt, synthetic construct
  source 1..20: mol_type = other RNA
tgcctttgcttctctcttcc

SEQ ID NO: 14133 - RNA, 20 nt, synthetic construct
  source 1..20: mol_type = other RNA
tctgccttcctgcctttgct

SEQ ID NO: 14134 - RNA, 20 nt, synthetic construct
  source 1..20: mol_type = other RNA
tactttcatctgccttcctg

SEQ ID NO: 14135 - RNA, 20 nt, synthetic construct
  source 1..20: mol_type = other RNA
cgcactttttattgtttagc

SEQ ID NO: 14136 - RNA, 20 nt, synthetic construct
  source 1..20: mol_type = other RNA
gtctatcttcccgcactttt

SEQ ID NO: 14137 - RNA, 20 nt, synthetic construct
  source 1..20: mol_type = other RNA
cacataagtgactaccaaag

SEQ ID NO: 14138 - RNA, 20 nt, synthetic construct
  source 1..20: mol_type = other RNA
tgtctttggtagtcacttat

SEQ ID NO: 14139 - RNA, 20 nt, synthetic construct
  source 1..20: mol_type = other RNA
gcttgttggacaatagatgg

SEQ ID NO: 14140 - RNA, 20 nt, synthetic construct
  source 1..20: mol_type = other RNA
cttggtcctctaccatctat

SEQ ID NO: 14141 - RNA, 20 nt, synthetic construct
  source 1..20: mol_type = other RNA
ctctctcgcaattcccttgg

SEQ ID NO: 14142 - RNA, 20 nt, synthetic construct
  source 1..20: mol_type = other RNA
tcctggagacccttcctgca

SEQ ID NO: 14143 - RNA, 20 nt, synthetic construct
  source 1..20: mol_type = other RNA
gtgcaggaagggtctccagg

SEQ ID NO: 14144 - RNA, 20 nt, synthetic construct
  source 1..20: mol_type = other RNA
tggagacccttcctgcactg

SEQ ID NO: 14145 - RNA, 20 nt, synthetic construct
  source 1..20: mol_type = other RNA
tgcactgaagggcaggagat

SEQ ID NO: 14146 - RNA, 20 nt, synthetic construct
  source 1..20: mol_type = other RNA
gcaagatggctacagttttt

SEQ ID NO: 14147 - RNA, 20 nt, synthetic construct
  source 1..20: mol_type = other RNA
ggtggctaggattttctagg

SEQ ID NO: 14148 - RNA, 20 nt, synthetic construct
  source 1..20: mol_type = other RNA
cattgttagcaggcctagaa

SEQ ID NO: 14149 - RNA, 20 nt, synthetic construct
  source 1..20: mol_type = other RNA
aggcctgctaacaatgagaa

SEQ ID NO: 14150 - RNA, 20 nt, synthetic construct
  source 1..20: mol_type = other RNA
tccacaaatctgttctcatt

SEQ ID NO: 14151 - RNA, 20 nt, synthetic construct
  source 1..20: mol_type = other RNA
agaactcctttcctccacaa

SEQ ID NO: 14152 - RNA, 20 nt, synthetic construct
  source 1..20: mol_type = other RNA
atgcatatttctagaactcc

SEQ ID NO: 14153 - RNA, 20 nt, synthetic construct
  source 1..20: mol_type = other RNA
agaaatatgcatagaaatct

SEQ ID NO: 14154 - RNA, 20 nt, synthetic construct
  source 1..20: mol_type = other RNA
tgtttagccaatgactcgag

SEQ ID NO: 14155 - RNA, 20 nt, synthetic construct
  source 1..20: mol_type = other RNA
gtgtacatgcagcttcatgt

SEQ ID NO: 14156 - RNA, 20 nt, synthetic construct
  source 1..20: mol_type = other RNA
tgtggatctattttctgtgt

SEQ ID NO: 14157 - RNA, 20 nt, synthetic construct
  source 1..20: mol_type = other RNA
ttgccctactttcttgtgga

SEQ ID NO: 14158 - RNA, 20 nt, synthetic construct
  source 1..20: mol_type = other RNA
gtagatgttctttgccctac

SEQ ID NO: 14159 - RNA, 20 nt, synthetic construct
  source 1..20: mol_type = other RNA
attgtagttgctgctcttcc

SEQ ID NO: 14160 - RNA, 20 nt, synthetic construct
  source 1..20: mol_type = other RNA
gtgaagtctctctcctctgt

SEQ ID NO: 14161 - RNA, 20 nt, synthetic construct
  source 1..20: mol_type = other RNA
ctgaacatcttgggcattca

SEQ ID NO: 14162 - RNA, 20 nt, synthetic construct
  source 1..20: mol_type = other RNA
tgggtctctactgaatgccc

SEQ ID NO: 14163 - RNA, 20 nt, synthetic construct
  source 1..20: mol_type = other RNA
gtagagacccaggaaaagcc

SEQ ID NO: 14164 - RNA, 20 nt, synthetic construct
  source 1..20: mol_type = other RNA
actcctaaagtatggctttt

SEQ ID NO: 14165 - RNA, 20 nt, synthetic construct
  source 1..20: mol_type = other RNA
aagaatatactaattctact

SEQ ID NO: 14166 - RNA, 20 nt, synthetic construct
  source 1..20: mol_type = other RNA
tagaataaaggcagctccac

SEQ ID NO: 14167 - RNA, 20 nt, synthetic construct
  source 1..20: mol_type = other RNA
gttttgctattgtttgtgtg

SEQ ID NO: 14168 - RNA, 20 nt, synthetic construct
  source 1..20: mol_type = other RNA
ttttcagttttgctattgtt

SEQ ID NO: 14169 - RNA, 20 nt, synthetic construct
  source 1..20: mol_type = other RNA
gatgcttggagacttccttt

SEQ ID NO: 14170 - RNA, 20 nt, synthetic construct
  source 1..20: mol_type = other RNA
ttgacttggacatcattctg

SEQ ID NO: 14171 - RNA, 20 nt, synthetic construct
  source 1..20: mol_type = other RNA
tctcagaggcagttcattga

SEQ ID NO: 14172 - RNA, 20 nt, synthetic construct
  source 1..20: mol_type = other RNA
atgtgtagtcaagttttata

SEQ ID NO: 14173 - RNA, 20 nt, synthetic construct
  source 1..20: mol_type = other RNA
tcctgcttgtgggtcacact

SEQ ID NO: 14174 - RNA, 20 nt, synthetic construct
  source 1..20: mol_type = other RNA
gggtctgtttgtattggctg

SEQ ID NO: 14175 - RNA, 20 nt, synthetic construct
  source 1..20: mol_type = other RNA
gtctcttctgggtctgtttg

SEQ ID NO: 14176 - RNA, 20 nt, synthetic construct
  source 1..20: mol_type = other RNA
aatcatttctgtctcttctg

SEQ ID NO: 14177 - RNA, 20 nt, synthetic construct
  source 1..20: mol_type = other RNA
taaatcctagaactcaatta

SEQ ID NO: 14178 - RNA, 20 nt, synthetic construct
  source 1..20: mol_type = other RNA
tgttttcttaaatcctagaa

SEQ ID NO: 14179 - RNA, 20 nt, synthetic construct
  source 1..20: mol_type = other RNA
aggatttaagaaaacatgaa

SEQ ID NO: 14180 - RNA, 20 nt, synthetic construct
  source 1..20: mol_type = other RNA
atattcatgttttcttaaat

SEQ ID NO: 14181 - RNA, 20 nt, synthetic construct
  source 1..20: mol_type = other RNA
atttggctctttatactctt

SEQ ID NO: 14182 - RNA, 20 nt, synthetic construct
  source 1..20: mol_type = other RNA
tcgatttggctctttatact

SEQ ID NO: 14183 - RNA, 20 nt, synthetic construct
  source 1..20: mol_type = other RNA
tttaagacatatctcttagt

SEQ ID NO: 14184 - RNA, 20 nt, synthetic construct
  source 1..20: mol_type = other RNA
gaaatgtctaactagatggg

SEQ ID NO: 14185 - RNA, 20 nt, synthetic construct
  source 1..20: mol_type = other RNA
tctgaaatgtctaactagat

SEQ ID NO: 14186 - RNA, 20 nt, synthetic construct
  source 1..20: mol_type = other RNA
tttggtattttcttctgaaa

SEQ ID NO: 14187 - RNA, 20 nt, synthetic construct
  source 1..20: mol_type = other RNA
gaagaaaataccaaatgaaa

SEQ ID NO: 14188 - RNA, 20 nt, synthetic construct
  source 1..20: mol_type = other RNA
atgcaattatttttcatttg

SEQ ID NO: 14189 - RNA, 20 nt, synthetic construct
  source 1..20: mol_type = other RNA
gtaggttctatgcaattatt

SEQ ID NO: 14190 - RNA, 20 nt, synthetic construct
  source 1..20: mol_type = other RNA
gcatttgtggatgtgtgtgt

SEQ ID NO: 14191 - RNA, 20 nt, synthetic construct
  source 1..20: mol_type = other RNA
tttttcagcatttgtggatg

SEQ ID NO: 14192 - RNA, 20 nt, synthetic construct
  source 1..20: mol_type = other RNA
tttatgtctgtgtggctcgg

SEQ ID NO: 14193 - RNA, 20 nt, synthetic construct
  source 1..20: mol_type = other RNA
cacatgtaggaaatcttttt

SEQ ID NO: 14194 - RNA, 20 nt, synthetic construct
  source 1..20: mol_type = other RNA
tacatgtgggaagcaagtca

SEQ ID NO: 14195 - RNA, 20 nt, synthetic construct
  source 1..20: mol_type = other RNA
gtgacttgcttcccacatgt

SEQ ID NO: 14196 - RNA, 20 nt, synthetic construct
  source 1..20: mol_type = other RNA
ccctttctgtgacttgcttc

SEQ ID NO: 14197 - RNA, 20 nt, synthetic construct
  source 1..20: mol_type = other RNA
aatctccttccccctttctg

SEQ ID NO: 14198 - RNA, 20 nt, synthetic construct
  source 1..20: mol_type = other RNA
gttccaatctccttccccct

SEQ ID NO: 14199 - RNA, 20 nt, synthetic construct
  source 1..20: mol_type = other RNA
gtatatatttctgttccaat

SEQ ID NO: 14200 - RNA, 20 nt, synthetic construct
  source 1..20: mol_type = other RNA
gccatccttgctttcagtat

SEQ ID NO: 14201 - RNA, 20 nt, synthetic construct
  source 1..20: mol_type = other RNA
ttatatttggaaaattttca

SEQ ID NO: 14202 - RNA, 20 nt, synthetic construct
  source 1..20: mol_type = other RNA
aaatataaagaagattaaaa

SEQ ID NO: 14203 - RNA, 20 nt, synthetic construct
  source 1..20: mol_type = other RNA
tgagtccgtgattttttaat

SEQ ID NO: 14204 - RNA, 20 nt, synthetic construct
  source 1..20: mol_type = other RNA
gatccattgagcttcttgag

SEQ ID NO: 14205 - RNA, 20 nt, synthetic construct
  source 1..20: mol_type = other RNA
aaaatgacaattataggatg

SEQ ID NO: 14206 - RNA, 20 nt, synthetic construct
  source 1..20: mol_type = other RNA
actgtcagagggcaaagaca

SEQ ID NO: 14207 - RNA, 20 nt, synthetic construct
  source 1..20: mol_type = other RNA
gtgtattatgtctttgccct

SEQ ID NO: 14208 - RNA, 20 nt, synthetic construct
  source 1..20: mol_type = other RNA
ttacgagatttttctgtgta

SEQ ID NO: 14209 - RNA, 20 nt, synthetic construct
  source 1..20: mol_type = other RNA
cgttccttacgagatttttc

SEQ ID NO: 14210 - RNA, 20 nt, synthetic construct
  source 1..20: mol_type = other RNA
tctagcaagacacagctttt

SEQ ID NO: 14211 - RNA, 20 nt, synthetic construct
  source 1..20: mol_type = other RNA
gatgggaacacattagtcac

SEQ ID NO: 14212 - RNA, 20 nt, synthetic construct
  source 1..20: mol_type = other RNA
catcagaaacactgcaacct

SEQ ID NO: 14213 - RNA, 20 nt, synthetic construct
  source 1..20: mol_type = other RNA
tttgtgtccaggttgcagtg

SEQ ID NO: 14214 - RNA, 20 nt, synthetic construct
  source 1..20: mol_type = other RNA
tacgtttattactttaatgt

SEQ ID NO: 14215 - RNA, 20 nt, synthetic construct
  source 1..20: mol_type = other RNA
ttcttacgtttattacttta

SEQ ID NO: 14216 - RNA, 20 nt, synthetic construct
  source 1..20: mol_type = other RNA
cagttgagctcttctttctt

SEQ ID NO: 14217 - RNA, 20 nt, synthetic construct
  source 1..20: mol_type = other RNA
aggcattttattgctggatg

SEQ ID NO: 14218 - RNA, 20 nt, synthetic construct
  source 1..20: mol_type = other RNA
tccaacatggatgaacttca

SEQ ID NO: 14219 - RNA, 20 nt, synthetic construct
  source 1..20: mol_type = other RNA
tccatgttggaggaatgcac

SEQ ID NO: 14220 - RNA, 20 nt, synthetic construct
  source 1..20: mol_type = other RNA
ttgtttaggggagtgcacaa

SEQ ID NO: 14221 - RNA, 20 nt, synthetic construct
  source 1..20: mol_type = other RNA
ggtttctttgtttaggggag

SEQ ID NO: 14222 - RNA, 20 nt, synthetic construct
  source 1..20: mol_type = other RNA
aaagtcttacagtttccggt

SEQ ID NO: 14223 - RNA, 20 nt, synthetic construct
  source 1..20: mol_type = other RNA
ttagggtcacctcttttgtt

SEQ ID NO: 14224 - RNA, 20 nt, synthetic construct
  source 1..20: mol_type = other RNA
ccttaattccttagggtcac

SEQ ID NO: 14225 - RNA, 20 nt, synthetic construct
  source 1..20: mol_type = other RNA
tctccttaattccttagggt

SEQ ID NO: 14226 - RNA, 20 nt, synthetic construct
  source 1..20: mol_type = other RNA
tcttctccttaattccttag

SEQ ID NO: 14227 - RNA, 20 nt, synthetic construct
  source 1..20: mol_type = other RNA
attcttcttctccttaattc

SEQ ID NO: 14228 - RNA, 20 nt, synthetic construct
  source 1..20: mol_type = other RNA
tgttctattcttcttctcct

SEQ ID NO: 14229 - RNA, 20 nt, synthetic construct
  source 1..20: mol_type = other RNA
cttcttgttctattcttctt

SEQ ID NO: 14230 - RNA, 20 nt, synthetic construct
  source 1..20: mol_type = other RNA
ttatataggctgcagaaagt

SEQ ID NO: 14231 - RNA, 20 nt, synthetic construct
  source 1..20: mol_type = other RNA
tcattatataggctgcagaa

SEQ ID NO: 14232 - RNA, 20 nt, synthetic construct
  source 1..20: mol_type = other RNA
gcagcctatataatgaagaa

SEQ ID NO: 14233 - RNA, 20 nt, synthetic construct
  source 1..20: mol_type = other RNA
tctacatttgccaattgcta

SEQ ID NO: 14234 - RNA, 20 nt, synthetic construct
  source 1..20: mol_type = other RNA
tgatcaaacgtttatatctt

SEQ ID NO: 14235 - RNA, 20 nt, synthetic construct
  source 1..20: mol_type = other RNA
actcgtcaactctcatttaa

SEQ ID NO: 14236 - RNA, 20 nt, synthetic construct
  source 1..20: mol_type = other RNA
acatatggtaaagttaaata

SEQ ID NO: 14237 - RNA, 20 nt, synthetic construct
  source 1..20: mol_type = other RNA
aatttttacttctacatatg

SEQ ID NO: 14238 - RNA, 20 nt, synthetic construct
  source 1..20: mol_type = other RNA
aattaatccctacatgattt

SEQ ID NO: 14239 - RNA, 20 nt, synthetic construct
  source 1..20: mol_type = other RNA
tacctcatgcacgatagtat

SEQ ID NO: 14240 - RNA, 20 nt, synthetic construct
  source 1..20: mol_type = other RNA
aagggatattgcaaatccta

SEQ ID NO: 14241 - RNA, 20 nt, synthetic construct
  source 1..20: mol_type = other RNA
ctcttttgaatacataaaat

SEQ ID NO: 14242 - RNA, 20 nt, synthetic construct
  source 1..20: mol_type = other RNA
ttggcttccctcttttgaat

SEQ ID NO: 14243 - RNA, 20 nt, synthetic construct
  source 1..20: mol_type = other RNA
tccttggcttccctcttttg

SEQ ID NO: 14244 - RNA, 20 nt, synthetic construct
  source 1..20: mol_type = other RNA
aaagagggaagccaaggaag

SEQ ID NO: 14245 - RNA, 20 nt, synthetic construct
  source 1..20: mol_type = other RNA
atgagcaactggatgtacta

SEQ ID NO: 14246 - RNA, 20 nt, synthetic construct
  source 1..20: mol_type = other RNA
aggaagctcattcaatgagc

SEQ ID NO: 14247 - RNA, 20 nt, synthetic construct
  source 1..20: mol_type = other RNA
tggaatggagggtctgggac

SEQ ID NO: 14248 - RNA, 20 nt, synthetic construct
  source 1..20: mol_type = other RNA
cattttctcaggcagccaca

SEQ ID NO: 14249 - RNA, 20 nt, synthetic construct
  source 1..20: mol_type = other RNA
tgacctgtggctgcctgaga

SEQ ID NO: 14250 - RNA, 20 nt, synthetic construct
  source 1..20: mol_type = other RNA
caggcagccacaggtcatga

SEQ ID NO: 14251 - RNA, 20 nt, synthetic construct
  source 1..20: mol_type = other RNA
ttatgcctcccaagaacgtt

SEQ ID NO: 14252 - RNA, 20 nt, synthetic construct
  source 1..20: mol_type = other RNA
ctcttccttatgcctcccaa

SEQ ID NO: 14253 - RNA, 20 nt, synthetic construct
  source 1..20: mol_type = other RNA
tgggaggcataaggaagagc

SEQ ID NO: 14254 - RNA, 20 nt, synthetic construct
  source 1..20: mol_type = other RNA
agatccccgcagcccaaact

SEQ ID NO: 14255 - RNA, 20 nt, synthetic construct
  source 1..20: mol_type = other RNA
ttgttttttgctcctccata

SEQ ID NO: 14256 - RNA, 20 nt, synthetic construct
  source 1..20: mol_type = other RNA
gatctcttagtcttcctgcc

SEQ ID NO: 14257 - RNA, 20 nt, synthetic construct
  source 1..20: mol_type = other RNA
tgccatcttcctttatgcca

SEQ ID NO: 14258 - RNA, 20 nt, synthetic construct
  source 1..20: mol_type = other RNA
tttatgccatgggacccact

SEQ ID NO: 14259 - RNA, 20 nt, synthetic construct
  source 1..20: mol_type = other RNA
ttcaactcatcccccagttc

SEQ ID NO: 14260 - RNA, 20 nt, synthetic construct
  source 1..20: mol_type = other RNA
actcatcccccagttctgga

SEQ ID NO: 14261 - RNA, 20 nt, synthetic construct
  source 1..20: mol_type = other RNA
ggagtggctgtggacagcag

SEQ ID NO: 14262 - RNA, 20 nt, synthetic construct
  source 1..20: mol_type = other RNA
ctcctgctctcagtctatcc

SEQ ID NO: 14263 - RNA, 20 nt, synthetic construct
  source 1..20: mol_type = other RNA
tgggcaggaccttctctcct

SEQ ID NO: 14264 - RNA, 20 nt, synthetic construct
  source 1..20: mol_type = other RNA
agagatactgcattctgcct

SEQ ID NO: 14265 - RNA, 20 nt, synthetic construct
  source 1..20: mol_type = other RNA
gcctgggagcaagttttcca

SEQ ID NO: 14266 - RNA, 20 nt, synthetic construct
  source 1..20: mol_type = other RNA
caaagctgccctggaaaact

SEQ ID NO: 14267 - RNA, 20 nt, synthetic construct
  source 1..20: mol_type = other RNA
agggcagctttgagaagtct

SEQ ID NO: 14268 - RNA, 20 nt, synthetic construct
  source 1..20: mol_type = other RNA
gcaagacttctcaaagctgc

SEQ ID NO: 14269 - RNA, 20 nt, synthetic construct
  source 1..20: mol_type = other RNA
catatcatgtcggtcaagta

SEQ ID NO: 14270 - RNA, 20 nt, synthetic construct
  source 1..20: mol_type = other RNA
catggaaaagcattgtgcaa

SEQ ID NO: 14271 - RNA, 20 nt, synthetic construct
  source 1..20: mol_type = other RNA
atgggaaaggtagagccttt

SEQ ID NO: 14272 - RNA, 20 nt, synthetic construct
  source 1..20: mol_type = other RNA
ctaggttttgagtacatgga

SEQ ID NO: 14273 - RNA, 20 nt, synthetic construct
  source 1..20: mol_type = other RNA
aggtcaactctcacactcca

SEQ ID NO: 14274 - RNA, 20 nt, synthetic construct
  source 1..20: mol_type = other RNA
gagaaaacatggcatcaagg

SEQ ID NO: 14275 - RNA, 20 nt, synthetic construct
  source 1..20: mol_type = other RNA
tcagagaaaacatggcatca

SEQ ID NO: 14276 - RNA, 20 nt, synthetic construct
  source 1..20: mol_type = other RNA
ctgaagaactacatgttcgt

SEQ ID NO: 14277 - RNA, 20 nt, synthetic construct
  source 1..20: mol_type = other RNA
aatgtgggagttgcaacgaa

SEQ ID NO: 14278 - RNA, 20 nt, synthetic construct
  source 1..20: mol_type = other RNA
ttgcaactcccacattagaa

SEQ ID NO: 14279 - RNA, 20 nt, synthetic construct
  source 1..20: mol_type = other RNA
tattctaatgtgggagttgc

SEQ ID NO: 14280 - RNA, 20 nt, synthetic construct
  source 1..20: mol_type = other RNA
catgcaaatgcatctgtatc

SEQ ID NO: 14281 - RNA, 20 nt, synthetic construct
  source 1..20: mol_type = other RNA
gcccaatccatctctctgga

SEQ ID NO: 14282 - RNA, 20 nt, synthetic construct
  source 1..20: mol_type = other RNA
agagagatggattgggcaga

SEQ ID NO: 14283 - RNA, 20 nt, synthetic construct
  source 1..20: mol_type = other RNA
gccttctgcccaatccatct

SEQ ID NO: 14284 - RNA, 20 nt, synthetic construct
  source 1..20: mol_type = other RNA
ccttctgccttctgcccaat

SEQ ID NO: 14285 - RNA, 20 nt, synthetic construct
  source 1..20: mol_type = other RNA
gccacgtgtgtgtgttatct

SEQ ID NO: 14286 - RNA, 20 nt, synthetic construct
  source 1..20: mol_type = other RNA
tagaaacactgagataacac

SEQ ID NO: 14287 - RNA, 20 nt, synthetic construct
  source 1..20: mol_type = other RNA
aagaagcgtttgctacttta

SEQ ID NO: 14288 - RNA, 20 nt, synthetic construct
  source 1..20: mol_type = other RNA
cattaaaagtaccatatgat

SEQ ID NO: 14289 - RNA, 20 nt, synthetic construct
  source 1..20: mol_type = other RNA
aatattcccattaaaagtac

SEQ ID NO: 14290 - RNA, 20 nt, synthetic construct
  source 1..20: mol_type = other RNA
aaaacgatacacgtcacaag

SEQ ID NO: 14291 - RNA, 20 nt, synthetic construct
  source 1..20: mol_type = other RNA
tgatcaagccactggaaatt

SEQ ID NO: 14292 - RNA, 20 nt, synthetic construct
  source 1..20: mol_type = other RNA
agtggcttgatcatgaacta

SEQ ID NO: 14293 - RNA, 20 nt, synthetic construct
  source 1..20: mol_type = other RNA
tgcagtagttcatgatcaag

SEQ ID NO: 14294 - RNA, 20 nt, synthetic construct
  source 1..20: mol_type = other RNA
gcgtctgagcattgcgtcag

SEQ ID NO: 14295 - RNA, 20 nt, synthetic construct
  source 1..20: mol_type = other RNA
gaaggagcctctaggcttgg

SEQ ID NO: 14296 - RNA, 20 nt, synthetic construct
  source 1..20: mol_type = other RNA
aagcctagaggctccttccg

SEQ ID NO: 14297 - RNA, 20 nt, synthetic construct
  source 1..20: mol_type = other RNA
gaacaaggtaaggagtctgt

SEQ ID NO: 14298 - RNA, 20 nt, synthetic construct
  source 1..20: mol_type = other RNA
tcccagcatcgaagcgtgta

SEQ ID NO: 14299 - RNA, 20 nt, synthetic construct
  source 1..20: mol_type = other RNA
atggcttttcatcccagcat

SEQ ID NO: 14300 - RNA, 20 nt, synthetic construct
  source 1..20: mol_type = other RNA
atgctgggatgaaaagccat

SEQ ID NO: 14301 - RNA, 20 nt, synthetic construct
  source 1..20: mol_type = other RNA
cactgatgcagccgccttca

SEQ ID NO: 14302 - RNA, 20 nt, synthetic construct
  source 1..20: mol_type = other RNA
atggtaaacggatgctcgag

SEQ ID NO: 14303 - RNA, 20 nt, synthetic construct
  source 1..20: mol_type = other RNA
tcctacatggtagaactcag

SEQ ID NO: 14304 - RNA, 20 nt, synthetic construct
  source 1..20: mol_type = other RNA
accatgtaggaggaagcctc

SEQ ID NO: 14305 - RNA, 20 nt, synthetic construct
  source 1..20: mol_type = other RNA
ggtgcaacgtggttgggctt

SEQ ID NO: 14306 - RNA, 20 nt, synthetic construct
  source 1..20: mol_type = other RNA
aaattcaccttgttgtaaaa

SEQ ID NO: 14307 - RNA, 20 nt, synthetic construct
  source 1..20: mol_type = other RNA
ccttgttgtaaaacgggcta

SEQ ID NO: 14308 - RNA, 20 nt, synthetic construct
  source 1..20: mol_type = other RNA
aagccagtaagcttttccgg

SEQ ID NO: 14309 - RNA, 20 nt, synthetic construct
  source 1..20: mol_type = other RNA
ggggatttcttcaagtagcc

SEQ ID NO: 14310 - RNA, 20 nt, synthetic construct
  source 1..20: mol_type = other RNA
tcaagtagccagcattcaga

SEQ ID NO: 14311 - RNA, 20 nt, synthetic construct
  source 1..20: mol_type = other RNA
agtagccagcattcagagca

SEQ ID NO: 14312 - RNA, 20 nt, synthetic construct
  source 1..20: mol_type = other RNA
gagcaatcttcagcattgca

SEQ ID NO: 14313 - RNA, 20 nt, synthetic construct
  source 1..20: mol_type = other RNA
cagaatctgcaatgctgaag

SEQ ID NO: 14314 - RNA, 20 nt, synthetic construct
  source 1..20: mol_type = other RNA
gcattgcagattctgagaaa

SEQ ID NO: 14315 - RNA, 20 nt, synthetic construct
  source 1..20: mol_type = other RNA
gagaaatgtggctctggagc

SEQ ID NO: 14316 - RNA, 20 nt, synthetic construct
  source 1..20: mol_type = other RNA
cgagggtgacaggctccaga

SEQ ID NO: 14317 - RNA, 20 nt, synthetic construct
  source 1..20: mol_type = other RNA
atgtggccctgggtctatgg

SEQ ID NO: 14318 - RNA, 20 nt, synthetic construct
  source 1..20: mol_type = other RNA
aagcctagggctgaagagcc

SEQ ID NO: 14319 - RNA, 20 nt, synthetic construct
  source 1..20: mol_type = other RNA
gccctaggctttgaagggag

SEQ ID NO: 14320 - RNA, 20 nt, synthetic construct
  source 1..20: mol_type = other RNA
cagtattcttaaacctcttt

SEQ ID NO: 14321 - RNA, 20 nt, synthetic construct
  source 1..20: mol_type = other RNA
taaacctctttctgatgaca

SEQ ID NO: 14322 - RNA, 20 nt, synthetic construct
  source 1..20: mol_type = other RNA
gatgacacttgtacctgtga

SEQ ID NO: 14323 - RNA, 20 nt, synthetic construct
  source 1..20: mol_type = other RNA
ctctagacccctcacaggta

SEQ ID NO: 14324 - RNA, 20 nt, synthetic construct
  source 1..20: mol_type = other RNA
ggatgcagggcatgagagga

SEQ ID NO: 14325 - RNA, 20 nt, synthetic construct
  source 1..20: mol_type = other RNA
cttggaggagagagggaatc

SEQ ID NO: 14326 - RNA, 20 nt, synthetic construct
  source 1..20: mol_type = other RNA
tcccttggaggagagaggga

SEQ ID NO: 14327 - RNA, 20 nt, synthetic construct
  source 1..20: mol_type = other RNA
ctctctcctccaagggaaga

SEQ ID NO: 14328 - RNA, 20 nt, synthetic construct
  source 1..20: mol_type = other RNA
cagggatgtgtgcacgccaa

SEQ ID NO: 14329 - RNA, 20 nt, synthetic construct
  source 1..20: mol_type = other RNA
gtcagatacataggaccgtt

SEQ ID NO: 14330 - RNA, 20 nt, synthetic construct
  source 1..20: mol_type = other RNA
gggccatggggcagaaaacg

SEQ ID NO: 14331 - RNA, 20 nt, synthetic construct
  source 1..20: mol_type = other RNA
gccccatggcccggaagcca

SEQ ID NO: 14332 - RNA, 20 nt, synthetic construct
  source 1..20: mol_type = other RNA
ctagaccgttgatcatgaaa

SEQ ID NO: 14333 - RNA, 20 nt, synthetic construct
  source 1..20: mol_type = other RNA
tgatcaacggtctagggaaa

SEQ ID NO: 14334 - RNA, 20 nt, synthetic construct
  source 1..20: mol_type = other RNA
atgtctgtcccaaactctgc

SEQ ID NO: 14335 - RNA, 20 nt, synthetic construct
  source 1..20: mol_type = other RNA
tgcaaacggcaccgcatttg

SEQ ID NO: 14336 - RNA, 20 nt, synthetic construct
  source 1..20: mol_type = other RNA
aggaaactctactgaatctt

SEQ ID NO: 14337 - RNA, 20 nt, synthetic construct
  source 1..20: mol_type = other RNA
gtagagtttcctagaaaggt

SEQ ID NO: 14338 - RNA, 20 nt, synthetic construct
  source 1..20: mol_type = other RNA
tagaaaggtgctacctcgtg

SEQ ID NO: 14339 - RNA, 20 nt, synthetic construct
  source 1..20: mol_type = other RNA
tcattggaaagtgagctcac

SEQ ID NO: 14340 - RNA, 20 nt, synthetic construct
  source 1..20: mol_type = other RNA
aatgaggaatctgatctgtt

SEQ ID NO: 14341 - RNA, 20 nt, synthetic construct
  source 1..20: mol_type = other RNA
cctgacaccttagagaaaca

SEQ ID NO: 14342 - RNA, 20 nt, synthetic construct
  source 1..20: mol_type = other RNA
ctaaggtgtcaggtgaaata

SEQ ID NO: 14343 - RNA, 20 nt, synthetic construct
  source 1..20: mol_type = other RNA
tggaaatatttcacctgaca

SEQ ID NO: 14344 - RNA, 20 nt, synthetic construct
  source 1..20: mol_type = other RNA
agaactgtagtaagttcttg

SEQ ID NO: 14345 - RNA, 20 nt, synthetic construct
  source 1..20: mol_type = other RNA
aagaacttactacagttcta

SEQ ID NO: 14346 - RNA, 20 nt, synthetic construct
  source 1..20: mol_type = other RNA
tcccattctagaactgtagt

SEQ ID NO: 14347 - RNA, 20 nt, synthetic construct
  source 1..20: mol_type = other RNA
agaatgggaggaatctgttg

SEQ ID NO: 14348 - RNA, 20 nt, synthetic construct
  source 1..20: mol_type = other RNA
cacatccatctgcctatgga

SEQ ID NO: 14349 - RNA, 20 nt, synthetic construct
  source 1..20: mol_type = other RNA
ttatccataggcagatggat

SEQ ID NO: 14350 - RNA, 20 nt, synthetic construct
  source 1..20: mol_type = other RNA
cttttccttatccataggca

SEQ ID NO: 14351 - RNA, 20 nt, synthetic construct
  source 1..20: mol_type = other RNA
catagactcctttctggttg

SEQ ID NO: 14352 - RNA, 20 nt, synthetic construct
  source 1..20: mol_type = other RNA
ggttgtgtcacaaatggctt

SEQ ID NO: 14353 - RNA, 20 nt, synthetic construct
  source 1..20: mol_type = other RNA
catgtttctctatgctcaga

SEQ ID NO: 14354 - RNA, 20 nt, synthetic construct
  source 1..20: mol_type = other RNA
ctatgctcagagatactcag

SEQ ID NO: 14355 - RNA, 20 nt, synthetic construct
  source 1..20: mol_type = other RNA
cgtgttttcatttcagcacc

SEQ ID NO: 14356 - RNA, 20 nt, synthetic construct
  source 1..20: mol_type = other RNA
tttcagcaccgactgagcaa

SEQ ID NO: 14357 - RNA, 20 nt, synthetic construct
  source 1..20: mol_type = other RNA
gcaccgactgagcaaaggcc

SEQ ID NO: 14358 - RNA, 20 nt, synthetic construct
  source 1..20: mol_type = other RNA
tgtgacagtggtggagtatg

SEQ ID NO: 14359 - RNA, 20 nt, synthetic construct
  source 1..20: mol_type = other RNA
tcctgtgacagtggtggagt

SEQ ID NO: 14360 - RNA, 20 nt, synthetic construct
  source 1..20: mol_type = other RNA
ggggtccgactatgcgagtg

SEQ ID NO: 14361 - RNA, 20 nt, synthetic construct
  source 1..20: mol_type = other RNA
cttatggtaaagaacaaaga

SEQ ID NO: 14362 - RNA, 20 nt, synthetic construct
  source 1..20: mol_type = other RNA
tctcttatggtaaagaacaa

SEQ ID NO: 14363 - RNA, 20 nt, synthetic construct
  source 1..20: mol_type = other RNA
ttaccataagagaagaaagg

SEQ ID NO: 14364 - RNA, 20 nt, synthetic construct
  source 1..20: mol_type = other RNA
cttggccctttcttctctta

SEQ ID NO: 14365 - RNA, 20 nt, synthetic construct
  source 1..20: mol_type = other RNA
gttacaagagatgtgtctca

SEQ ID NO: 14366 - RNA, 20 nt, synthetic construct
  source 1..20: mol_type = other RNA
gagaactcagcttgagacac

SEQ ID NO: 14367 - RNA, 20 nt, synthetic construct
  source 1..20: mol_type = other RNA
ccgaactcaacttgtgacag

SEQ ID NO: 14368 - RNA, 20 nt, synthetic construct
  source 1..20: mol_type = other RNA
ctcagacccttagctccaag

SEQ ID NO: 14369 - RNA, 20 nt, synthetic construct
  source 1..20: mol_type = other RNA
cttctctcagacccttagct

SEQ ID NO: 14370 - RNA, 20 nt, synthetic construct
  source 1..20: mol_type = other RNA
gctcaatagaactaggagga

SEQ ID NO: 14371 - RNA, 20 nt, synthetic construct
  source 1..20: mol_type = other RNA
tcctagttctattgagcaga

SEQ ID NO: 14372 - RNA, 20 nt, synthetic construct
  source 1..20: mol_type = other RNA
cttctgctcaatagaactag

SEQ ID NO: 14373 - RNA, 20 nt, synthetic construct
  source 1..20: mol_type = other RNA
attgagcagaagggaaatct

SEQ ID NO: 14374 - RNA, 20 nt, synthetic construct
  source 1..20: mol_type = other RNA
taatgtgatctcctcacctc

SEQ ID NO: 14375 - RNA, 20 nt, synthetic construct
  source 1..20: mol_type = other RNA
tcataatgtgatctcctcac

SEQ ID NO: 14376 - RNA, 20 nt, synthetic construct
  source 1..20: mol_type = other RNA
gactttcttcataatgtgat

SEQ ID NO: 14377 - RNA, 20 nt, synthetic construct
  source 1..20: mol_type = other RNA
acaacaccaactaaacgtca

SEQ ID NO: 14378 - RNA, 20 nt, synthetic construct
  source 1..20: mol_type = other RNA
aactggaaagtctccattga

SEQ ID NO: 14379 - RNA, 20 nt, synthetic construct
  source 1..20: mol_type = other RNA
agttggaattccgttattct

SEQ ID NO: 14380 - RNA, 20 nt, synthetic construct
  source 1..20: mol_type = other RNA
gttattctggcttccacttc

SEQ ID NO: 14381 - RNA, 20 nt, synthetic construct
  source 1..20: mol_type = other RNA
ggaagtggaagccagaataa

SEQ ID NO: 14382 - RNA, 20 nt, synthetic construct
  source 1..20: mol_type = other RNA
cttcaggaagtggaagccag

SEQ ID NO: 14383 - RNA, 20 nt, synthetic construct
  source 1..20: mol_type = other RNA
ggcttccacttcctgaaggg

SEQ ID NO: 14384 - RNA, 20 nt, synthetic construct
  source 1..20: mol_type = other RNA
acttcctgaagggaaggttg

SEQ ID NO: 14385 - RNA, 20 nt, synthetic construct
  source 1..20: mol_type = other RNA
tgaagggaaggttgcgtttg

SEQ ID NO: 14386 - RNA, 20 nt, synthetic construct
  source 1..20: mol_type = other RNA
tcttgaacccagagagaaaa

SEQ ID NO: 14387 - RNA, 20 nt, synthetic construct
  source 1..20: mol_type = other RNA
ttcctcttgaacccagagag

SEQ ID NO: 14388 - RNA, 20 nt, synthetic construct
  source 1..20: mol_type = other RNA
ctctgggttcaagaggaaag

SEQ ID NO: 14389 - RNA, 20 nt, synthetic construct
  source 1..20: mol_type = other RNA
agaggaaagaataggtgctt

SEQ ID NO: 14390 - RNA, 20 nt, synthetic construct
  source 1..20: mol_type = other RNA
cctgtccataaataagcacc

SEQ ID NO: 14391 - RNA, 20 nt, synthetic construct
  source 1..20: mol_type = other RNA
atatctacgtatattccgat

SEQ ID NO: 14392 - RNA, 20 nt, synthetic construct
  source 1..20: mol_type = other RNA
gacaatcggaatatacgtag

SEQ ID NO: 14393 - RNA, 20 nt, synthetic construct
  source 1..20: mol_type = other RNA
gattgtcagaaaaacactcg

SEQ ID NO: 14394 - RNA, 20 nt, synthetic construct
  source 1..20: mol_type = other RNA
ggccactggtacttaggaac

SEQ ID NO: 14395 - RNA, 20 nt, synthetic construct
  source 1..20: mol_type = other RNA
taagtaccagtggcctgaag

SEQ ID NO: 14396 - RNA, 20 nt, synthetic construct
  source 1..20: mol_type = other RNA
cttgctgggaacctgtatcc

SEQ ID NO: 14397 - RNA, 20 nt, synthetic construct
  source 1..20: mol_type = other RNA
ttggatcttctcttgctggg

SEQ ID NO: 14398 - RNA, 20 nt, synthetic construct
  source 1..20: mol_type = other RNA
cagcaagagaagatccaagg

SEQ ID NO: 14399 - RNA, 20 nt, synthetic construct
  source 1..20: mol_type = other RNA
ttccttggatcttctcttgc

SEQ ID NO: 14400 - RNA, 20 nt, synthetic construct
  source 1..20: mol_type = other RNA
gcatccctctctgtgctgac

SEQ ID NO: 14401 - RNA, 20 nt, synthetic construct
  source 1..20: mol_type = other RNA
ctccatccacccatcccttt

SEQ ID NO: 14402 - RNA, 20 nt, synthetic construct
  source 1..20: mol_type = other RNA
atgtctctggtagtcgcttg

SEQ ID NO: 14403 - RNA, 20 nt, synthetic construct
  source 1..20: mol_type = other RNA
acatgtgggacaacagatgg

SEQ ID NO: 14404 - RNA, 20 nt, synthetic construct
  source 1..20: mol_type = other RNA
ctaggtcctctaccatctgt

SEQ ID NO: 14405 - RNA, 20 nt, synthetic construct
  source 1..20: mol_type = other RNA
tcctggatacccttcctgca

SEQ ID NO: 14406 - RNA, 20 nt, synthetic construct
  source 1..20: mol_type = other RNA
gtgcaggaagggtatccagg

SEQ ID NO: 14407 - RNA, 20 nt, synthetic construct
  source 1..20: mol_type = other RNA
tggatacccttcctgcactg

SEQ ID NO: 14408 - RNA, 20 nt, synthetic construct
  source 1..20: mol_type = other RNA
tgcactgaatagcaaggaga

SEQ ID NO: 14409 - RNA, 20 nt, synthetic construct
  source 1..20: mol_type = other RNA
gcaagatggctacagtctgc

SEQ ID NO: 14410 - RNA, 20 nt, synthetic construct
  source 1..20: mol_type = other RNA
gctaccacagtcatcccaaa

SEQ ID NO: 14411 - RNA, 20 nt, synthetic construct
  source 1..20: mol_type = other RNA
agcagacctagaaaaatttc

SEQ ID NO: 14412 - RNA, 20 nt, synthetic construct
  source 1..20: mol_type = other RNA
tatttctagcagacctagaa

SEQ ID NO: 14413 - RNA, 20 nt, synthetic construct
  source 1..20: mol_type = other RNA
aggtctgctagaaataagaa

SEQ ID NO: 14414 - RNA, 20 nt, synthetic construct
  source 1..20: mol_type = other RNA
tccacacaaaccagttctta

SEQ ID NO: 14415 - RNA, 20 nt, synthetic construct
  source 1..20: mol_type = other RNA
atgcgtatttgtagagctct

SEQ ID NO: 14416 - RNA, 20 nt, synthetic construct
  source 1..20: mol_type = other RNA
tgtgcacaggcagcgtcatg

SEQ ID NO: 14417 - RNA, 20 nt, synthetic construct
  source 1..20: mol_type = other RNA
cgtggaaccatttcctgtgc

SEQ ID NO: 14418 - RNA, 20 nt, synthetic construct
  source 1..20: mol_type = other RNA
ttgccacactttctcgtgga

SEQ ID NO: 14419 - RNA, 20 nt, synthetic construct
  source 1..20: mol_type = other RNA
acgagaaagtgtggcaaaga

SEQ ID NO: 14420 - RNA, 20 nt, synthetic construct
  source 1..20: mol_type = other RNA
cagtaaatgttctttgccac

SEQ ID NO: 14421 - RNA, 20 nt, synthetic construct
  source 1..20: mol_type = other RNA
tgtgctcttgtacttgctgt

SEQ ID NO: 14422 - RNA, 20 nt, synthetic construct
  source 1..20: mol_type = other RNA
ttattgagcttcctgtgctc

SEQ ID NO: 14423 - RNA, 20 nt, synthetic construct
  source 1..20: mol_type = other RNA
tcccagctagaccagagagt

SEQ ID NO: 14424 - RNA, 20 nt, synthetic construct
  source 1..20: mol_type = other RNA
cagctagaccagagagtcct

SEQ ID NO: 14425 - RNA, 20 nt, synthetic construct
  source 1..20: mol_type = other RNA
ggggtctccactgaattggc

SEQ ID NO: 14426 - RNA, 20 nt, synthetic construct
  source 1..20: mol_type = other RNA
gtggagaccccagaacagcc

SEQ ID NO: 14427 - RNA, 20 nt, synthetic construct
  source 1..20: mol_type = other RNA
agtaatatactaagtgtacc

SEQ ID NO: 14428 - RNA, 20 nt, synthetic construct
  source 1..20: mol_type = other RNA
agctgtgcaaggggttgtct

SEQ ID NO: 14429 - RNA, 20 nt, synthetic construct
  source 1..20: mol_type = other RNA
ttgattggaaaccgatttga

SEQ ID NO: 14430 - RNA, 20 nt, synthetic construct
  source 1..20: mol_type = other RNA
aatcaatgaagtgcctgtga

SEQ ID NO: 14431 - RNA, 20 nt, synthetic construct
  source 1..20: mol_type = other RNA
tctcacaggcacttcattga

SEQ ID NO: 14432 - RNA, 20 nt, synthetic construct
  source 1..20: mol_type = other RNA
aaagagagttgagatttcct

SEQ ID NO: 14433 - RNA, 20 nt, synthetic construct
  source 1..20: mol_type = other RNA
acatgtagtcagattttaaa

SEQ ID NO: 14434 - RNA, 20 nt, synthetic construct
  source 1..20: mol_type = other RNA
tggtcatgggtcacacgaaa

SEQ ID NO: 14435 - RNA, 20 nt, synthetic construct
  source 1..20: mol_type = other RNA
tgtgacccatgaccaggaaa

SEQ ID NO: 14436 - RNA, 20 nt, synthetic construct
  source 1..20: mol_type = other RNA
tgagcctgtttgtattaccc

SEQ ID NO: 14437 - RNA, 20 nt, synthetic construct
  source 1..20: mol_type = other RNA
ctcattcctgagcctgtttg

SEQ ID NO: 14438 - RNA, 20 nt, synthetic construct
  source 1..20: mol_type = other RNA
aatcatttctctcattcctg

SEQ ID NO: 14439 - RNA, 20 nt, synthetic construct
  source 1..20: mol_type = other RNA
cgcaattctaatcatttctc

SEQ ID NO: 14440 - RNA, 20 nt, synthetic construct
  source 1..20: mol_type = other RNA
aatatttaaaaaaacaacat

SEQ ID NO: 14441 - RNA, 20 nt, synthetic construct
  source 1..20: mol_type = other RNA
tgcatgttgtttttttaaat

SEQ ID NO: 14442 - RNA, 20 nt, synthetic construct
  source 1..20: mol_type = other RNA
cttgatatgatatctgcttt

SEQ ID NO: 14443 - RNA, 20 nt, synthetic construct
  source 1..20: mol_type = other RNA
gtactgttaatttctcttga

SEQ ID NO: 14444 - RNA, 20 nt, synthetic construct
  source 1..20: mol_type = other RNA
attaagacatacttttttta

SEQ ID NO: 14445 - RNA, 20 nt, synthetic construct
  source 1..20: mol_type = other RNA
tctgaaacgtctaaattgat

SEQ ID NO: 14446 - RNA, 20 nt, synthetic construct
  source 1..20: mol_type = other RNA
gaggaaaacattacccaaca

SEQ ID NO: 14447 - RNA, 20 nt, synthetic construct
  source 1..20: mol_type = other RNA
ctagaattgtgtgttgggta

SEQ ID NO: 14448 - RNA, 20 nt, synthetic construct
  source 1..20: mol_type = other RNA
gtaggttctctagaattgtg

SEQ ID NO: 14449 - RNA, 20 nt, synthetic construct
  source 1..20: mol_type = other RNA
agagaacctacagaatgagc

SEQ ID NO: 14450 - RNA, 20 nt, synthetic construct
  source 1..20: mol_type = other RNA
gtgtgtgtgtgtgtgtgtgt

SEQ ID NO: 14451 - RNA, 20 nt, synthetic construct
  source 1..20: mol_type = other RNA
gcgtgtgtgtgagtatgggt

SEQ ID NO: 14452 - RNA, 20 nt, synthetic construct
  source 1..20: mol_type = other RNA
aacacacacagacacgcgca

SEQ ID NO: 14453 - RNA, 20 nt, synthetic construct
  source 1..20: mol_type = other RNA
ggggtgcgcgtgtctgtgtg

SEQ ID NO: 14454 - RNA, 20 nt, synthetic construct
  source 1..20: mol_type = other RNA
tcaggggtgcgcgtgtctgt

SEQ ID NO: 14455 - RNA, 20 nt, synthetic construct
  source 1..20: mol_type = other RNA
ctgtttcttcaggggtgcgc

SEQ ID NO: 14456 - RNA, 20 nt, synthetic construct
  source 1..20: mol_type = other RNA
tacatgtctgtgaggctcgc

SEQ ID NO: 14457 - RNA, 20 nt, synthetic construct
  source 1..20: mol_type = other RNA
tattttcctacatgtctgtg

SEQ ID NO: 14458 - RNA, 20 nt, synthetic construct
  source 1..20: mol_type = other RNA
cacatgcaggaaatcttttc

SEQ ID NO: 14459 - RNA, 20 nt, synthetic construct
  source 1..20: mol_type = other RNA
tgcatgtgggaagcaagtca

SEQ ID NO: 14460 - RNA, 20 nt, synthetic construct
  source 1..20: mol_type = other RNA
attataaactcccttgctct

SEQ ID NO: 14461 - RNA, 20 nt, synthetic construct
  source 1..20: mol_type = other RNA
ggtatttgtttctattataa

SEQ ID NO: 14462 - RNA, 20 nt, synthetic construct
  source 1..20: mol_type = other RNA
taattgaaaagttatcagcc

SEQ ID NO: 14463 - RNA, 20 nt, synthetic construct
  source 1..20: mol_type = other RNA
tcgtaattgaaaagttatca

SEQ ID NO: 14464 - RNA, 20 nt, synthetic construct
  source 1..20: mol_type = other RNA
attacgaagaacattaaaaa

SEQ ID NO: 14465 - RNA, 20 nt, synthetic construct
  source 1..20: mol_type = other RNA
gtgattttttttaatgttct

SEQ ID NO: 14466 - RNA, 20 nt, synthetic construct
  source 1..20: mol_type = other RNA
cgattctgtgatttttttta

SEQ ID NO: 14467 - RNA, 20 nt, synthetic construct
  source 1..20: mol_type = other RNA
ctatatgatcccttgagttt

SEQ ID NO: 14468 - RNA, 20 nt, synthetic construct
  source 1..20: mol_type = other RNA
gaaattccctatatgatccc

SEQ ID NO: 14469 - RNA, 20 nt, synthetic construct
  source 1..20: mol_type = other RNA
gaaaaaaaacccaacctgta

SEQ ID NO: 14470 - RNA, 20 nt, synthetic construct
  source 1..20: mol_type = other RNA
aactgtgatgtacaaaagta

SEQ ID NO: 14471 - RNA, 20 nt, synthetic construct
  source 1..20: mol_type = other RNA
aaggtaacaaggcaaagatg

SEQ ID NO: 14472 - RNA, 20 nt, synthetic construct
  source 1..20: mol_type = other RNA
tattacatctttgccttgtt

SEQ ID NO: 14473 - RNA, 20 nt, synthetic construct
  source 1..20: mol_type = other RNA
tcttattacatctttgcctt

SEQ ID NO: 14474 - RNA, 20 nt, synthetic construct
  source 1..20: mol_type = other RNA
cgtgacaggtttcttcttat

SEQ ID NO: 14475 - RNA, 20 nt, synthetic construct
  source 1..20: mol_type = other RNA
tccagtttctcgtgacaggt

SEQ ID NO: 14476 - RNA, 20 nt, synthetic construct
  source 1..20: mol_type = other RNA
tacaagtacactgatacaaa

SEQ ID NO: 14477 - RNA, 20 nt, synthetic construct
  source 1..20: mol_type = other RNA
gaggtgaacacattggcaat

SEQ ID NO: 14478 - RNA, 20 nt, synthetic construct
  source 1..20: mol_type = other RNA
agtgtttctgaggtgaacac

SEQ ID NO: 14479 - RNA, 20 nt, synthetic construct
  source 1..20: mol_type = other RNA
cctcagaaacactggaagcc

SEQ ID NO: 14480 - RNA, 20 nt, synthetic construct
  source 1..20: mol_type = other RNA
ctggtatctggcttccagtg

SEQ ID NO: 14481 - RNA, 20 nt, synthetic construct
  source 1..20: mol_type = other RNA
tgattatcattttaacaata

SEQ ID NO: 14482 - RNA, 20 nt, synthetic construct
  source 1..20: mol_type = other RNA
cggttgatctctttttgttc

SEQ ID NO: 14483 - RNA, 20 nt, synthetic construct
  source 1..20: mol_type = other RNA
gcattcccggttgatctctt

SEQ ID NO: 14484 - RNA, 20 nt, synthetic construct
  source 1..20: mol_type = other RNA
aggcattttattgctggatt

SEQ ID NO: 14485 - RNA, 20 nt, synthetic construct
  source 1..20: mol_type = other RNA
ttggggcagtgcacaatatg

SEQ ID NO: 14486 - RNA, 20 nt, synthetic construct
  source 1..20: mol_type = other RNA
ttctttggggcagtgcacaa

SEQ ID NO: 14487 - RNA, 20 nt, synthetic construct
  source 1..20: mol_type = other RNA
ggtttctttctttggggcag

SEQ ID NO: 14488 - RNA, 20 nt, synthetic construct
  source 1..20: mol_type = other RNA
tacagtttccggtttctttc

SEQ ID NO: 14489 - RNA, 20 nt, synthetic construct
  source 1..20: mol_type = other RNA
aattcttacagtttccggtt

SEQ ID NO: 14490 - RNA, 20 nt, synthetic construct
  source 1..20: mol_type = other RNA
ggtcacctctcttgttacat

SEQ ID NO: 14491 - RNA, 20 nt, synthetic construct
  source 1..20: mol_type = other RNA
ttcgggtcacctctcttgtt

SEQ ID NO: 14492 - RNA, 20 nt, synthetic construct
  source 1..20: mol_type = other RNA
acctaattccttcgggtcac

SEQ ID NO: 14493 - RNA, 20 nt, synthetic construct
  source 1..20: mol_type = other RNA
tctacctaattccttcgggt

SEQ ID NO: 14494 - RNA, 20 nt, synthetic construct
  source 1..20: mol_type = other RNA
tcttctacctaattccttcg

SEQ ID NO: 14495 - RNA, 20 nt, synthetic construct
  source 1..20: mol_type = other RNA
attcttcttctacctaattc

SEQ ID NO: 14496 - RNA, 20 nt, synthetic construct
  source 1..20: mol_type = other RNA
tgttcaattcttcttctacc

SEQ ID NO: 14497 - RNA, 20 nt, synthetic construct
  source 1..20: mol_type = other RNA
tttcttgttcaattcttctt

SEQ ID NO: 14498 - RNA, 20 nt, synthetic construct
  source 1..20: mol_type = other RNA
ttacgtgggctgcagaaagt

SEQ ID NO: 14499 - RNA, 20 nt, synthetic construct
  source 1..20: mol_type = other RNA
tcattacgtgggctgcagaa

SEQ ID NO: 14500 - RNA, 20 nt, synthetic construct
  source 1..20: mol_type = other RNA
gcagcccacgtaatgaagaa

SEQ ID NO: 14501 - RNA, 20 nt, synthetic construct
  source 1..20: mol_type = other RNA
tgatcaaatttctatatctt

SEQ ID NO: 14502 - RNA, 20 nt, synthetic construct
  source 1..20: mol_type = other RNA
atatctttgtaaatgagagt

SEQ ID NO: 14503 - RNA, 20 nt, synthetic construct
  source 1..20: mol_type = other RNA
agtagtcaactctcatttac

SEQ ID NO: 14504 - RNA, 20 nt, synthetic construct
  source 1..20: mol_type = other RNA
tacctctacatatgctgaag

SEQ ID NO: 14505 - RNA, 20 nt, synthetic construct
  source 1..20: mol_type = other RNA
gcatatgtagaggtaagaat

SEQ ID NO: 14506 - RNA, 20 nt, synthetic construct
  source 1..20: mol_type = other RNA
aattcttacctctacatatg

SEQ ID NO: 14507 - RNA, 20 nt, synthetic construct
  source 1..20: mol_type = other RNA
tgatttatgctaccatttca

SEQ ID NO: 14508 - RNA, 20 nt, synthetic construct
  source 1..20: mol_type = other RNA
aattaatcccttcgtgattt

SEQ ID NO: 14509 - RNA, 20 nt, synthetic construct
  source 1..20: mol_type = other RNA
aagtgtaccgttgtaagttt

SEQ ID NO: 14510 - RNA, 20 nt, synthetic construct
  source 1..20: mol_type = other RNA
ttacctcatgcacgatggtg

SEQ ID NO: 14511 - RNA, 20 nt, synthetic construct
  source 1..20: mol_type = other RNA
aacccgcacagtaccctttt

SEQ ID NO: 14512 - RNA, 20 nt, synthetic construct
  source 1..20: mol_type = other RNA
aagggatattgcaaatccta

SEQ ID NO: 14513 - RNA, 20 nt, synthetic construct
  source 1..20: mol_type = other RNA
aacctttgtgattgctctag

SEQ ID NO: 14514 - RNA, 20 nt, synthetic construct
  source 1..20: mol_type = other RNA
tattataccaaaaacctcag

SEQ ID NO: 14515 - RNA, 20 nt, synthetic construct
  source 1..20: mol_type = other RNA
ctcttttgaatgcatggact

SEQ ID NO: 14516 - RNA, 20 nt, synthetic construct
  source 1..20: mol_type = other RNA
ttggcttccctcttttgaat

SEQ ID NO: 14517 - RNA, 20 nt, synthetic construct
  source 1..20: mol_type = other RNA
tccttggcttccctcttttg

SEQ ID NO: 14518 - RNA, 20 nt, synthetic construct
  source 1..20: mol_type = other RNA
aaagagggaagccaaggaag

SEQ ID NO: 14519 - RNA, 20 nt, synthetic construct
  source 1..20: mol_type = other RNA
agttcttccttggcttccct

SEQ ID NO: 14520 - RNA, 20 nt, synthetic construct
  source 1..20: mol_type = other RNA
agagctcaggctcttataca

SEQ ID NO: 14521 - RNA, 20 nt, synthetic construct
  source 1..20: mol_type = other RNA
atgagcaactggatgtataa

SEQ ID NO: 14522 - RNA, 20 nt, synthetic construct
  source 1..20: mol_type = other RNA
aggaagctggttcaatgagc

SEQ ID NO: 14523 - RNA, 20 nt, synthetic construct
  source 1..20: mol_type = other RNA
tggaatggagggtctggggt

SEQ ID NO: 14524 - RNA, 20 nt, synthetic construct
  source 1..20: mol_type = other RNA
aacactgtctctctagagac

SEQ ID NO: 14525 - RNA, 20 nt, synthetic construct
  source 1..20: mol_type = other RNA
cattttctcaggcagccaga

SEQ ID NO: 14526 - RNA, 20 nt, synthetic construct
  source 1..20: mol_type = other RNA
tgacctctggctgcctgaga

SEQ ID NO: 14527 - RNA, 20 nt, synthetic construct
  source 1..20: mol_type = other RNA
caggcagccagaggtcatga

SEQ ID NO: 14528 - RNA, 20 nt, synthetic construct
  source 1..20: mol_type = other RNA
ttatgcctcccaagaacgtt

SEQ ID NO: 14529 - RNA, 20 nt, synthetic construct
  source 1..20: mol_type = other RNA
ctcttccttatgcctcccaa

SEQ ID NO: 14530 - RNA, 20 nt, synthetic construct
  source 1..20: mol_type = other RNA
tgggaggcataaggaagagc

SEQ ID NO: 14531 - RNA, 20 nt, synthetic construct
  source 1..20: mol_type = other RNA
agatccccgcagcccaaact

SEQ ID NO: 14532 - RNA, 20 nt, synthetic construct
  source 1..20: mol_type = other RNA
ctgctgctccgtagctgtcc

SEQ ID NO: 14533 - RNA, 20 nt, synthetic construct
  source 1..20: mol_type = other RNA
gatctcttagtccaccctgc

SEQ ID NO: 14534 - RNA, 20 nt, synthetic construct
  source 1..20: mol_type = other RNA
tttatgccatgggtcccact

SEQ ID NO: 14535 - RNA, 20 nt, synthetic construct
  source 1..20: mol_type = other RNA
ttcaactcatccccctttcc

SEQ ID NO: 14536 - RNA, 20 nt, synthetic construct
  source 1..20: mol_type = other RNA
actcatccccctttccctca

SEQ ID NO: 14537 - RNA, 20 nt, synthetic construct
  source 1..20: mol_type = other RNA
ctcagtcccggagtagctgc

SEQ ID NO: 14538 - RNA, 20 nt, synthetic construct
  source 1..20: mol_type = other RNA
ctcctgctctcagtctaccc

SEQ ID NO: 14539 - RNA, 20 nt, synthetic construct
  source 1..20: mol_type = other RNA
taggcaggtccttctctcct

SEQ ID NO: 14540 - RNA, 20 nt, synthetic construct
  source 1..20: mol_type = other RNA
agagatactgcatcctgcct

SEQ ID NO: 14541 - RNA, 20 nt, synthetic construct
  source 1..20: mol_type = other RNA
caaagctgccctggaaaact

SEQ ID NO: 14542 - RNA, 20 nt, synthetic construct
  source 1..20: mol_type = other RNA
agggcagctttgagaagtct

SEQ ID NO: 14543 - RNA, 20 nt, synthetic construct
  source 1..20: mol_type = other RNA
ccaagacttctcaaagctgc

SEQ ID NO: 14544 - RNA, 20 nt, synthetic construct
  source 1..20: mol_type = other RNA
cacagaaaagcattgtgcaa

SEQ ID NO: 14545 - RNA, 20 nt, synthetic construct
  source 1..20: mol_type = other RNA
gtgggaaaggtagagccttt

SEQ ID NO: 14546 - RNA, 20 nt, synthetic construct
  source 1..20: mol_type = other RNA
ctacgtattgagtacataga

SEQ ID NO: 14547 - RNA, 20 nt, synthetic construct
  source 1..20: mol_type = other RNA
aggtcaaccctcacactcta

SEQ ID NO: 14548 - RNA, 20 nt, synthetic construct
  source 1..20: mol_type = other RNA
gaaaacacacgtcatccagg

SEQ ID NO: 14549 - RNA, 20 nt, synthetic construct
  source 1..20: mol_type = other RNA
tcagaaaacacacgtcatcc

SEQ ID NO: 14550 - RNA, 20 nt, synthetic construct
  source 1..20: mol_type = other RNA
gaagaactacatgttcgttg

SEQ ID NO: 14551 - RNA, 20 nt, synthetic construct
  source 1..20: mol_type = other RNA
aatgtgggagttgcaacgaa

SEQ ID NO: 14552 - RNA, 20 nt, synthetic construct
  source 1..20: mol_type = other RNA
ttgcaactcccacattagaa

SEQ ID NO: 14553 - RNA, 20 nt, synthetic construct
  source 1..20: mol_type = other RNA
tattctaatgtgggagttgc

SEQ ID NO: 14554 - RNA, 20 nt, synthetic construct
  source 1..20: mol_type = other RNA
catgcaaatgcatctgtatc

SEQ ID NO: 14555 - RNA, 20 nt, synthetic construct
  source 1..20: mol_type = other RNA
gcccaatccatctctctgga

SEQ ID NO: 14556 - RNA, 20 nt, synthetic construct
  source 1..20: mol_type = other RNA
agagagatggattgggcaga

SEQ ID NO: 14557 - RNA, 20 nt, synthetic construct
  source 1..20: mol_type = other RNA
gccttctgcccaatccatct

SEQ ID NO: 14558 - RNA, 20 nt, synthetic construct
  source 1..20: mol_type = other RNA
ccttctgccttctgcccaat

SEQ ID NO: 14559 - RNA, 20 nt, synthetic construct
  source 1..20: mol_type = other RNA
gccacgtgtgtgtgttatct

SEQ ID NO: 14560 - RNA, 20 nt, synthetic construct
  source 1..20: mol_type = other RNA
tagaaacactgagataacac

SEQ ID NO: 14561 - RNA, 20 nt, synthetic construct
  source 1..20: mol_type = other RNA
aagaagcgtttgctacttta

SEQ ID NO: 14562 - RNA, 20 nt, synthetic construct
  source 1..20: mol_type = other RNA
cattaaaagtaccatatgat

SEQ ID NO: 14563 - RNA, 20 nt, synthetic construct
  source 1..20: mol_type = other RNA
aatattcccattaaaagtac

SEQ ID NO: 14564 - RNA, 20 nt, synthetic construct
  source 1..20: mol_type = other RNA
aaaacgatacacgtcacaag

SEQ ID NO: 14565 - RNA, 20 nt, synthetic construct
  source 1..20: mol_type = other RNA
tgatcaagccactggaaatt

SEQ ID NO: 14566 - RNA, 20 nt, synthetic construct
  source 1..20: mol_type = other RNA
agtggcttgatcatgaacta

SEQ ID NO: 14567 - RNA, 20 nt, synthetic construct
  source 1..20: mol_type = other RNA
tgcagtagttcatgatcaag

SEQ ID NO: 14568 - RNA, 20 nt, synthetic construct
  source 1..20: mol_type = other RNA
gcgtctgagcattgcgtcag

SEQ ID NO: 14569 - RNA, 20 nt, synthetic construct
  source 1..20: mol_type = other RNA
gaaggagcctctaggcttgg

SEQ ID NO: 14570 - RNA, 20 nt, synthetic construct
  source 1..20: mol_type = other RNA
aagcctagaggctccttccg

SEQ ID NO: 14571 - RNA, 20 nt, synthetic construct
  source 1..20: mol_type = other RNA
gaacaaggtaaggagtctgt

SEQ ID NO: 14572 - RNA, 20 nt, synthetic construct
  source 1..20: mol_type = other RNA
tcccagcatcgaagcgtgta

SEQ ID NO: 14573 - RNA, 20 nt, synthetic construct
  source 1..20: mol_type = other RNA
atggcttttcatcccagcat

SEQ ID NO: 14574 - RNA, 20 nt, synthetic construct
  source 1..20: mol_type = other RNA
atgctgggatgaaaagccat

SEQ ID NO: 14575 - RNA, 20 nt, synthetic construct
  source 1..20: mol_type = other RNA
cactgatgcagccgccttca

SEQ ID NO: 14576 - RNA, 20 nt, synthetic construct
  source 1..20: mol_type = other RNA
atggtaaacggatgctcgag

SEQ ID NO: 14577 - RNA, 20 nt, synthetic construct
  source 1..20: mol_type = other RNA
tcctacatggtagaactcag

SEQ ID NO: 14578 - RNA, 20 nt, synthetic construct
  source 1..20: mol_type = other RNA
accatgtaggaggaagcctc

SEQ ID NO: 14579 - RNA, 20 nt, synthetic construct
  source 1..20: mol_type = other RNA
ggtgcaacgtggttgggctt

SEQ ID NO: 14580 - RNA, 20 nt, synthetic construct
  source 1..20: mol_type = other RNA
aaattcaccttgttgtaaaa

SEQ ID NO: 14581 - RNA, 20 nt, synthetic construct
  source 1..20: mol_type = other RNA
ccttgttgtaaaacgggcta

SEQ ID NO: 14582 - RNA, 20 nt, synthetic construct
  source 1..20: mol_type = other RNA
aagccagtaagcttttccgg

SEQ ID NO: 14583 - RNA, 20 nt, synthetic construct
  source 1..20: mol_type = other RNA
ggggatttcttcaagtagcc

SEQ ID NO: 14584 - RNA, 20 nt, synthetic construct
  source 1..20: mol_type = other RNA
tcaagtagccagcattcaga

SEQ ID NO: 14585 - RNA, 20 nt, synthetic construct
  source 1..20: mol_type = other RNA
agtagccagcattcagagca

SEQ ID NO: 14586 - RNA, 20 nt, synthetic construct
  source 1..20: mol_type = other RNA
gagcaatcttcagcattgca

SEQ ID NO: 14587 - RNA, 20 nt, synthetic construct
  source 1..20: mol_type = other RNA
cagaatctgcaatgctgaag

SEQ ID NO: 14588 - RNA, 20 nt, synthetic construct
  source 1..20: mol_type = other RNA
gcattgcagattctgagaaa

SEQ ID NO: 14589 - RNA, 20 nt, synthetic construct
  source 1..20: mol_type = other RNA
gagaaatgtggctctggagc

SEQ ID NO: 14590 - RNA, 20 nt, synthetic construct
  source 1..20: mol_type = other RNA
cgagggtgacaggctccaga

SEQ ID NO: 14591 - RNA, 20 nt, synthetic construct
  source 1..20: mol_type = other RNA
atgtggccctgggtctatgg

SEQ ID NO: 14592 - RNA, 20 nt, synthetic construct
  source 1..20: mol_type = other RNA
aagcctagggctgaagagcc

SEQ ID NO: 14593 - RNA, 20 nt, synthetic construct
  source 1..20: mol_type = other RNA
gccctaggctttgaagggag

SEQ ID NO: 14594 - RNA, 20 nt, synthetic construct
  source 1..20: mol_type = other RNA
cagtattcttaaacctcttt

SEQ ID NO: 14595 - RNA, 20 nt, synthetic construct
  source 1..20: mol_type = other RNA
taaacctctttctgatgaca

SEQ ID NO: 14596 - RNA, 20 nt, synthetic construct
  source 1..20: mol_type = other RNA
gatgacacttgtacctgtga

SEQ ID NO: 14597 - RNA, 20 nt, synthetic construct
  source 1..20: mol_type = other RNA
ctctagacccctcacaggta

SEQ ID NO: 14598 - RNA, 20 nt, synthetic construct
  source 1..20: mol_type = other RNA
ggatgcagggcatgagagga

SEQ ID NO: 14599 - RNA, 20 nt, synthetic construct
  source 1..20: mol_type = other RNA
cttggaggagagagggaatc

SEQ ID NO: 14600 - RNA, 20 nt, synthetic construct
  source 1..20: mol_type = other RNA
tcccttggaggagagaggga

SEQ ID NO: 14601 - RNA, 20 nt, synthetic construct
  source 1..20: mol_type = other RNA
ctctctcctccaagggaaga

SEQ ID NO: 14602 - RNA, 20 nt, synthetic construct
  source 1..20: mol_type = other RNA
cagggatgtgtgcacgccaa

SEQ ID NO: 14603 - RNA, 20 nt, synthetic construct
  source 1..20: mol_type = other RNA
gtcagatacataggaccgtt

SEQ ID NO: 14604 - RNA, 20 nt, synthetic construct
  source 1..20: mol_type = other RNA
gggccatggggcagaaaacg

SEQ ID NO: 14605 - RNA, 20 nt, synthetic construct
  source 1..20: mol_type = other RNA
gccccatggcccggaagcca

SEQ ID NO: 14606 - RNA, 20 nt, synthetic construct
  source 1..20: mol_type = other RNA
ctagaccgttgatcatgaaa

SEQ ID NO: 14607 - RNA, 20 nt, synthetic construct
  source 1..20: mol_type = other RNA
tgatcaacggtctagggaaa

SEQ ID NO: 14608 - RNA, 20 nt, synthetic construct
  source 1..20: mol_type = other RNA
atgtctgtcccaaactctgc

SEQ ID NO: 14609 - RNA, 20 nt, synthetic construct
  source 1..20: mol_type = other RNA
tgcaaacggcaccgcatttg

SEQ ID NO: 14610 - RNA, 20 nt, synthetic construct
  source 1..20: mol_type = other RNA
aggaaactctactgaatctt

SEQ ID NO: 14611 - RNA, 20 nt, synthetic construct
  source 1..20: mol_type = other RNA
gtagagtttcctagaaaggt

SEQ ID NO: 14612 - RNA, 20 nt, synthetic construct
  source 1..20: mol_type = other RNA
tagaaaggtgctacctcgtg

SEQ ID NO: 14613 - RNA, 20 nt, synthetic construct
  source 1..20: mol_type = other RNA
tcattggaaagtgagctcac

SEQ ID NO: 14614 - RNA, 20 nt, synthetic construct
  source 1..20: mol_type = other RNA
aatgaggaatctgatctgtt

SEQ ID NO: 14615 - RNA, 20 nt, synthetic construct
  source 1..20: mol_type = other RNA
cctgacaccttagagaaaca

SEQ ID NO: 14616 - RNA, 20 nt, synthetic construct
  source 1..20: mol_type = other RNA
ctaaggtgtcaggtgaaata

SEQ ID NO: 14617 - RNA, 20 nt, synthetic construct
  source 1..20: mol_type = other RNA
tggaaatatttcacctgaca

SEQ ID NO: 14618 - RNA, 20 nt, synthetic construct
  source 1..20: mol_type = other RNA
agaactgtagtaagttcttg

SEQ ID NO: 14619 - RNA, 20 nt, synthetic construct
  source 1..20: mol_type = other RNA
aagaacttactacagttcta

SEQ ID NO: 14620 - RNA, 20 nt, synthetic construct
  source 1..20: mol_type = other RNA
tcccattctagaactgtagt

SEQ ID NO: 14621 - RNA, 20 nt, synthetic construct
  source 1..20: mol_type = other RNA
agaatgggaggaatctgttg

SEQ ID NO: 14622 - RNA, 20 nt, synthetic construct
  source 1..20: mol_type = other RNA
cacatccatctgcctatgga

SEQ ID NO: 14623 - RNA, 20 nt, synthetic construct
  source 1..20: mol_type = other RNA
ttatccataggcagatggat

SEQ ID NO: 14624 - RNA, 20 nt, synthetic construct
  source 1..20: mol_type = other RNA
cttttccttatccataggca

SEQ ID NO: 14625 - RNA, 20 nt, synthetic construct
  source 1..20: mol_type = other RNA
catagactcctttctggttg

SEQ ID NO: 14626 - RNA, 20 nt, synthetic construct
  source 1..20: mol_type = other RNA
ggttgtgtcacaaatggctt

SEQ ID NO: 14627 - RNA, 20 nt, synthetic construct
  source 1..20: mol_type = other RNA
catgtttctctatgctcaga

SEQ ID NO: 14628 - RNA, 20 nt, synthetic construct
  source 1..20: mol_type = other RNA
ctatgctcagagatactcag

SEQ ID NO: 14629 - RNA, 20 nt, synthetic construct
  source 1..20: mol_type = other RNA
cgtgttttcatttcagcacc

SEQ ID NO: 14630 - RNA, 20 nt, synthetic construct
  source 1..20: mol_type = other RNA
tttcagcaccgactgagcaa

SEQ ID NO: 14631 - RNA, 20 nt, synthetic construct
  source 1..20: mol_type = other RNA
gcaccgactgagcaaaggcc

SEQ ID NO: 14632 - RNA, 20 nt, synthetic construct
  source 1..20: mol_type = other RNA
tgtgacagtggtggagtatg

SEQ ID NO: 14633 - RNA, 20 nt, synthetic construct
  source 1..20: mol_type = other RNA
tcctgtgacagtggtggagt

SEQ ID NO: 14634 - RNA, 20 nt, synthetic construct
  source 1..20: mol_type = other RNA
ggggtccgactatgcgagtg

SEQ ID NO: 14635 - RNA, 20 nt, synthetic construct
  source 1..20: mol_type = other RNA
cttatggtaaagaacaaaga

SEQ ID NO: 14636 - RNA, 20 nt, synthetic construct
  source 1..20: mol_type = other RNA
tctcttatggtaaagaacaa

SEQ ID NO: 14637 - RNA, 20 nt, synthetic construct
  source 1..20: mol_type = other RNA
ttaccataagagaagaaagg

SEQ ID NO: 14638 - RNA, 20 nt, synthetic construct
  source 1..20: mol_type = other RNA
cttggccctttcttctctta

SEQ ID NO: 14639 - RNA, 20 nt, synthetic construct
  source 1..20: mol_type = other RNA
gttacaagagatgtgtctca

SEQ ID NO: 14640 - RNA, 20 nt, synthetic construct
  source 1..20: mol_type = other RNA
gagaactcagcttgagacac

SEQ ID NO: 14641 - RNA, 20 nt, synthetic construct
  source 1..20: mol_type = other RNA
ccgaactcaacttgtgacag

SEQ ID NO: 14642 - RNA, 20 nt, synthetic construct
  source 1..20: mol_type = other RNA
ctcagacccttagctccaag

SEQ ID NO: 14643 - RNA, 20 nt, synthetic construct
  source 1..20: mol_type = other RNA
cttctctcagacccttagct

SEQ ID NO: 14644 - RNA, 20 nt, synthetic construct
  source 1..20: mol_type = other RNA
gctcaatagaactaggagga

SEQ ID NO: 14645 - RNA, 20 nt, synthetic construct
  source 1..20: mol_type = other RNA
tcctagttctattgagcaga

SEQ ID NO: 14646 - RNA, 20 nt, synthetic construct
  source 1..20: mol_type = other RNA
cttctgctcaatagaactag

SEQ ID NO: 14647 - RNA, 20 nt, synthetic construct
  source 1..20: mol_type = other RNA
attgagcagaagggaaatct

SEQ ID NO: 14648 - RNA, 20 nt, synthetic construct
  source 1..20: mol_type = other RNA
taatgtgatctcctcacctc

SEQ ID NO: 14649 - RNA, 20 nt, synthetic construct
  source 1..20: mol_type = other RNA
tcataatgtgatctcctcac

SEQ ID NO: 14650 - RNA, 20 nt, synthetic construct
  source 1..20: mol_type = other RNA
gactttcttcataatgtgat

SEQ ID NO: 14651 - RNA, 20 nt, synthetic construct
  source 1..20: mol_type = other RNA
acaacaccaactaaacgtca

SEQ ID NO: 14652 - RNA, 20 nt, synthetic construct
  source 1..20: mol_type = other RNA
aactggaaagtctccattga

SEQ ID NO: 14653 - RNA, 20 nt, synthetic construct
  source 1..20: mol_type = other RNA
agttggaattccgttattct

SEQ ID NO: 14654 - RNA, 20 nt, synthetic construct
  source 1..20: mol_type = other RNA
gttattctggcttccacttc

SEQ ID NO: 14655 - RNA, 20 nt, synthetic construct
  source 1..20: mol_type = other RNA
ggaagtggaagccagaataa

SEQ ID NO: 14656 - RNA, 20 nt, synthetic construct
  source 1..20: mol_type = other RNA
cttcaggaagtggaagccag

SEQ ID NO: 14657 - RNA, 20 nt, synthetic construct
  source 1..20: mol_type = other RNA
ggcttccacttcctgaaggg

SEQ ID NO: 14658 - RNA, 20 nt, synthetic construct
  source 1..20: mol_type = other RNA
acttcctgaagggaaggttg

SEQ ID NO: 14659 - RNA, 20 nt, synthetic construct
  source 1..20: mol_type = other RNA
tgaagggaaggttgcgtttg

SEQ ID NO: 14660 - RNA, 20 nt, synthetic construct
  source 1..20: mol_type = other RNA
tcttgaacccagagagaaaa

SEQ ID NO: 14661 - RNA, 20 nt, synthetic construct
  source 1..20: mol_type = other RNA
ttcctcttgaacccagagag

SEQ ID NO: 14662 - RNA, 20 nt, synthetic construct
  source 1..20: mol_type = other RNA
ctctgggttcaagaggaaag

SEQ ID NO: 14663 - RNA, 20 nt, synthetic construct
  source 1..20: mol_type = other RNA
agaggaaagaataggtgctt

SEQ ID NO: 14664 - RNA, 20 nt, synthetic construct
  source 1..20: mol_type = other RNA
cctgtccataaataagcacc

SEQ ID NO: 14665 - RNA, 20 nt, synthetic construct
  source 1..20: mol_type = other RNA
atatctacgtatattccgat

SEQ ID NO: 14666 - RNA, 20 nt, synthetic construct
  source 1..20: mol_type = other RNA
gacaatcggaatatacgtag

SEQ ID NO: 14667 - RNA, 20 nt, synthetic construct
  source 1..20: mol_type = other RNA
gattgtcagaaaaacactcg

SEQ ID NO: 14668 - RNA, 20 nt, synthetic construct
  source 1..20: mol_type = other RNA
ggccactggtacttaggaac

SEQ ID NO: 14669 - RNA, 20 nt, synthetic construct
  source 1..20: mol_type = other RNA
taagtaccagtggcctgaag

SEQ ID NO: 14670 - RNA, 20 nt, synthetic construct
  source 1..20: mol_type = other RNA
cttgctgggaacctgtatcc

SEQ ID NO: 14671 - RNA, 20 nt, synthetic construct
  source 1..20: mol_type = other RNA
ttggatcttctcttgctggg

SEQ ID NO: 14672 - RNA, 20 nt, synthetic construct
  source 1..20: mol_type = other RNA
cagcaagagaagatccaagg

SEQ ID NO: 14673 - RNA, 20 nt, synthetic construct
  source 1..20: mol_type = other RNA
ttccttggatcttctcttgc

SEQ ID NO: 14674 - RNA, 20 nt, synthetic construct
  source 1..20: mol_type = other RNA
gcatccctctctgtgctgac

SEQ ID NO: 14675 - RNA, 20 nt, synthetic construct
  source 1..20: mol_type = other RNA
ctccatccacccatcccttt

SEQ ID NO: 14676 - RNA, 20 nt, synthetic construct
  source 1..20: mol_type = other RNA
atgtctctggtagtcgcttg

SEQ ID NO: 14677 - RNA, 20 nt, synthetic construct
  source 1..20: mol_type = other RNA
acatgtgggacaacagatgg

SEQ ID NO: 14678 - RNA, 20 nt, synthetic construct
  source 1..20: mol_type = other RNA
ctaggtcctctaccatctgt

SEQ ID NO: 14679 - RNA, 20 nt, synthetic construct
  source 1..20: mol_type = other RNA
tcctggatacccttcctgca

SEQ ID NO: 14680 - RNA, 20 nt, synthetic construct
  source 1..20: mol_type = other RNA
gtgcaggaagggtatccagg

SEQ ID NO: 14681 - RNA, 20 nt, synthetic construct
  source 1..20: mol_type = other RNA
tggatacccttcctgcactg

SEQ ID NO: 14682 - RNA, 20 nt, synthetic construct
  source 1..20: mol_type = other RNA
tgcactgaatagcaaggaga

SEQ ID NO: 14683 - RNA, 20 nt, synthetic construct
  source 1..20: mol_type = other RNA
gcaagatggctacagtctgc

SEQ ID NO: 14684 - RNA, 20 nt, synthetic construct
  source 1..20: mol_type = other RNA
gctaccacagtcatcccaaa

SEQ ID NO: 14685 - RNA, 20 nt, synthetic construct
  source 1..20: mol_type = other RNA
agcagacctagaaaaatttc

SEQ ID NO: 14686 - RNA, 20 nt, synthetic construct
  source 1..20: mol_type = other RNA
tatttctagcagacctagaa

SEQ ID NO: 14687 - RNA, 20 nt, synthetic construct
  source 1..20: mol_type = other RNA
aggtctgctagaaataagaa

SEQ ID NO: 14688 - RNA, 20 nt, synthetic construct
  source 1..20: mol_type = other RNA
tccacaaaccagttcttatt

SEQ ID NO: 14689 - RNA, 20 nt, synthetic construct
  source 1..20: mol_type = other RNA
atgcgtatttgtagagctct

SEQ ID NO: 14690 - RNA, 20 nt, synthetic construct
  source 1..20: mol_type = other RNA
tgtgcacaggcagcgtcatg

SEQ ID NO: 14691 - RNA, 20 nt, synthetic construct
  source 1..20: mol_type = other RNA
cgtggaaccatttcctgtgc

SEQ ID NO: 14692 - RNA, 20 nt, synthetic construct
  source 1..20: mol_type = other RNA
ttgccacactttctcgtgga

SEQ ID NO: 14693 - RNA, 20 nt, synthetic construct
  source 1..20: mol_type = other RNA
acgagaaagtgtggcaaaga

SEQ ID NO: 14694 - RNA, 20 nt, synthetic construct
  source 1..20: mol_type = other RNA
cagtaaatgttctttgccac

SEQ ID NO: 14695 - RNA, 20 nt, synthetic construct
  source 1..20: mol_type = other RNA
tgtgctcttgtacttgctgt

SEQ ID NO: 14696 - RNA, 20 nt, synthetic construct
  source 1..20: mol_type = other RNA
ttattgagcttcctgtgctc

SEQ ID NO: 14697 - RNA, 20 nt, synthetic construct
  source 1..20: mol_type = other RNA
tcccagctagaccagagagt

SEQ ID NO: 14698 - RNA, 20 nt, synthetic construct
  source 1..20: mol_type = other RNA
cagctagaccagagagtcct

SEQ ID NO: 14699 - RNA, 20 nt, synthetic construct
  source 1..20: mol_type = other RNA
ggggtctccactgaattggc

SEQ ID NO: 14700 - RNA, 20 nt, synthetic construct
  source 1..20: mol_type = other RNA
gtggagaccccagaacagcc

SEQ ID NO: 14701 - RNA, 20 nt, synthetic construct
  source 1..20: mol_type = other RNA
agtaatatactaagtgtacc

SEQ ID NO: 14702 - RNA, 20 nt, synthetic construct
  source 1..20: mol_type = other RNA
agctgtgcaaggggttgtct

SEQ ID NO: 14703 - RNA, 20 nt, synthetic construct
  source 1..20: mol_type = other RNA
ttgattggaaaccgatttga

SEQ ID NO: 14704 - RNA, 20 nt, synthetic construct
  source 1..20: mol_type = other RNA
aatcaatgaagtgcctgtga

SEQ ID NO: 14705 - RNA, 20 nt, synthetic construct
  source 1..20: mol_type = other RNA
tctcacaggcacttcattga

SEQ ID NO: 14706 - RNA, 20 nt, synthetic construct
  source 1..20: mol_type = other RNA
aaagagagttgagatttcct

SEQ ID NO: 14707 - RNA, 20 nt, synthetic construct
  source 1..20: mol_type = other RNA
acatgtagtcagattttaaa

SEQ ID NO: 14708 - RNA, 20 nt, synthetic construct
  source 1..20: mol_type = other RNA
tggtcatgggtcacacgaaa

SEQ ID NO: 14709 - RNA, 20 nt, synthetic construct
  source 1..20: mol_type = other RNA
tgtgacccatgaccaggaaa

SEQ ID NO: 14710 - RNA, 20 nt, synthetic construct
  source 1..20: mol_type = other RNA
tgagcctgtttgtattaccc

SEQ ID NO: 14711 - RNA, 20 nt, synthetic construct
  source 1..20: mol_type = other RNA
ctcattcctgagcctgtttg

SEQ ID NO: 14712 - RNA, 20 nt, synthetic construct
  source 1..20: mol_type = other RNA
aatcatttctctcattcctg

SEQ ID NO: 14713 - RNA, 20 nt, synthetic construct
  source 1..20: mol_type = other RNA
cgcaattctaatcatttctc

SEQ ID NO: 14714 - RNA, 20 nt, synthetic construct
  source 1..20: mol_type = other RNA
aatatttaaaaaaacaacat

SEQ ID NO: 14715 - RNA, 20 nt, synthetic construct
  source 1..20: mol_type = other RNA
tgcatgttgtttttttaaat

SEQ ID NO: 14716 - RNA, 20 nt, synthetic construct
  source 1..20: mol_type = other RNA
cttgatatgatatctgcttt

SEQ ID NO: 14717 - RNA, 20 nt, synthetic construct
  source 1..20: mol_type = other RNA
gtactgttaatttctcttga

SEQ ID NO: 14718 - RNA, 20 nt, synthetic construct
  source 1..20: mol_type = other RNA
attaagacatacttttttta

SEQ ID NO: 14719 - RNA, 20 nt, synthetic construct
  source 1..20: mol_type = other RNA
tctgaaacgtctaaattgat

SEQ ID NO: 14720 - RNA, 20 nt, synthetic construct
  source 1..20: mol_type = other RNA
gaggaaaacattacccaaca

SEQ ID NO: 14721 - RNA, 20 nt, synthetic construct
  source 1..20: mol_type = other RNA
ctagaattgtgtgttgggta

SEQ ID NO: 14722 - RNA, 20 nt, synthetic construct
  source 1..20: mol_type = other RNA
gtaggttctctagaattgtg

SEQ ID NO: 14723 - RNA, 20 nt, synthetic construct
  source 1..20: mol_type = other RNA
agagaacctacagaatgagc

SEQ ID NO: 14724 - RNA, 20 nt, synthetic construct
  source 1..20: mol_type = other RNA
gtttgtgtgtgtgtgtgtgt

SEQ ID NO: 14725 - RNA, 20 nt, synthetic construct
  source 1..20: mol_type = other RNA
gcgtgtgtgtgagtatgggt

SEQ ID NO: 14726 - RNA, 20 nt, synthetic construct
  source 1..20: mol_type = other RNA
aacacacacagacacgcgca

SEQ ID NO: 14727 - RNA, 20 nt, synthetic construct
  source 1..20: mol_type = other RNA
ggggtgcgcgtgtctgtgtg

SEQ ID NO: 14728 - RNA, 20 nt, synthetic construct
  source 1..20: mol_type = other RNA
tcaggggtgcgcgtgtctgt

SEQ ID NO: 14729 - RNA, 20 nt, synthetic construct
  source 1..20: mol_type = other RNA
ctgtttcttcaggggtgcgc

SEQ ID NO: 14730 - RNA, 20 nt, synthetic construct
  source 1..20: mol_type = other RNA
tacatgtctgtgaggctcgc

SEQ ID NO: 14731 - RNA, 20 nt, synthetic construct
  source 1..20: mol_type = other RNA
tattttcctacatgtctgtg

SEQ ID NO: 14732 - RNA, 20 nt, synthetic construct
  source 1..20: mol_type = other RNA
cacatgcaggaaatcttttc

SEQ ID NO: 14733 - RNA, 20 nt, synthetic construct
  source 1..20: mol_type = other RNA
tgcatgtgggaagcaagtca

SEQ ID NO: 14734 - RNA, 20 nt, synthetic construct
  source 1..20: mol_type = other RNA
aaactcccttgctctttact

SEQ ID NO: 14735 - RNA, 20 nt, synthetic construct
  source 1..20: mol_type = other RNA
attccaaactcccttgctct

SEQ ID NO: 14736 - RNA, 20 nt, synthetic construct
  source 1..20: mol_type = other RNA
ggtatttgtttctattccaa

SEQ ID NO: 14737 - RNA, 20 nt, synthetic construct
  source 1..20: mol_type = other RNA
taattgaaaagttatcagcc

SEQ ID NO: 14738 - RNA, 20 nt, synthetic construct
  source 1..20: mol_type = other RNA
tcgtaattgaaaagttatca

SEQ ID NO: 14739 - RNA, 20 nt, synthetic construct
  source 1..20: mol_type = other RNA
attacgaagaacattaaaaa

SEQ ID NO: 14740 - RNA, 20 nt, synthetic construct
  source 1..20: mol_type = other RNA
gtgattttttttaatgttct

SEQ ID NO: 14741 - RNA, 20 nt, synthetic construct
  source 1..20: mol_type = other RNA
cgattctgtgatttttttta

SEQ ID NO: 14742 - RNA, 20 nt, synthetic construct
  source 1..20: mol_type = other RNA
ctatgtgatcccttgagttt

SEQ ID NO: 14743 - RNA, 20 nt, synthetic construct
  source 1..20: mol_type = other RNA
gaaattccctatgtgatccc

SEQ ID NO: 14744 - RNA, 20 nt, synthetic construct
  source 1..20: mol_type = other RNA
gaaaaaaaacccaacctgta

SEQ ID NO: 14745 - RNA, 20 nt, synthetic construct
  source 1..20: mol_type = other RNA
aactgtgatgtacaaaagta

SEQ ID NO: 14746 - RNA, 20 nt, synthetic construct
  source 1..20: mol_type = other RNA
aaggtaacaaggcaaagata

SEQ ID NO: 14747 - RNA, 20 nt, synthetic construct
  source 1..20: mol_type = other RNA
tattatatctttgccttgtt

SEQ ID NO: 14748 - RNA, 20 nt, synthetic construct
  source 1..20: mol_type = other RNA
tcttattatatctttgcctt

SEQ ID NO: 14749 - RNA, 20 nt, synthetic construct
  source 1..20: mol_type = other RNA
cgtgacaggtttcttcttat

SEQ ID NO: 14750 - RNA, 20 nt, synthetic construct
  source 1..20: mol_type = other RNA
tccagtttctcgtgacaggt

SEQ ID NO: 14751 - RNA, 20 nt, synthetic construct
  source 1..20: mol_type = other RNA
tacaagtacactgatacaaa

SEQ ID NO: 14752 - RNA, 20 nt, synthetic construct
  source 1..20: mol_type = other RNA
gaggtgaacacattggcaat

SEQ ID NO: 14753 - RNA, 20 nt, synthetic construct
  source 1..20: mol_type = other RNA
agtgtttctgaggtgaacac

SEQ ID NO: 14754 - RNA, 20 nt, synthetic construct
  source 1..20: mol_type = other RNA
cctcagaaacactggaagcc

SEQ ID NO: 14755 - RNA, 20 nt, synthetic construct
  source 1..20: mol_type = other RNA
ctggtatctggcttccagtg

SEQ ID NO: 14756 - RNA, 20 nt, synthetic construct
  source 1..20: mol_type = other RNA
tgattatcattttaacaata

SEQ ID NO: 14757 - RNA, 20 nt, synthetic construct
  source 1..20: mol_type = other RNA
cggttgatctctttttgttc

SEQ ID NO: 14758 - RNA, 20 nt, synthetic construct
  source 1..20: mol_type = other RNA
gcattcccggttgatctctt

SEQ ID NO: 14759 - RNA, 20 nt, synthetic construct
  source 1..20: mol_type = other RNA
aggcattttattgctggatt

SEQ ID NO: 14760 - RNA, 20 nt, synthetic construct
  source 1..20: mol_type = other RNA
ttggggcagtgcacaatatg

SEQ ID NO: 14761 - RNA, 20 nt, synthetic construct
  source 1..20: mol_type = other RNA
ttctttggggcagtgcacaa

SEQ ID NO: 14762 - RNA, 20 nt, synthetic construct
  source 1..20: mol_type = other RNA
ggtttctttctttggggcag

SEQ ID NO: 14763 - RNA, 20 nt, synthetic construct
  source 1..20: mol_type = other RNA
tacagtttccggtttctttc

SEQ ID NO: 14764 - RNA, 20 nt, synthetic construct
  source 1..20: mol_type = other RNA
aattcttacagtttccggtt

SEQ ID NO: 14765 - RNA, 20 nt, synthetic construct
  source 1..20: mol_type = other RNA
ggtcacctctcttgttacat

SEQ ID NO: 14766 - RNA, 20 nt, synthetic construct
  source 1..20: mol_type = other RNA
ttcgggtcacctctcttgtt

SEQ ID NO: 14767 - RNA, 20 nt, synthetic construct
  source 1..20: mol_type = other RNA
acctaattccttcgggtcac

SEQ ID NO: 14768 - RNA, 20 nt, synthetic construct
  source 1..20: mol_type = other RNA
tctacctaattccttcgggt

SEQ ID NO: 14769 - RNA, 20 nt, synthetic construct
  source 1..20: mol_type = other RNA
tcttctacctaattccttcg

SEQ ID NO: 14770 - RNA, 20 nt, synthetic construct
  source 1..20: mol_type = other RNA
attcttcttctacctaattc

SEQ ID NO: 14771 - RNA, 20 nt, synthetic construct
  source 1..20: mol_type = other RNA
tgttcaattcttcttctacc

SEQ ID NO: 14772 - RNA, 20 nt, synthetic construct
  source 1..20: mol_type = other RNA
tttcttgttcaattcttctt

SEQ ID NO: 14773 - RNA, 20 nt, synthetic construct
  source 1..20: mol_type = other RNA
ttacgtgggctgcagaaagt

SEQ ID NO: 14774 - RNA, 20 nt, synthetic construct
  source 1..20: mol_type = other RNA
tcattacgtgggctgcagaa

SEQ ID NO: 14775 - RNA, 20 nt, synthetic construct
  source 1..20: mol_type = other RNA
gcagcccacgtaatgaagaa

SEQ ID NO: 14776 - RNA, 20 nt, synthetic construct
  source 1..20: mol_type = other RNA
tgatcaaatttctatatctt

SEQ ID NO: 14777 - RNA, 20 nt, synthetic construct
  source 1..20: mol_type = other RNA
atatctttgtaaatgagagt

SEQ ID NO: 14778 - RNA, 20 nt, synthetic construct
  source 1..20: mol_type = other RNA
agtagtcaactctcatttac

SEQ ID NO: 14779 - RNA, 20 nt, synthetic construct
  source 1..20: mol_type = other RNA
tacctctacatatgctgaag

SEQ ID NO: 14780 - RNA, 20 nt, synthetic construct
  source 1..20: mol_type = other RNA
gcatatgtagaggtaagaat

SEQ ID NO: 14781 - RNA, 20 nt, synthetic construct
  source 1..20: mol_type = other RNA
aattcttacctctacatatg

SEQ ID NO: 14782 - RNA, 20 nt, synthetic construct
  source 1..20: mol_type = other RNA
tgatttatgctaccatttca

SEQ ID NO: 14783 - RNA, 20 nt, synthetic construct
  source 1..20: mol_type = other RNA
aattaatcccttcgtgattt

SEQ ID NO: 14784 - RNA, 20 nt, synthetic construct
  source 1..20: mol_type = other RNA
aagtgtaccgttgtaagttt

SEQ ID NO: 14785 - RNA, 20 nt, synthetic construct
  source 1..20: mol_type = other RNA
ttacctcatgcacgatggtg

SEQ ID NO: 14786 - RNA, 20 nt, synthetic construct
  source 1..20: mol_type = other RNA
aacccgcacagtaccctttt

SEQ ID NO: 14787 - RNA, 20 nt, synthetic construct
  source 1..20: mol_type = other RNA
aagggatattgcaaatccta

SEQ ID NO: 14788 - RNA, 20 nt, synthetic construct
  source 1..20: mol_type = other RNA
aacctttgtgattgctctag

SEQ ID NO: 14789 - RNA, 20 nt, synthetic construct
  source 1..20: mol_type = other RNA
tattataccaaaaacctcag

SEQ ID NO: 14790 - RNA, 20 nt, synthetic construct
  source 1..20: mol_type = other RNA
ctcttttgaatgcatggact

SEQ ID NO: 14791 - RNA, 20 nt, synthetic construct
  source 1..20: mol_type = other RNA
ttggcttccctcttttgaat

SEQ ID NO: 14792 - RNA, 20 nt, synthetic construct
  source 1..20: mol_type = other RNA
tccttggcttccctcttttg

SEQ ID NO: 14793 - RNA, 20 nt, synthetic construct
  source 1..20: mol_type = other RNA
aaagagggaagccaaggaag

SEQ ID NO: 14794 - RNA, 20 nt, synthetic construct
  source 1..20: mol_type = other RNA
agttcttccttggcttccct

SEQ ID NO: 14795 - RNA, 20 nt, synthetic construct
  source 1..20: mol_type = other RNA
agagctcaggctcttataca

SEQ ID NO: 14796 - RNA, 20 nt, synthetic construct
  source 1..20: mol_type = other RNA
atgagcaactggatgtataa

SEQ ID NO: 14797 - RNA, 20 nt, synthetic construct
  source 1..20: mol_type = other RNA
aggaagctggttcaatgagc

SEQ ID NO: 14798 - RNA, 20 nt, synthetic construct
  source 1..20: mol_type = other RNA
tggaatggagggtctggggt

SEQ ID NO: 14799 - RNA, 20 nt, synthetic construct
  source 1..20: mol_type = other RNA
aacactgtctctctagagac

SEQ ID NO: 14800 - RNA, 20 nt, synthetic construct
  source 1..20: mol_type = other RNA
cattttctcaggcagccaga

SEQ ID NO: 14801 - RNA, 20 nt, synthetic construct
  source 1..20: mol_type = other RNA
tgacctctggctgcctgaga

SEQ ID NO: 14802 - RNA, 20 nt, synthetic construct
  source 1..20: mol_type = other RNA
caggcagccagaggtcatga

SEQ ID NO: 14803 - RNA, 20 nt, synthetic construct
  source 1..20: mol_type = other RNA
ttatgcctcccaagaacgtt

SEQ ID NO: 14804 - RNA, 20 nt, synthetic construct
  source 1..20: mol_type = other RNA
ctcttccttatgcctcccaa

SEQ ID NO: 14805 - RNA, 20 nt, synthetic construct
  source 1..20: mol_type = other RNA
tgggaggcataaggaagagc

SEQ ID NO: 14806 - RNA, 20 nt, synthetic construct
  source 1..20: mol_type = other RNA
agatccccgcagcccaaact

SEQ ID NO: 14807 - RNA, 20 nt, synthetic construct
  source 1..20: mol_type = other RNA
ctgctgctccgtagctgtcc

SEQ ID NO: 14808 - RNA, 20 nt, synthetic construct
  source 1..20: mol_type = other RNA
gatctcttagtccaccctgc

SEQ ID NO: 14809 - RNA, 20 nt, synthetic construct
  source 1..20: mol_type = other RNA
tttatgccatgggtcccact

SEQ ID NO: 14810 - RNA, 20 nt, synthetic construct
  source 1..20: mol_type = other RNA
ttcaactcatccccctttcc

SEQ ID NO: 14811 - RNA, 20 nt, synthetic construct
  source 1..20: mol_type = other RNA
actcatccccctttccctca

SEQ ID NO: 14812 - RNA, 20 nt, synthetic construct
  source 1..20: mol_type = other RNA
ctcagtcccggagtagctgc

SEQ ID NO: 14813 - RNA, 20 nt, synthetic construct
  source 1..20: mol_type = other RNA
ctcctgctctcagtctaccc

SEQ ID NO: 14814 - RNA, 20 nt, synthetic construct
  source 1..20: mol_type = other RNA
taggcaggtccttctctcct

SEQ ID NO: 14815 - RNA, 20 nt, synthetic construct
  source 1..20: mol_type = other RNA
agagatactgcatcctgcct

SEQ ID NO: 14816 - RNA, 20 nt, synthetic construct
  source 1..20: mol_type = other RNA
caaagctgccctggaaaact

SEQ ID NO: 14817 - RNA, 20 nt, synthetic construct
  source 1..20: mol_type = other RNA
agggcagctttgagaagtct

SEQ ID NO: 14818 - RNA, 20 nt, synthetic construct
  source 1..20: mol_type = other RNA
ccaagacttctcaaagctgc

SEQ ID NO: 14819 - RNA, 20 nt, synthetic construct
  source 1..20: mol_type = other RNA
cacagaaaagcattgtgcaa

SEQ ID NO: 14820 - RNA, 20 nt, synthetic construct
  source 1..20: mol_type = other RNA
gtgggaaaggtagagccttt

SEQ ID NO: 14821 - RNA, 20 nt, synthetic construct
  source 1..20: mol_type = other RNA
ctacgtattgagtacataga

SEQ ID NO: 14822 - RNA, 20 nt, synthetic construct
  source 1..20: mol_type = other RNA
aggtcaaccctcacactcta

SEQ ID NO: 14823 - RNA, 20 nt, synthetic construct
  source 1..20: mol_type = other RNA
gaaaacacacgtcatccagg

SEQ ID NO: 14824 - RNA, 20 nt, synthetic construct
  source 1..20: mol_type = other RNA
tcagaaaacacacgtcatcc

SEQ ID NO: 14825 - RNA, 20 nt, synthetic construct
  source 1..20: mol_type = other RNA
gaagaactacatgttcgttg

SEQ ID NO: 14826 - RNA, 20 nt, synthetic construct
  source 1..20: mol_type = other RNA
aatgtgggagttgcaacgaa

SEQ ID NO: 14827 - RNA, 20 nt, synthetic construct
  source 1..20: mol_type = other RNA
ttgcaactcccacattagaa

SEQ ID NO: 14828 - RNA, 20 nt, synthetic construct
  source 1..20: mol_type = other RNA
tattctaatgtgggagttgc

SEQ ID NO: 14829 - RNA, 20 nt, synthetic construct
  source 1..20: mol_type = other RNA
catgcaaatgcatctgtatc

SEQ ID NO: 14830 - RNA, 20 nt, synthetic construct
  source 1..20: mol_type = other RNA
agagagatggattgggtagg

SEQ ID NO: 14831 - RNA, 20 nt, synthetic construct
  source 1..20: mol_type = other RNA
gcctcctacccaatccatct

SEQ ID NO: 14832 - RNA, 20 nt, synthetic construct
  source 1..20: mol_type = other RNA
ccttctgcctcctacccaat

SEQ ID NO: 14833 - RNA, 20 nt, synthetic construct
  source 1..20: mol_type = other RNA
gccacgtgtgtgtgttatct

SEQ ID NO: 14834 - RNA, 20 nt, synthetic construct
  source 1..20: mol_type = other RNA
tagaaacactgagataacac

SEQ ID NO: 14835 - RNA, 20 nt, synthetic construct
  source 1..20: mol_type = other RNA
aagaagcgtttgctacttta

SEQ ID NO: 14836 - RNA, 20 nt, synthetic construct
  source 1..20: mol_type = other RNA
cattaaaagtaccatatgat

SEQ ID NO: 14837 - RNA, 20 nt, synthetic construct
  source 1..20: mol_type = other RNA
aatattcccattaaaagtac

SEQ ID NO: 14838 - RNA, 20 nt, synthetic construct
  source 1..20: mol_type = other RNA
aaaacgatacacgtcacaag

SEQ ID NO: 14839 - RNA, 20 nt, synthetic construct
  source 1..20: mol_type = other RNA
tgatcaagccactggaaatt

SEQ ID NO: 14840 - RNA, 20 nt, synthetic construct
  source 1..20: mol_type = other RNA
agtggcttgatcatgaacta

SEQ ID NO: 14841 - RNA, 20 nt, synthetic construct
  source 1..20: mol_type = other RNA
tgcagtagttcatgatcaag

SEQ ID NO: 14842 - RNA, 20 nt, synthetic construct
  source 1..20: mol_type = other RNA
gcgtctgagcattgcgtcag

SEQ ID NO: 14843 - RNA, 20 nt, synthetic construct
  source 1..20: mol_type = other RNA
gaaggagcctctaggcttgg

SEQ ID NO: 14844 - RNA, 20 nt, synthetic construct
  source 1..20: mol_type = other RNA
aagcctagaggctccttccg

SEQ ID NO: 14845 - RNA, 20 nt, synthetic construct
  source 1..20: mol_type = other RNA
gaacaaggtaaggagtctgt

SEQ ID NO: 14846 - RNA, 20 nt, synthetic construct
  source 1..20: mol_type = other RNA
tcccagcatcgaagcgtgta

SEQ ID NO: 14847 - RNA, 20 nt, synthetic construct
  source 1..20: mol_type = other RNA
atggcttttcatcccagcat

SEQ ID NO: 14848 - RNA, 20 nt, synthetic construct
  source 1..20: mol_type = other RNA
atgctgggatgaaaagccat

SEQ ID NO: 14849 - RNA, 20 nt, synthetic construct
  source 1..20: mol_type = other RNA
cactgatgcagccgccttca

SEQ ID NO: 14850 - RNA, 20 nt, synthetic construct
  source 1..20: mol_type = other RNA
atggtaaacggatgctcgag

SEQ ID NO: 14851 - RNA, 20 nt, synthetic construct
  source 1..20: mol_type = other RNA
caactcacctccttctaaaa

SEQ ID NO: 14852 - RNA, 20 nt, synthetic construct
  source 1..20: mol_type = other RNA
aaaatgggctatctcagtgt

SEQ ID NO: 14853 - RNA, 20 nt, synthetic construct
  source 1..20: mol_type = other RNA
ttctgtcgcagtaagctttt

SEQ ID NO: 14854 - RNA, 20 nt, synthetic construct
  source 1..20: mol_type = other RNA
gtcgcagtaagcttttctgg

SEQ ID NO: 14855 - RNA, 20 nt, synthetic construct
  source 1..20: mol_type = other RNA
ggggatttcttcaagtagcc

SEQ ID NO: 14856 - RNA, 20 nt, synthetic construct
  source 1..20: mol_type = other RNA
tcaagtagccagcagtcagt

SEQ ID NO: 14857 - RNA, 20 nt, synthetic construct
  source 1..20: mol_type = other RNA
agtagccagcagtcagtgca

SEQ ID NO: 14858 - RNA, 20 nt, synthetic construct
  source 1..20: mol_type = other RNA
gcattgcagatttcaaaaaa

SEQ ID NO: 14859 - RNA, 20 nt, synthetic construct
  source 1..20: mol_type = other RNA
aaaaatgtggctctggagcc

SEQ ID NO: 14860 - RNA, 20 nt, synthetic construct
  source 1..20: mol_type = other RNA
cgaggatgacaggctccaga

SEQ ID NO: 14861 - RNA, 20 nt, synthetic construct
  source 1..20: mol_type = other RNA
atatggtcctgggtctatgg

SEQ ID NO: 14862 - RNA, 20 nt, synthetic construct
  source 1..20: mol_type = other RNA
aagcctaggactgaagagcc

SEQ ID NO: 14863 - RNA, 20 nt, synthetic construct
  source 1..20: mol_type = other RNA
gtcctaggctttgaagggag

SEQ ID NO: 14864 - RNA, 20 nt, synthetic construct
  source 1..20: mol_type = other RNA
cagtgttcttaaacctcttt

SEQ ID NO: 14865 - RNA, 20 nt, synthetic construct
  source 1..20: mol_type = other RNA
taaacctctttctgatggca

SEQ ID NO: 14866 - RNA, 20 nt, synthetic construct
  source 1..20: mol_type = other RNA
gatggcacttgtacctgtga

SEQ ID NO: 14867 - RNA, 20 nt, synthetic construct
  source 1..20: mol_type = other RNA
ctctagacccctcacaggta

SEQ ID NO: 14868 - RNA, 20 nt, synthetic construct
  source 1..20: mol_type = other RNA
cctttactgcaattcaggat

SEQ ID NO: 14869 - RNA, 20 nt, synthetic construct
  source 1..20: mol_type = other RNA
catgccctgcatcctgaatt

SEQ ID NO: 14870 - RNA, 20 nt, synthetic construct
  source 1..20: mol_type = other RNA
ggatgcagggcatgagaaga

SEQ ID NO: 14871 - RNA, 20 nt, synthetic construct
  source 1..20: mol_type = other RNA
cttggaggagggagggaatc

SEQ ID NO: 14872 - RNA, 20 nt, synthetic construct
  source 1..20: mol_type = other RNA
tcccttggaggagggaggga

SEQ ID NO: 14873 - RNA, 20 nt, synthetic construct
  source 1..20: mol_type = other RNA
ctccctcctccaagggaaga

SEQ ID NO: 14874 - RNA, 20 nt, synthetic construct
  source 1..20: mol_type = other RNA
caaggatgtgtgcacgccaa

SEQ ID NO: 14875 - RNA, 20 nt, synthetic construct
  source 1..20: mol_type = other RNA
gtcagatatataggatcgtt

SEQ ID NO: 14876 - RNA, 20 nt, synthetic construct
  source 1..20: mol_type = other RNA
aggccatggggcagaaaacg

SEQ ID NO: 14877 - RNA, 20 nt, synthetic construct
  source 1..20: mol_type = other RNA
gccccatggcctggaagcca

SEQ ID NO: 14878 - RNA, 20 nt, synthetic construct
  source 1..20: mol_type = other RNA
ctagatcgttgatcatgaaa

SEQ ID NO: 14879 - RNA, 20 nt, synthetic construct
  source 1..20: mol_type = other RNA
tgatcaacgatctagggaaa

SEQ ID NO: 14880 - RNA, 20 nt, synthetic construct
  source 1..20: mol_type = other RNA
atgtctttcccctcctctgc

SEQ ID NO: 14881 - RNA, 20 nt, synthetic construct
  source 1..20: mol_type = other RNA
cctcctctgccctcgacagc

SEQ ID NO: 14882 - RNA, 20 nt, synthetic construct
  source 1..20: mol_type = other RNA
tacaaagggcactgcatttg

SEQ ID NO: 14883 - RNA, 20 nt, synthetic construct
  source 1..20: mol_type = other RNA
atgaaactctactgaatgtt

SEQ ID NO: 14884 - RNA, 20 nt, synthetic construct
  source 1..20: mol_type = other RNA
gtagagtttcatagaaaggt

SEQ ID NO: 14885 - RNA, 20 nt, synthetic construct
  source 1..20: mol_type = other RNA
tagaaaggtgctacttcgtg

SEQ ID NO: 14886 - RNA, 20 nt, synthetic construct
  source 1..20: mol_type = other RNA
cactgcaaagtgcgctcacg

SEQ ID NO: 14887 - RNA, 20 nt, synthetic construct
  source 1..20: mol_type = other RNA
tgagcgcactttgcagtgag

SEQ ID NO: 14888 - RNA, 20 nt, synthetic construct
  source 1..20: mol_type = other RNA
gttctgtttttctaaggatt

SEQ ID NO: 14889 - RNA, 20 nt, synthetic construct
  source 1..20: mol_type = other RNA
cctgaaatccttagaaaaac

SEQ ID NO: 14890 - RNA, 20 nt, synthetic construct
  source 1..20: mol_type = other RNA
gtttttctaaggatttcagg

SEQ ID NO: 14891 - RNA, 20 nt, synthetic construct
  source 1..20: mol_type = other RNA
aaggatttcaggtgaaatat

SEQ ID NO: 14892 - RNA, 20 nt, synthetic construct
  source 1..20: mol_type = other RNA
aggaaatatttcacctgaaa

SEQ ID NO: 14893 - RNA, 20 nt, synthetic construct
  source 1..20: mol_type = other RNA
ggtgaaatatttcctagaac

SEQ ID NO: 14894 - RNA, 20 nt, synthetic construct
  source 1..20: mol_type = other RNA
tagaacttactacagttcta

SEQ ID NO: 14895 - RNA, 20 nt, synthetic construct
  source 1..20: mol_type = other RNA
taccaatctagaactgtagt

SEQ ID NO: 14896 - RNA, 20 nt, synthetic construct
  source 1..20: mol_type = other RNA
agattggtaggaatctgtag

SEQ ID NO: 14897 - RNA, 20 nt, synthetic construct
  source 1..20: mol_type = other RNA
cccatccatctgcctacagg

SEQ ID NO: 14898 - RNA, 20 nt, synthetic construct
  source 1..20: mol_type = other RNA
cttacctgtaggcagatgga

SEQ ID NO: 14899 - RNA, 20 nt, synthetic construct
  source 1..20: mol_type = other RNA
taattctcatagactccttt

SEQ ID NO: 14900 - RNA, 20 nt, synthetic construct
  source 1..20: mol_type = other RNA
catagactcctttctggttg

SEQ ID NO: 14901 - RNA, 20 nt, synthetic construct
  source 1..20: mol_type = other RNA
ggttgtgtcataaatggctt

SEQ ID NO: 14902 - RNA, 20 nt, synthetic construct
  source 1..20: mol_type = other RNA
catatttcgttattctcaga

SEQ ID NO: 14903 - RNA, 20 nt, synthetic construct
  source 1..20: mol_type = other RNA
ttattctcagagatactcag

SEQ ID NO: 14904 - RNA, 20 nt, synthetic construct
  source 1..20: mol_type = other RNA
cagagatactcagtttattt

SEQ ID NO: 14905 - RNA, 20 nt, synthetic construct
  source 1..20: mol_type = other RNA
tgtgttttcatttcagcacc

SEQ ID NO: 14906 - RNA, 20 nt, synthetic construct
  source 1..20: mol_type = other RNA
tttcagcaccgactgagcag

SEQ ID NO: 14907 - RNA, 20 nt, synthetic construct
  source 1..20: mol_type = other RNA
gcaccgactgagcagaggcc

SEQ ID NO: 14908 - RNA, 20 nt, synthetic construct
  source 1..20: mol_type = other RNA
agtgacagtggtggagtatg

SEQ ID NO: 14909 - RNA, 20 nt, synthetic construct
  source 1..20: mol_type = other RNA
tccagtgacagtggtggagt

SEQ ID NO: 14910 - RNA, 20 nt, synthetic construct
  source 1..20: mol_type = other RNA
ggggtccgactatgcgagtg

SEQ ID NO: 14911 - RNA, 20 nt, synthetic construct
  source 1..20: mol_type = other RNA
cttatggtaaagaacaaaga

SEQ ID NO: 14912 - RNA, 20 nt, synthetic construct
  source 1..20: mol_type = other RNA
tctcttatggtaaagaacaa

SEQ ID NO: 14913 - RNA, 20 nt, synthetic construct
  source 1..20: mol_type = other RNA
ttaccataagagaagaaagg

SEQ ID NO: 14914 - RNA, 20 nt, synthetic construct
  source 1..20: mol_type = other RNA
cttggccctttcttctctta

SEQ ID NO: 14915 - RNA, 20 nt, synthetic construct
  source 1..20: mol_type = other RNA
gttacaagagatgtgtctca

SEQ ID NO: 14916 - RNA, 20 nt, synthetic construct
  source 1..20: mol_type = other RNA
gagaactcagcttgagacac

SEQ ID NO: 14917 - RNA, 20 nt, synthetic construct
  source 1..20: mol_type = other RNA
ccgaactcaacttgtgacag

SEQ ID NO: 14918 - RNA, 20 nt, synthetic construct
  source 1..20: mol_type = other RNA
ctcagacccttagctccaag

SEQ ID NO: 14919 - RNA, 20 nt, synthetic construct
  source 1..20: mol_type = other RNA
cttctctcagacccttagct

SEQ ID NO: 14920 - RNA, 20 nt, synthetic construct
  source 1..20: mol_type = other RNA
gctcaatagaactaggagga

SEQ ID NO: 14921 - RNA, 20 nt, synthetic construct
  source 1..20: mol_type = other RNA
tcctagttctattgagcaga

SEQ ID NO: 14922 - RNA, 20 nt, synthetic construct
  source 1..20: mol_type = other RNA
cttctgctcaatagaactag

SEQ ID NO: 14923 - RNA, 20 nt, synthetic construct
  source 1..20: mol_type = other RNA
attgagcagaagggaaatct

SEQ ID NO: 14924 - RNA, 20 nt, synthetic construct
  source 1..20: mol_type = other RNA
taatgtgatctcctcacctc

SEQ ID NO: 14925 - RNA, 20 nt, synthetic construct
  source 1..20: mol_type = other RNA
tcataatgtgatctcctcac

SEQ ID NO: 14926 - RNA, 20 nt, synthetic construct
  source 1..20: mol_type = other RNA
gactttcttcataatgtgat

SEQ ID NO: 14927 - RNA, 20 nt, synthetic construct
  source 1..20: mol_type = other RNA
acaacaccaactaaacgtca

SEQ ID NO: 14928 - RNA, 20 nt, synthetic construct
  source 1..20: mol_type = other RNA
aactggaaagtctccattga

SEQ ID NO: 14929 - RNA, 20 nt, synthetic construct
  source 1..20: mol_type = other RNA
agttggaattccgttattct

SEQ ID NO: 14930 - RNA, 20 nt, synthetic construct
  source 1..20: mol_type = other RNA
gttattctggcttccacttc

SEQ ID NO: 14931 - RNA, 20 nt, synthetic construct
  source 1..20: mol_type = other RNA
ggaagtggaagccagaataa

SEQ ID NO: 14932 - RNA, 20 nt, synthetic construct
  source 1..20: mol_type = other RNA
cttcaggaagtggaagccag

SEQ ID NO: 14933 - RNA, 20 nt, synthetic construct
  source 1..20: mol_type = other RNA
ggcttccacttcctgaaggg

SEQ ID NO: 14934 - RNA, 20 nt, synthetic construct
  source 1..20: mol_type = other RNA
acttcctgaagggaaggttg

SEQ ID NO: 14935 - RNA, 20 nt, synthetic construct
  source 1..20: mol_type = other RNA
tgaagggaaggttgcgtttg

SEQ ID NO: 14936 - RNA, 20 nt, synthetic construct
  source 1..20: mol_type = other RNA
tcttgaacccagagagaaaa

SEQ ID NO: 14937 - RNA, 20 nt, synthetic construct
  source 1..20: mol_type = other RNA
ttcctcttgaacccagagag

SEQ ID NO: 14938 - RNA, 20 nt, synthetic construct
  source 1..20: mol_type = other RNA
ctctgggttcaagaggaaag

SEQ ID NO: 14939 - RNA, 20 nt, synthetic construct
  source 1..20: mol_type = other RNA
agaggaaagaataggtgctt

SEQ ID NO: 14940 - RNA, 20 nt, synthetic construct
  source 1..20: mol_type = other RNA
cctgtccataaataagcacc

SEQ ID NO: 14941 - RNA, 20 nt, synthetic construct
  source 1..20: mol_type = other RNA
atatctacgtatattccgat

SEQ ID NO: 14942 - RNA, 20 nt, synthetic construct
  source 1..20: mol_type = other RNA
gacaatcggaatatacgtag

SEQ ID NO: 14943 - RNA, 20 nt, synthetic construct
  source 1..20: mol_type = other RNA
gattgtcagaaaaacactcg

SEQ ID NO: 14944 - RNA, 20 nt, synthetic construct
  source 1..20: mol_type = other RNA
ggccactggtacttaggaac

SEQ ID NO: 14945 - RNA, 20 nt, synthetic construct
  source 1..20: mol_type = other RNA
taagtaccagtggcctgaag

SEQ ID NO: 14946 - RNA, 20 nt, synthetic construct
  source 1..20: mol_type = other RNA
cttgctgggaacctgtatcc

SEQ ID NO: 14947 - RNA, 20 nt, synthetic construct
  source 1..20: mol_type = other RNA
ttggatcttctcttgctggg

SEQ ID NO: 14948 - RNA, 20 nt, synthetic construct
  source 1..20: mol_type = other RNA
cagcaagagaagatccaagg

SEQ ID NO: 14949 - RNA, 20 nt, synthetic construct
  source 1..20: mol_type = other RNA
ttccttggatcttctcttgc

SEQ ID NO: 14950 - RNA, 20 nt, synthetic construct
  source 1..20: mol_type = other RNA
gcatccctctctgtgctggc

SEQ ID NO: 14951 - RNA, 20 nt, synthetic construct
  source 1..20: mol_type = other RNA
ctccatccacccatcccttt

SEQ ID NO: 14952 - RNA, 20 nt, synthetic construct
  source 1..20: mol_type = other RNA
atgtctctggtagtcgcttg

SEQ ID NO: 14953 - RNA, 20 nt, synthetic construct
  source 1..20: mol_type = other RNA
acatgtgggacaacagatgg

SEQ ID NO: 14954 - RNA, 20 nt, synthetic construct
  source 1..20: mol_type = other RNA
ctaggtcctctaccatctgt

SEQ ID NO: 14955 - RNA, 20 nt, synthetic construct
  source 1..20: mol_type = other RNA
tcctggatacccttcctgca

SEQ ID NO: 14956 - RNA, 20 nt, synthetic construct
  source 1..20: mol_type = other RNA
gtgcaggaagggtatccagg

SEQ ID NO: 14957 - RNA, 20 nt, synthetic construct
  source 1..20: mol_type = other RNA
tggatacccttcctgcactg

SEQ ID NO: 14958 - RNA, 20 nt, synthetic construct
  source 1..20: mol_type = other RNA
tgcactgaatagcaaggaga

SEQ ID NO: 14959 - RNA, 20 nt, synthetic construct
  source 1..20: mol_type = other RNA
gcaagatggctacagtctgc

SEQ ID NO: 14960 - RNA, 20 nt, synthetic construct
  source 1..20: mol_type = other RNA
gctaccacagtcatcccaaa

SEQ ID NO: 14961 - RNA, 20 nt, synthetic construct
  source 1..20: mol_type = other RNA
agcagacctagaaaaatttc

SEQ ID NO: 14962 - RNA, 20 nt, synthetic construct
  source 1..20: mol_type = other RNA
tatttctagcagacctagaa

SEQ ID NO: 14963 - RNA, 20 nt, synthetic construct
  source 1..20: mol_type = other RNA
aggtctgctagaaataagaa

SEQ ID NO: 14964 - RNA, 20 nt, synthetic construct
  source 1..20: mol_type = other RNA
tccacaaaccagttcttatt

SEQ ID NO: 14965 - RNA, 20 nt, synthetic construct
  source 1..20: mol_type = other RNA
atgcgtatttgtagagctct

SEQ ID NO: 14966 - RNA, 20 nt, synthetic construct
  source 1..20: mol_type = other RNA
tgtgcacaggcagcgtcatg

SEQ ID NO: 14967 - RNA, 20 nt, synthetic construct
  source 1..20: mol_type = other RNA
cgtggaaccatttcctgtgc

SEQ ID NO: 14968 - RNA, 20 nt, synthetic construct
  source 1..20: mol_type = other RNA
ttgccacactttctcgtgga

SEQ ID NO: 14969 - RNA, 20 nt, synthetic construct
  source 1..20: mol_type = other RNA
acgagaaagtgtggcaaaga

SEQ ID NO: 14970 - RNA, 20 nt, synthetic construct
  source 1..20: mol_type = other RNA
cagtaaatgttctttgccac

SEQ ID NO: 14971 - RNA, 20 nt, synthetic construct
  source 1..20: mol_type = other RNA
tgtgctcttgtacttgctgt

SEQ ID NO: 14972 - RNA, 20 nt, synthetic construct
  source 1..20: mol_type = other RNA
ttattgagcttcctgtgctc

SEQ ID NO: 14973 - RNA, 20 nt, synthetic construct
  source 1..20: mol_type = other RNA
tcccagctagaccagagagt

SEQ ID NO: 14974 - RNA, 20 nt, synthetic construct
  source 1..20: mol_type = other RNA
cagctagaccagagagtcct

SEQ ID NO: 14975 - RNA, 20 nt, synthetic construct
  source 1..20: mol_type = other RNA
ggggtctccactgaattggc

SEQ ID NO: 14976 - RNA, 20 nt, synthetic construct
  source 1..20: mol_type = other RNA
gtggagaccccagaacagcc

SEQ ID NO: 14977 - RNA, 20 nt, synthetic construct
  source 1..20: mol_type = other RNA
agtaatatactaagtgtacc

SEQ ID NO: 14978 - RNA, 20 nt, synthetic construct
  source 1..20: mol_type = other RNA
agctgtgcaaggggttgtct

SEQ ID NO: 14979 - RNA, 20 nt, synthetic construct
  source 1..20: mol_type = other RNA
ttgattggaaaccgatttga

SEQ ID NO: 14980 - RNA, 20 nt, synthetic construct
  source 1..20: mol_type = other RNA
aatcaatgaagtgcctgtgg

SEQ ID NO: 14981 - RNA, 20 nt, synthetic construct
  source 1..20: mol_type = other RNA
tcccacaggcacttcattga

SEQ ID NO: 14982 - RNA, 20 nt, synthetic construct
  source 1..20: mol_type = other RNA
aaagagagttgagatttcct

SEQ ID NO: 14983 - RNA, 20 nt, synthetic construct
  source 1..20: mol_type = other RNA
acatgtagtcagattttaaa

SEQ ID NO: 14984 - RNA, 20 nt, synthetic construct
  source 1..20: mol_type = other RNA
tggtcatgggtcacacgaaa

SEQ ID NO: 14985 - RNA, 20 nt, synthetic construct
  source 1..20: mol_type = other RNA
tgtgacccatgaccaggaaa

SEQ ID NO: 14986 - RNA, 20 nt, synthetic construct
  source 1..20: mol_type = other RNA
tgagcctgtttgtattaccc

SEQ ID NO: 14987 - RNA, 20 nt, synthetic construct
  source 1..20: mol_type = other RNA
ctcattcctgagcctgtttg

SEQ ID NO: 14988 - RNA, 20 nt, synthetic construct
  source 1..20: mol_type = other RNA
aatcatttctctcattcctg

SEQ ID NO: 14989 - RNA, 20 nt, synthetic construct
  source 1..20: mol_type = other RNA
cgcaattctaatcatttctc

SEQ ID NO: 14990 - RNA, 20 nt, synthetic construct
  source 1..20: mol_type = other RNA
aatatttaaaaaaacaacat

SEQ ID NO: 14991 - RNA, 20 nt, synthetic construct
  source 1..20: mol_type = other RNA
tgcatgttgtttttttaaat

SEQ ID NO: 14992 - RNA, 20 nt, synthetic construct
  source 1..20: mol_type = other RNA
cttgatatgatatctgcttt

SEQ ID NO: 14993 - RNA, 20 nt, synthetic construct
  source 1..20: mol_type = other RNA
gtactgttaatttctcttga

SEQ ID NO: 14994 - RNA, 20 nt, synthetic construct
  source 1..20: mol_type = other RNA
attaagacatacttttttta

SEQ ID NO: 14995 - RNA, 20 nt, synthetic construct
  source 1..20: mol_type = other RNA
tctgaaacgtctaatttgat

SEQ ID NO: 14996 - RNA, 20 nt, synthetic construct
  source 1..20: mol_type = other RNA
gaggaaaacattacccaaca

SEQ ID NO: 14997 - RNA, 20 nt, synthetic construct
  source 1..20: mol_type = other RNA
ctagaattgtgtgttgggta

SEQ ID NO: 14998 - RNA, 20 nt, synthetic construct
  source 1..20: mol_type = other RNA
gtaggttctctagaattgtg

SEQ ID NO: 14999 - RNA, 20 nt, synthetic construct
  source 1..20: mol_type = other RNA
agagaacctacagaatgagc

SEQ ID NO: 15000 - RNA, 20 nt, synthetic construct
  source 1..20: mol_type = other RNA
gtgtgtgtgtgtgtgtgtgt

SEQ ID NO: 15001 - RNA, 20 nt, synthetic construct
  source 1..20: mol_type = other RNA
gcgtgtgtgtgagtatgggt

SEQ ID NO: 15002 - RNA, 20 nt, synthetic construct
  source 1..20: mol_type = other RNA
aacacacacagacacgcgca

SEQ ID NO: 15003 - RNA, 20 nt, synthetic construct
  source 1..20: mol_type = other RNA
ggggtgcgcgtgtctgtgtg

SEQ ID NO: 15004 - RNA, 20 nt, synthetic construct
  source 1..20: mol_type = other RNA
tcaggggtgcgcgtgtctgt

SEQ ID NO: 15005 - RNA, 20 nt, synthetic construct
  source 1..20: mol_type = other RNA
ctgtttcttcaggggtgcgc

SEQ ID NO: 15006 - RNA, 20 nt, synthetic construct
  source 1..20: mol_type = other RNA
tacatgtctgtgaggctcgc

SEQ ID NO: 15007 - RNA, 20 nt, synthetic construct
  source 1..20: mol_type = other RNA
tattttcctacatgtctgtg

SEQ ID NO: 15008 - RNA, 20 nt, synthetic construct
  source 1..20: mol_type = other RNA
cacatgcaggaaatcttttc

SEQ ID NO: 15009 - RNA, 20 nt, synthetic construct
  source 1..20: mol_type = other RNA
tgcatgtgggaagcaagtca

SEQ ID NO: 15010 - RNA, 20 nt, synthetic construct
  source 1..20: mol_type = other RNA
aaactcccttgctctttact

SEQ ID NO: 15011 - RNA, 20 nt, synthetic construct
  source 1..20: mol_type = other RNA
attccaaactcccttgctct

SEQ ID NO: 15012 - RNA, 20 nt, synthetic construct
  source 1..20: mol_type = other RNA
ggtatttgtttctattccaa

SEQ ID NO: 15013 - RNA, 20 nt, synthetic construct
  source 1..20: mol_type = other RNA
taattgaaaagttatcagcc

SEQ ID NO: 15014 - RNA, 20 nt, synthetic construct
  source 1..20: mol_type = other RNA
tcgtaattgaaaagttatca

SEQ ID NO: 15015 - RNA, 20 nt, synthetic construct
  source 1..20: mol_type = other RNA
attacgaagaacattaaaaa

SEQ ID NO: 15016 - RNA, 20 nt, synthetic construct
  source 1..20: mol_type = other RNA
gtgattttttttaatgttct

SEQ ID NO: 15017 - RNA, 20 nt, synthetic construct
  source 1..20: mol_type = other RNA
cgattctgtgatttttttta

SEQ ID NO: 15018 - RNA, 20 nt, synthetic construct
  source 1..20: mol_type = other RNA
ctatatgatcccttgagttt

SEQ ID NO: 15019 - RNA, 20 nt, synthetic construct
  source 1..20: mol_type = other RNA
gaaattccctatatgatccc

SEQ ID NO: 15020 - RNA, 20 nt, synthetic construct
  source 1..20: mol_type = other RNA
gaaaaaaaacccaacctgta

SEQ ID NO: 15021 - RNA, 20 nt, synthetic construct
  source 1..20: mol_type = other RNA
aactgtgatgtacaaaagta

SEQ ID NO: 15022 - RNA, 20 nt, synthetic construct
  source 1..20: mol_type = other RNA
aaggtaacaaggcaaagata

SEQ ID NO: 15023 - RNA, 20 nt, synthetic construct
  source 1..20: mol_type = other RNA
tattatatctttgccttgtt

SEQ ID NO: 15024 - RNA, 20 nt, synthetic construct
  source 1..20: mol_type = other RNA
tcttattatatctttgcctt

SEQ ID NO: 15025 - RNA, 20 nt, synthetic construct
  source 1..20: mol_type = other RNA
cgtgacaggtttcttcttat

SEQ ID NO: 15026 - RNA, 20 nt, synthetic construct
  source 1..20: mol_type = other RNA
tccagtttctcgtgacaggt

SEQ ID NO: 15027 - RNA, 20 nt, synthetic construct
  source 1..20: mol_type = other RNA
tacaagtacactgatacaaa

SEQ ID NO: 15028 - RNA, 20 nt, synthetic construct
  source 1..20: mol_type = other RNA
gaggtgaacacattggcaat

SEQ ID NO: 15029 - RNA, 20 nt, synthetic construct
  source 1..20: mol_type = other RNA
agtgtttctgaggtgaacac

SEQ ID NO: 15030 - RNA, 20 nt, synthetic construct
  source 1..20: mol_type = other RNA
cctcagaaacactggaagcc

SEQ ID NO: 15031 - RNA, 20 nt, synthetic construct
  source 1..20: mol_type = other RNA
ctggtatctggcttccagtg

SEQ ID NO: 15032 - RNA, 20 nt, synthetic construct
  source 1..20: mol_type = other RNA
tgattatcattttaacaata

SEQ ID NO: 15033 - RNA, 20 nt, synthetic construct
  source 1..20: mol_type = other RNA
cggttgatctctttttgttc

SEQ ID NO: 15034 - RNA, 20 nt, synthetic construct
  source 1..20: mol_type = other RNA
gcattcccggttgatctctt

SEQ ID NO: 15035 - RNA, 20 nt, synthetic construct
  source 1..20: mol_type = other RNA
aggcattttattgctggatt

SEQ ID NO: 15036 - RNA, 20 nt, synthetic construct
  source 1..20: mol_type = other RNA
ttggggcagtgcacaatatg

SEQ ID NO: 15037 - RNA, 20 nt, synthetic construct
  source 1..20: mol_type = other RNA
ttctttggggcagtgcacaa

SEQ ID NO: 15038 - RNA, 20 nt, synthetic construct
  source 1..20: mol_type = other RNA
ggtttctttctttggggcag

SEQ ID NO: 15039 - RNA, 20 nt, synthetic construct
  source 1..20: mol_type = other RNA
gacagtttccggtttctttc

SEQ ID NO: 15040 - RNA, 20 nt, synthetic construct
  source 1..20: mol_type = other RNA
aattctgacagtttccggtt

SEQ ID NO: 15041 - RNA, 20 nt, synthetic construct
  source 1..20: mol_type = other RNA
ggtcacctctcttgttacat

SEQ ID NO: 15042 - RNA, 20 nt, synthetic construct
  source 1..20: mol_type = other RNA
ttcgggtcacctctcttgtt

SEQ ID NO: 15043 - RNA, 20 nt, synthetic construct
  source 1..20: mol_type = other RNA
acctaattccttcgggtcac

SEQ ID NO: 15044 - RNA, 20 nt, synthetic construct
  source 1..20: mol_type = other RNA
tctacctaattccttcgggt

SEQ ID NO: 15045 - RNA, 20 nt, synthetic construct
  source 1..20: mol_type = other RNA
tcttctacctaattccttcg

SEQ ID NO: 15046 - RNA, 20 nt, synthetic construct
  source 1..20: mol_type = other RNA
attcttcttctacctaattc

SEQ ID NO: 15047 - RNA, 20 nt, synthetic construct
  source 1..20: mol_type = other RNA
tgttcaattcttcttctacc

SEQ ID NO: 15048 - RNA, 20 nt, synthetic construct
  source 1..20: mol_type = other RNA
tttcttgttcaattcttctt

SEQ ID NO: 15049 - RNA, 20 nt, synthetic construct
  source 1..20: mol_type = other RNA
ttacgtgggctgcagaaagt

SEQ ID NO: 15050 - RNA, 20 nt, synthetic construct
  source 1..20: mol_type = other RNA
tcattacgtgggctgcagaa

SEQ ID NO: 15051 - RNA, 20 nt, synthetic construct
  source 1..20: mol_type = other RNA
gcagcccacgtaatgaagaa

SEQ ID NO: 15052 - RNA, 20 nt, synthetic construct
  source 1..20: mol_type = other RNA
tgatcaaatttctatatctt

SEQ ID NO: 15053 - RNA, 20 nt, synthetic construct
  source 1..20: mol_type = other RNA
atatctttgtaaatgagagt

SEQ ID NO: 15054 - RNA, 20 nt, synthetic construct
  source 1..20: mol_type = other RNA
agtagtcaactctcatttac

SEQ ID NO: 15055 - RNA, 20 nt, synthetic construct
  source 1..20: mol_type = other RNA
tacctctacatatgctgaag

SEQ ID NO: 15056 - RNA, 20 nt, synthetic construct
  source 1..20: mol_type = other RNA
gcatatgtagaggtaagaat

SEQ ID NO: 15057 - RNA, 20 nt, synthetic construct
  source 1..20: mol_type = other RNA
aattcttacctctacatatg

SEQ ID NO: 15058 - RNA, 20 nt, synthetic construct
  source 1..20: mol_type = other RNA
tgatttatgctaccatttca

SEQ ID NO: 15059 - RNA, 20 nt, synthetic construct
  source 1..20: mol_type = other RNA
aattaatcccttcgtgattt

SEQ ID NO: 15060 - RNA, 20 nt, synthetic construct
  source 1..20: mol_type = other RNA
aagtgtaccgttgtaagttt

SEQ ID NO: 15061 - RNA, 20 nt, synthetic construct
  source 1..20: mol_type = other RNA
ttacctcatgcacgatggtg

SEQ ID NO: 15062 - RNA, 20 nt, synthetic construct
  source 1..20: mol_type = other RNA
aacccgcacagtaccctttt

SEQ ID NO: 15063 - RNA, 20 nt, synthetic construct
  source 1..20: mol_type = other RNA
aagggatattgcaaatccta

SEQ ID NO: 15064 - RNA, 20 nt, synthetic construct
  source 1..20: mol_type = other RNA
aacctttgtgattgctctag

SEQ ID NO: 15065 - RNA, 20 nt, synthetic construct
  source 1..20: mol_type = other RNA
tattataccaaaaacctcag

SEQ ID NO: 15066 - RNA, 20 nt, synthetic construct
  source 1..20: mol_type = other RNA
ctcttttgaatgcatggact

SEQ ID NO: 15067 - RNA, 20 nt, synthetic construct
  source 1..20: mol_type = other RNA
ttggcttccctcttttgaat

SEQ ID NO: 15068 - RNA, 20 nt, synthetic construct
  source 1..20: mol_type = other RNA
tccttggcttccctcttttg

SEQ ID NO: 15069 - RNA, 20 nt, synthetic construct
  source 1..20: mol_type = other RNA
aaagagggaagccaaggaag

SEQ ID NO: 15070 - RNA, 20 nt, synthetic construct
  source 1..20: mol_type = other RNA
agttcttccttggcttccct

SEQ ID NO: 15071 - RNA, 20 nt, synthetic construct
  source 1..20: mol_type = other RNA
agagctcaggctcttataca

SEQ ID NO: 15072 - RNA, 20 nt, synthetic construct
  source 1..20: mol_type = other RNA
atgagcaactggatgtataa

SEQ ID NO: 15073 - RNA, 20 nt, synthetic construct
  source 1..20: mol_type = other RNA
aggaagctggttcaatgagc

SEQ ID NO: 15074 - RNA, 20 nt, synthetic construct
  source 1..20: mol_type = other RNA
tggaatggagggtctggggt

SEQ ID NO: 15075 - RNA, 20 nt, synthetic construct
  source 1..20: mol_type = other RNA
aacactgtctctctagagac

SEQ ID NO: 15076 - RNA, 20 nt, synthetic construct
  source 1..20: mol_type = other RNA
cattttctcaggcagccaga

SEQ ID NO: 15077 - RNA, 20 nt, synthetic construct
  source 1..20: mol_type = other RNA
tgacctctggctgcctgaga

SEQ ID NO: 15078 - RNA, 20 nt, synthetic construct
  source 1..20: mol_type = other RNA
caggcagccagaggtcatga

SEQ ID NO: 15079 - RNA, 20 nt, synthetic construct
  source 1..20: mol_type = other RNA
ttatgcctcccaagaacgtt

SEQ ID NO: 15080 - RNA, 20 nt, synthetic construct
  source 1..20: mol_type = other RNA
ctcttccttatgcctcccaa

SEQ ID NO: 15081 - RNA, 20 nt, synthetic construct
  source 1..20: mol_type = other RNA
tgggaggcataaggaagagc

SEQ ID NO: 15082 - RNA, 20 nt, synthetic construct
  source 1..20: mol_type = other RNA
agatccccgcagcccaaact

SEQ ID NO: 15083 - RNA, 20 nt, synthetic construct
  source 1..20: mol_type = other RNA
ctgctgctccgtagctgtcc

SEQ ID NO: 15084 - RNA, 20 nt, synthetic construct
  source 1..20: mol_type = other RNA
gatctcttagtccaccctgc

SEQ ID NO: 15085 - RNA, 20 nt, synthetic construct
  source 1..20: mol_type = other RNA
tttatgccatgggtcccatt

SEQ ID NO: 15086 - RNA, 20 nt, synthetic construct
  source 1..20: mol_type = other RNA
ttcaactcatccccctttcc

SEQ ID NO: 15087 - RNA, 20 nt, synthetic construct
  source 1..20: mol_type = other RNA
actcatccccctttccctca

SEQ ID NO: 15088 - RNA, 20 nt, synthetic construct
  source 1..20: mol_type = other RNA
ctcagtcccggagtagctgc

SEQ ID NO: 15089 - RNA, 20 nt, synthetic construct
  source 1..20: mol_type = other RNA
ctcctgctctcagtctaccc

SEQ ID NO: 15090 - RNA, 20 nt, synthetic construct
  source 1..20: mol_type = other RNA
taggcaggtccttctctcct

SEQ ID NO: 15091 - RNA, 20 nt, synthetic construct
  source 1..20: mol_type = other RNA
agagatactgcatcctgcct

SEQ ID NO: 15092 - RNA, 20 nt, synthetic construct
  source 1..20: mol_type = other RNA
caaagctgccctggaaaact

SEQ ID NO: 15093 - RNA, 20 nt, synthetic construct
  source 1..20: mol_type = other RNA
agggcagctttgagaagtct

SEQ ID NO: 15094 - RNA, 20 nt, synthetic construct
  source 1..20: mol_type = other RNA
ccaagacttctcaaagctgc

SEQ ID NO: 15095 - RNA, 20 nt, synthetic construct
  source 1..20: mol_type = other RNA
cacagaaaagcattgtgcaa

SEQ ID NO: 15096 - RNA, 20 nt, synthetic construct
  source 1..20: mol_type = other RNA
gtgggaaaggtagagccttt

SEQ ID NO: 15097 - RNA, 20 nt, synthetic construct
  source 1..20: mol_type = other RNA
ctacgtattgagtacataga

SEQ ID NO: 15098 - RNA, 20 nt, synthetic construct
  source 1..20: mol_type = other RNA
aggtcaaccctcacactcta

SEQ ID NO: 15099 - RNA, 20 nt, synthetic construct
  source 1..20: mol_type = other RNA
gaaaacgcacgtcatccagg

SEQ ID NO: 15100 - RNA, 20 nt, synthetic construct
  source 1..20: mol_type = other RNA
tcagaaaacgcacgtcatcc

SEQ ID NO: 15101 - RNA, 20 nt, synthetic construct
  source 1..20: mol_type = other RNA
gaagaactacatgttcgttg

SEQ ID NO: 15102 - RNA, 20 nt, synthetic construct
  source 1..20: mol_type = other RNA
aatgtgggagttgcaacgaa

SEQ ID NO: 15103 - RNA, 20 nt, synthetic construct
  source 1..20: mol_type = other RNA
ttgcaactcccacattagaa

SEQ ID NO: 15104 - RNA, 20 nt, synthetic construct
  source 1..20: mol_type = other RNA
tattctaatgtgggagttgc

SEQ ID NO: 15105 - RNA, 20 nt, synthetic construct
  source 1..20: mol_type = other RNA
catgcaaatgcatctgtatc

SEQ ID NO: 15106 - RNA, 20 nt, synthetic construct
  source 1..20: mol_type = other RNA
gcccaatccatctctctgga

SEQ ID NO: 15107 - RNA, 20 nt, synthetic construct
  source 1..20: mol_type = other RNA
agagagatggattgggcaga

SEQ ID NO: 15108 - RNA, 20 nt, synthetic construct
  source 1..20: mol_type = other RNA
gccttctgcccaatccatct

SEQ ID NO: 15109 - RNA, 20 nt, synthetic construct
  source 1..20: mol_type = other RNA
ccttctgccttctgcccaat

SEQ ID NO: 15110 - RNA, 20 nt, synthetic construct
  source 1..20: mol_type = other RNA
gccacgtgtgtgtgttatct

SEQ ID NO: 15111 - RNA, 20 nt, synthetic construct
  source 1..20: mol_type = other RNA
tagaaacactgagataacac

SEQ ID NO: 15112 - RNA, 20 nt, synthetic construct
  source 1..20: mol_type = other RNA
aagaagcgtttgctacttta

SEQ ID NO: 15113 - RNA, 20 nt, synthetic construct
  source 1..20: mol_type = other RNA
cattaaaagtaccatatgat

SEQ ID NO: 15114 - RNA, 20 nt, synthetic construct
  source 1..20: mol_type = other RNA
aatattcccattaaaagtac

SEQ ID NO: 15115 - RNA, 20 nt, synthetic construct
  source 1..20: mol_type = other RNA
aaaacgatacacgtcacaag

SEQ ID NO: 15116 - RNA, 20 nt, synthetic construct
  source 1..20: mol_type = other RNA
tgatcaagccactggaaatt

SEQ ID NO: 15117 - RNA, 20 nt, synthetic construct
  source 1..20: mol_type = other RNA
agtggcttgatcatgaacta

SEQ ID NO: 15118 - RNA, 20 nt, synthetic construct
  source 1..20: mol_type = other RNA
tgcagtagttcatgatcaag

SEQ ID NO: 15119 - RNA, 20 nt, synthetic construct
  source 1..20: mol_type = other RNA
gcgtctgagcattgcgtcag

SEQ ID NO: 15120 - RNA, 20 nt, synthetic construct
  source 1..20: mol_type = other RNA
gaaggagcctctaggcttgg

SEQ ID NO: 15121 - RNA, 20 nt, synthetic construct
  source 1..20: mol_type = other RNA
aagcctagaggctccttccg

SEQ ID NO: 15122 - RNA, 20 nt, synthetic construct
  source 1..20: mol_type = other RNA
gaacaaggtaaggagtctgt

SEQ ID NO: 15123 - RNA, 20 nt, synthetic construct
  source 1..20: mol_type = other RNA
tcccagcatcgaagcgtgta

SEQ ID NO: 15124 - RNA, 20 nt, synthetic construct
  source 1..20: mol_type = other RNA
atggcttttcatcccagcat

SEQ ID NO: 15125 - RNA, 20 nt, synthetic construct
  source 1..20: mol_type = other RNA
atgctgggatgaaaagccat

SEQ ID NO: 15126 - RNA, 20 nt, synthetic construct
  source 1..20: mol_type = other RNA
cactgatgcagccgccttca

SEQ ID NO: 15127 - RNA, 20 nt, synthetic construct
  source 1..20: mol_type = other RNA
atggtaaacggatgctcgag

SEQ ID NO: 15128 - RNA, 20 nt, synthetic construct
  source 1..20: mol_type = other RNA
tcctacatggtagaactcag

SEQ ID NO: 15129 - RNA, 20 nt, synthetic construct
  source 1..20: mol_type = other RNA
accatgtaggaggaagcctc

SEQ ID NO: 15130 - RNA, 20 nt, synthetic construct
  source 1..20: mol_type = other RNA
ggtgcaacgtggttgggctt

SEQ ID NO: 15131 - RNA, 20 nt, synthetic construct
  source 1..20: mol_type = other RNA
aaattcaccttgttgtaaaa

SEQ ID NO: 15132 - RNA, 20 nt, synthetic construct
  source 1..20: mol_type = other RNA
ccttgttgtaaaacgggcta

SEQ ID NO: 15133 - RNA, 20 nt, synthetic construct
  source 1..20: mol_type = other RNA
aagccagtaagcttttccgg

SEQ ID NO: 15134 - RNA, 20 nt, synthetic construct
  source 1..20: mol_type = other RNA
ggggatttcttcaagtagcc

SEQ ID NO: 15135 - RNA, 20 nt, synthetic construct
  source 1..20: mol_type = other RNA
tcaagtagccagcattcaga

SEQ ID NO: 15136 - RNA, 20 nt, synthetic construct
  source 1..20: mol_type = other RNA
agtagccagcattcagagca

SEQ ID NO: 15137 - RNA, 20 nt, synthetic construct
  source 1..20: mol_type = other RNA
gagcaatcttcagcattgca

SEQ ID NO: 15138 - RNA, 20 nt, synthetic construct
  source 1..20: mol_type = other RNA
cagaatctgcaatgctgaag

SEQ ID NO: 15139 - RNA, 20 nt, synthetic construct
  source 1..20: mol_type = other RNA
gcattgcagattctgagaaa

SEQ ID NO: 15140 - RNA, 20 nt, synthetic construct
  source 1..20: mol_type = other RNA
gagaaatgtggctctggagc

SEQ ID NO: 15141 - RNA, 20 nt, synthetic construct
  source 1..20: mol_type = other RNA
cgagggtgacaggctccaga

SEQ ID NO: 15142 - RNA, 20 nt, synthetic construct
  source 1..20: mol_type = other RNA
atgtggccctgggtctatgg

SEQ ID NO: 15143 - RNA, 20 nt, synthetic construct
  source 1..20: mol_type = other RNA
aagcctagggctgaagagcc

SEQ ID NO: 15144 - RNA, 20 nt, synthetic construct
  source 1..20: mol_type = other RNA
gccctaggctttgaagggag

SEQ ID NO: 15145 - RNA, 20 nt, synthetic construct
  source 1..20: mol_type = other RNA
cagtattcttaaacctcttt

SEQ ID NO: 15146 - RNA, 20 nt, synthetic construct
  source 1..20: mol_type = other RNA
taaacctctttctgatgaca

SEQ ID NO: 15147 - RNA, 20 nt, synthetic construct
  source 1..20: mol_type = other RNA
gatgacacttgtacctgtga

SEQ ID NO: 15148 - RNA, 20 nt, synthetic construct
  source 1..20: mol_type = other RNA
ctctagacccctcacaggta

SEQ ID NO: 15149 - RNA, 20 nt, synthetic construct
  source 1..20: mol_type = other RNA
ggatgcagggcatgagagga

SEQ ID NO: 15150 - RNA, 20 nt, synthetic construct
  source 1..20: mol_type = other RNA
cttggaggagagagggaatc

SEQ ID NO: 15151 - RNA, 20 nt, synthetic construct
  source 1..20: mol_type = other RNA
tcccttggaggagagaggga

SEQ ID NO: 15152 - RNA, 20 nt, synthetic construct
  source 1..20: mol_type = other RNA
ctctctcctccaagggaaga

SEQ ID NO: 15153 - RNA, 20 nt, synthetic construct
  source 1..20: mol_type = other RNA
cagggatgtgtgcacgccaa

SEQ ID NO: 15154 - RNA, 20 nt, synthetic construct
  source 1..20: mol_type = other RNA
gtcagatacataggaccgtt

SEQ ID NO: 15155 - RNA, 20 nt, synthetic construct
  source 1..20: mol_type = other RNA
gggccatggggcagaaaacg

SEQ ID NO: 15156 - RNA, 20 nt, synthetic construct
  source 1..20: mol_type = other RNA
gccccatggcccggaagcca

SEQ ID NO: 15157 - RNA, 20 nt, synthetic construct
  source 1..20: mol_type = other RNA
ctagaccgttgatcatgaaa

SEQ ID NO: 15158 - RNA, 20 nt, synthetic construct
  source 1..20: mol_type = other RNA
tgatcaacggtctagggaaa

SEQ ID NO: 15159 - RNA, 20 nt, synthetic construct
  source 1..20: mol_type = other RNA
atgtctgtcccaaactctgc

SEQ ID NO: 15160 - RNA, 20 nt, synthetic construct
  source 1..20: mol_type = other RNA
tgcaaacggcaccgcatttg

SEQ ID NO: 15161 - RNA, 20 nt, synthetic construct
  source 1..20: mol_type = other RNA
aggaaactctactgaatctt

SEQ ID NO: 15162 - RNA, 20 nt, synthetic construct
  source 1..20: mol_type = other RNA
gtagagtttcctagaaaggt

SEQ ID NO: 15163 - RNA, 20 nt, synthetic construct
  source 1..20: mol_type = other RNA
tagaaaggtgctacctcgtg

SEQ ID NO: 15164 - RNA, 20 nt, synthetic construct
  source 1..20: mol_type = other RNA
tcattggaaagtgagctcac

SEQ ID NO: 15165 - RNA, 20 nt, synthetic construct
  source 1..20: mol_type = other RNA
aatgaggaatctgatctgtt

SEQ ID NO: 15166 - RNA, 20 nt, synthetic construct
  source 1..20: mol_type = other RNA
cctgacaccttagagaaaca

SEQ ID NO: 15167 - RNA, 20 nt, synthetic construct
  source 1..20: mol_type = other RNA
ctaaggtgtcaggtgaaata

SEQ ID NO: 15168 - RNA, 20 nt, synthetic construct
  source 1..20: mol_type = other RNA
tggaaatatttcacctgaca

SEQ ID NO: 15169 - RNA, 20 nt, synthetic construct
  source 1..20: mol_type = other RNA
agaactgtagtaagttcttg

SEQ ID NO: 15170 - RNA, 20 nt, synthetic construct
  source 1..20: mol_type = other RNA
aagaacttactacagttcta

SEQ ID NO: 15171 - RNA, 20 nt, synthetic construct
  source 1..20: mol_type = other RNA
tcccattctagaactgtagt

SEQ ID NO: 15172 - RNA, 20 nt, synthetic construct
  source 1..20: mol_type = other RNA
agaatgggaggaatctgttg

SEQ ID NO: 15173 - RNA, 20 nt, synthetic construct
  source 1..20: mol_type = other RNA
cacatccatctgcctatgga

SEQ ID NO: 15174 - RNA, 20 nt, synthetic construct
  source 1..20: mol_type = other RNA
ttatccataggcagatggat

SEQ ID NO: 15175 - RNA, 20 nt, synthetic construct
  source 1..20: mol_type = other RNA
cttttccttatccataggca

SEQ ID NO: 15176 - RNA, 20 nt, synthetic construct
  source 1..20: mol_type = other RNA
catagactcctttctggttg

SEQ ID NO: 15177 - RNA, 20 nt, synthetic construct
  source 1..20: mol_type = other RNA
ggttgtgtcacaaatggctt

SEQ ID NO: 15178 - RNA, 20 nt, synthetic construct
  source 1..20: mol_type = other RNA
catgtttctctatgctcaga

SEQ ID NO: 15179 - RNA, 20 nt, synthetic construct
  source 1..20: mol_type = other RNA
ctatgctcagagatactcag

SEQ ID NO: 15180 - RNA, 20 nt, synthetic construct
  source 1..20: mol_type = other RNA
cgtgttttcatttcagcacc

SEQ ID NO: 15181 - RNA, 20 nt, synthetic construct
  source 1..20: mol_type = other RNA
tttcagcaccgactgagcaa

SEQ ID NO: 15182 - RNA, 20 nt, synthetic construct
  source 1..20: mol_type = other RNA
gcaccgactgagcaaaggcc

SEQ ID NO: 15183 - RNA, 20 nt, synthetic construct
  source 1..20: mol_type = other RNA
tgtgacagtggtggagtatg

SEQ ID NO: 15184 - RNA, 20 nt, synthetic construct
  source 1..20: mol_type = other RNA
tcctgtgacagtggtggagt

SEQ ID NO: 15185 - RNA, 20 nt, synthetic construct
  source 1..20: mol_type = other RNA
ggggtccgactatgcgagtg

SEQ ID NO: 15186 - RNA, 20 nt, synthetic construct
  source 1..20: mol_type = other RNA
cttatggtaaagaacaaaga

SEQ ID NO: 15187 - RNA, 20 nt, synthetic construct
  source 1..20: mol_type = other RNA
tctcttatggtaaagaacaa

SEQ ID NO: 15188 - RNA, 20 nt, synthetic construct
  source 1..20: mol_type = other RNA
ttaccataagagaagaaagg

SEQ ID NO: 15189 - RNA, 20 nt, synthetic construct
  source 1..20: mol_type = other RNA
cttggccctttcttctctta

SEQ ID NO: 15190 - RNA, 20 nt, synthetic construct
  source 1..20: mol_type = other RNA
gttacaagagatgtgtctca

SEQ ID NO: 15191 - RNA, 20 nt, synthetic construct
  source 1..20: mol_type = other RNA
gagaactcagcttgagacac

SEQ ID NO: 15192 - RNA, 20 nt, synthetic construct
  source 1..20: mol_type = other RNA
ccgaactcaacttgtgacag

SEQ ID NO: 15193 - RNA, 20 nt, synthetic construct
  source 1..20: mol_type = other RNA
ctcagacccttagctccaag

SEQ ID NO: 15194 - RNA, 20 nt, synthetic construct
  source 1..20: mol_type = other RNA
cttctctcagacccttagct

SEQ ID NO: 15195 - RNA, 20 nt, synthetic construct
  source 1..20: mol_type = other RNA
gctcaatagaactaggagga

SEQ ID NO: 15196 - RNA, 20 nt, synthetic construct
  source 1..20: mol_type = other RNA
tcctagttctattgagcaga

SEQ ID NO: 15197 - RNA, 20 nt, synthetic construct
  source 1..20: mol_type = other RNA
cttctgctcaatagaactag

SEQ ID NO: 15198 - RNA, 20 nt, synthetic construct
  source 1..20: mol_type = other RNA
attgagcagaagggaaatct

SEQ ID NO: 15199 - RNA, 20 nt, synthetic construct
  source 1..20: mol_type = other RNA
taatgtgatctcctcacctc

SEQ ID NO: 15200 - RNA, 20 nt, synthetic construct
  source 1..20: mol_type = other RNA
tcataatgtgatctcctcac

SEQ ID NO: 15201 - RNA, 20 nt, synthetic construct
  source 1..20: mol_type = other RNA
gactttcttcataatgtgat

SEQ ID NO: 15202 - RNA, 20 nt, synthetic construct
  source 1..20: mol_type = other RNA
acaacaccaactaaacgtca

SEQ ID NO: 15203 - RNA, 20 nt, synthetic construct
  source 1..20: mol_type = other RNA
aactggaaagtctccattga

SEQ ID NO: 15204 - RNA, 20 nt, synthetic construct
  source 1..20: mol_type = other RNA
agttggaattccgttattct

SEQ ID NO: 15205 - RNA, 20 nt, synthetic construct
  source 1..20: mol_type = other RNA
gttattctggcttccacttc

SEQ ID NO: 15206 - RNA, 20 nt, synthetic construct
  source 1..20: mol_type = other RNA
ggaagtggaagccagaataa

SEQ ID NO: 15207 - RNA, 20 nt, synthetic construct
  source 1..20: mol_type = other RNA
cttcaggaagtggaagccag

SEQ ID NO: 15208 - RNA, 20 nt, synthetic construct
  source 1..20: mol_type = other RNA
ggcttccacttcctgaaggg

SEQ ID NO: 15209 - RNA, 20 nt, synthetic construct
  source 1..20: mol_type = other RNA
acttcctgaagggaaggttg

SEQ ID NO: 15210 - RNA, 20 nt, synthetic construct
  source 1..20: mol_type = other RNA
tgaagggaaggttgcgtttg

SEQ ID NO: 15211 - RNA, 20 nt, synthetic construct
  source 1..20: mol_type = other RNA
tcttgaacccagagagaaaa

SEQ ID NO: 15212 - RNA, 20 nt, synthetic construct
  source 1..20: mol_type = other RNA
ttcctcttgaacccagagag

SEQ ID NO: 15213 - RNA, 20 nt, synthetic construct
  source 1..20: mol_type = other RNA
ctctgggttcaagaggaaag

SEQ ID NO: 15214 - RNA, 20 nt, synthetic construct
  source 1..20: mol_type = other RNA
agaggaaagaataggtgctt

SEQ ID NO: 15215 - RNA, 20 nt, synthetic construct
  source 1..20: mol_type = other RNA
cctgtccataaataagcacc

SEQ ID NO: 15216 - RNA, 20 nt, synthetic construct
  source 1..20: mol_type = other RNA
atatctacgtatattccgat

SEQ ID NO: 15217 - RNA, 20 nt, synthetic construct
  source 1..20: mol_type = other RNA
gacaatcggaatatacgtag

SEQ ID NO: 15218 - RNA, 20 nt, synthetic construct
  source 1..20: mol_type = other RNA
gattgtcagaaaaacactcg

SEQ ID NO: 15219 - RNA, 20 nt, synthetic construct
  source 1..20: mol_type = other RNA
ggccactggtacttaggaac

SEQ ID NO: 15220 - RNA, 20 nt, synthetic construct
  source 1..20: mol_type = other RNA
taagtaccagtggcctgaag

SEQ ID NO: 15221 - RNA, 20 nt, synthetic construct
  source 1..20: mol_type = other RNA
cttgctgggaacctgtatcc

SEQ ID NO: 15222 - RNA, 20 nt, synthetic construct
  source 1..20: mol_type = other RNA
ttggatcttctcttgctggg

SEQ ID NO: 15223 - RNA, 20 nt, synthetic construct
  source 1..20: mol_type = other RNA
cagcaagagaagatccaagg

SEQ ID NO: 15224 - RNA, 20 nt, synthetic construct
  source 1..20: mol_type = other RNA
ttccttggatcttctcttgc

SEQ ID NO: 15225 - RNA, 20 nt, synthetic construct
  source 1..20: mol_type = other RNA
gcatccctctctgtgctgac

SEQ ID NO: 15226 - RNA, 20 nt, synthetic construct
  source 1..20: mol_type = other RNA
ctccatccacccatcccttt

SEQ ID NO: 15227 - RNA, 20 nt, synthetic construct
  source 1..20: mol_type = other RNA
atgtctctggtagtcgcttg

SEQ ID NO: 15228 - RNA, 20 nt, synthetic construct
  source 1..20: mol_type = other RNA
acatgtgggacaacagatgg

SEQ ID NO: 15229 - RNA, 20 nt, synthetic construct
  source 1..20: mol_type = other RNA
ctaggtcctctaccatctgt

SEQ ID NO: 15230 - RNA, 20 nt, synthetic construct
  source 1..20: mol_type = other RNA
tcctggatacccttcctgca

SEQ ID NO: 15231 - RNA, 20 nt, synthetic construct
  source 1..20: mol_type = other RNA
gtgcaggaagggtatccagg

SEQ ID NO: 15232 - RNA, 20 nt, synthetic construct
  source 1..20: mol_type = other RNA
tggatacccttcctgcactg

SEQ ID NO: 15233 - RNA, 20 nt, synthetic construct
  source 1..20: mol_type = other RNA
tgcactgaatagcaaggaga

SEQ ID NO: 15234 - RNA, 20 nt, synthetic construct
  source 1..20: mol_type = other RNA
gcaagatggctacagtctgc

SEQ ID NO: 15235 - RNA, 20 nt, synthetic construct
  source 1..20: mol_type = other RNA
gctaccacagtcatcccaaa

SEQ ID NO: 15236 - RNA, 20 nt, synthetic construct
  source 1..20: mol_type = other RNA
agcagacctagaaaaatttc

SEQ ID NO: 15237 - RNA, 20 nt, synthetic construct
  source 1..20: mol_type = other RNA
tatttctagcagacctagaa

SEQ ID NO: 15238 - RNA, 20 nt, synthetic construct
  source 1..20: mol_type = other RNA
aggtctgctagaaataagaa

SEQ ID NO: 15239 - RNA, 20 nt, synthetic construct
  source 1..20: mol_type = other RNA
tccacaaaccagttcttatt

SEQ ID NO: 15240 - RNA, 20 nt, synthetic construct
  source 1..20: mol_type = other RNA
atgcgtatttgtagagctct

SEQ ID NO: 15241 - RNA, 20 nt, synthetic construct
  source 1..20: mol_type = other RNA
tgtgcacaggcagcgtcatg

SEQ ID NO: 15242 - RNA, 20 nt, synthetic construct
  source 1..20: mol_type = other RNA
cgtggaaccatttcctgtgc

SEQ ID NO: 15243 - RNA, 20 nt, synthetic construct
  source 1..20: mol_type = other RNA
ttgccacactttctcgtgga

SEQ ID NO: 15244 - RNA, 20 nt, synthetic construct
  source 1..20: mol_type = other RNA
acgagaaagtgtggcaaaga

SEQ ID NO: 15245 - RNA, 20 nt, synthetic construct
  source 1..20: mol_type = other RNA
cagtaaatgttctttgccac

SEQ ID NO: 15246 - RNA, 20 nt, synthetic construct
  source 1..20: mol_type = other RNA
tgtgctcttgtacttgctgt

SEQ ID NO: 15247 - RNA, 20 nt, synthetic construct
  source 1..20: mol_type = other RNA
ttattgagcttcctgtgctc

SEQ ID NO: 15248 - RNA, 20 nt, synthetic construct
  source 1..20: mol_type = other RNA
tcccagctagaccagagagt

SEQ ID NO: 15249 - RNA, 20 nt, synthetic construct
  source 1..20: mol_type = other RNA
cagctagaccagagagtcct

SEQ ID NO: 15250 - RNA, 20 nt, synthetic construct
  source 1..20: mol_type = other RNA
ggggtctccactgaattggc

SEQ ID NO: 15251 - RNA, 20 nt, synthetic construct
  source 1..20: mol_type = other RNA
gtggagaccccagaacagcc

SEQ ID NO: 15252 - RNA, 20 nt, synthetic construct
  source 1..20: mol_type = other RNA
agtaatatactaagtgtacc

SEQ ID NO: 15253 - RNA, 20 nt, synthetic construct
  source 1..20: mol_type = other RNA
agctgtgcaaggggttgtct

SEQ ID NO: 15254 - RNA, 20 nt, synthetic construct
  source 1..20: mol_type = other RNA
ttgattggaaaccgatttga

SEQ ID NO: 15255 - RNA, 20 nt, synthetic construct
  source 1..20: mol_type = other RNA
aatcaatgaagtgcctgtga

SEQ ID NO: 15256 - RNA, 20 nt, synthetic construct
  source 1..20: mol_type = other RNA
tctcacaggcacttcattga

SEQ ID NO: 15257 - RNA, 20 nt, synthetic construct
  source 1..20: mol_type = other RNA
aaagagagttgagatttcct

SEQ ID NO: 15258 - RNA, 20 nt, synthetic construct
  source 1..20: mol_type = other RNA
acatgtagtcagattttaaa

SEQ ID NO: 15259 - RNA, 20 nt, synthetic construct
  source 1..20: mol_type = other RNA
tggtcatgggtcacacgaaa

SEQ ID NO: 15260 - RNA, 20 nt, synthetic construct
  source 1..20: mol_type = other RNA
tgtgacccatgaccaggaaa

SEQ ID NO: 15261 - RNA, 20 nt, synthetic construct
  source 1..20: mol_type = other RNA
tgagcctgtttgtattaccc

SEQ ID NO: 15262 - RNA, 20 nt, synthetic construct
  source 1..20: mol_type = other RNA
ctcattcctgagcctgtttg

SEQ ID NO: 15263 - RNA, 20 nt, synthetic construct
  source 1..20: mol_type = other RNA
aatcatttctctcattcctg

SEQ ID NO: 15264 - RNA, 20 nt, synthetic construct
  source 1..20: mol_type = other RNA
cgcaattctaatcatttctc

SEQ ID NO: 15265 - RNA, 20 nt, synthetic construct
  source 1..20: mol_type = other RNA
aattttcacgcaattctaat

SEQ ID NO: 15266 - RNA, 20 nt, synthetic construct
  source 1..20: mol_type = other RNA
aatatttaaaaaaacaacat

SEQ ID NO: 15267 - RNA, 20 nt, synthetic construct
  source 1..20: mol_type = other RNA
tgcatgttgtttttttaaat

SEQ ID NO: 15268 - RNA, 20 nt, synthetic construct
  source 1..20: mol_type = other RNA
cttgatatgatatctgcttt

SEQ ID NO: 15269 - RNA, 20 nt, synthetic construct
  source 1..20: mol_type = other RNA
gtactgttaatttctcttga

SEQ ID NO: 15270 - RNA, 20 nt, synthetic construct
  source 1..20: mol_type = other RNA
attaagacatacttttttta

SEQ ID NO: 15271 - RNA, 20 nt, synthetic construct
  source 1..20: mol_type = other RNA
tctgaaacgtctaaattgat

SEQ ID NO: 15272 - RNA, 20 nt, synthetic construct
  source 1..20: mol_type = other RNA
gaggaaaacattacccaaca

SEQ ID NO: 15273 - RNA, 20 nt, synthetic construct
  source 1..20: mol_type = other RNA
ctagaattgtgtgttgggta

SEQ ID NO: 15274 - RNA, 20 nt, synthetic construct
  source 1..20: mol_type = other RNA
gtaggttctctagaattgtg

SEQ ID NO: 15275 - RNA, 20 nt, synthetic construct
  source 1..20: mol_type = other RNA
agagaacctacagaatgagc

SEQ ID NO: 15276 - RNA, 20 nt, synthetic construct
  source 1..20: mol_type = other RNA
gtttgtgtgtgtgtgtgtgt

SEQ ID NO: 15277 - RNA, 20 nt, synthetic construct
  source 1..20: mol_type = other RNA
gcgtgtgtgtgagtatgggt

SEQ ID NO: 15278 - RNA, 20 nt, synthetic construct
  source 1..20: mol_type = other RNA
aacacacacagacacgcgca

SEQ ID NO: 15279 - RNA, 20 nt, synthetic construct
  source 1..20: mol_type = other RNA
ggggtgcgcgtgtctgtgtg

SEQ ID NO: 15280 - RNA, 20 nt, synthetic construct
  source 1..20: mol_type = other RNA
tcaggggtgcgcgtgtctgt

SEQ ID NO: 15281 - RNA, 20 nt, synthetic construct
  source 1..20: mol_type = other RNA
ctgtttcttcaggggtgcgc

SEQ ID NO: 15282 - RNA, 20 nt, synthetic construct
  source 1..20: mol_type = other RNA
tacatgtctgtgaggctcgc

SEQ ID NO: 15283 - RNA, 20 nt, synthetic construct
  source 1..20: mol_type = other RNA
tattttcctacatgtctgtg

SEQ ID NO: 15284 - RNA, 20 nt, synthetic construct
  source 1..20: mol_type = other RNA
cacatgcaggaaatcttttc

SEQ ID NO: 15285 - RNA, 20 nt, synthetic construct
  source 1..20: mol_type = other RNA
tgcatgtgggaagcaagtca

SEQ ID NO: 15286 - RNA, 20 nt, synthetic construct
  source 1..20: mol_type = other RNA
aaactcccttgctctttact

SEQ ID NO: 15287 - RNA, 20 nt, synthetic construct
  source 1..20: mol_type = other RNA
attccaaactcccttgctct

SEQ ID NO: 15288 - RNA, 20 nt, synthetic construct
  source 1..20: mol_type = other RNA
ggtatttgtttctattccaa

SEQ ID NO: 15289 - RNA, 20 nt, synthetic construct
  source 1..20: mol_type = other RNA
taattgaaaagttatcagcc

SEQ ID NO: 15290 - RNA, 20 nt, synthetic construct
  source 1..20: mol_type = other RNA
tcgtaattgaaaagttatca

SEQ ID NO: 15291 - RNA, 20 nt, synthetic construct
  source 1..20: mol_type = other RNA
attacgaagaacattaaaaa

SEQ ID NO: 15292 - RNA, 20 nt, synthetic construct
  source 1..20: mol_type = other RNA
gtgattttttttaatgttct

SEQ ID NO: 15293 - RNA, 20 nt, synthetic construct
  source 1..20: mol_type = other RNA
cgattctgtgatttttttta

SEQ ID NO: 15294 - RNA, 20 nt, synthetic construct
  source 1..20: mol_type = other RNA
ctatgtgatcccttgagttt

SEQ ID NO: 15295 - RNA, 20 nt, synthetic construct
  source 1..20: mol_type = other RNA
gaaattccctatgtgatccc

SEQ ID NO: 15296 - RNA, 20 nt, synthetic construct
  source 1..20: mol_type = other RNA
gaaaaaaaacccaacctgta

SEQ ID NO: 15297 - RNA, 20 nt, synthetic construct
  source 1..20: mol_type = other RNA
aactgtgatgtacaaaagta

SEQ ID NO: 15298 - RNA, 20 nt, synthetic construct
  source 1..20: mol_type = other RNA
aaggtaacaaggcaaagata

SEQ ID NO: 15299 - RNA, 20 nt, synthetic construct
  source 1..20: mol_type = other RNA
tattatatctttgccttgtt

SEQ ID NO: 15300 - RNA, 20 nt, synthetic construct
  source 1..20: mol_type = other RNA
tcttattatatctttgcctt

SEQ ID NO: 15301 - RNA, 20 nt, synthetic construct
  source 1..20: mol_type = other RNA
cgtgacaggtttcttcttat

SEQ ID NO: 15302 - RNA, 20 nt, synthetic construct
  source 1..20: mol_type = other RNA
tccagtttctcgtgacaggt

SEQ ID NO: 15303 - RNA, 20 nt, synthetic construct
  source 1..20: mol_type = other RNA
tacaagtacactgatacaaa

SEQ ID NO: 15304 - RNA, 20 nt, synthetic construct
  source 1..20: mol_type = other RNA
gaggtgaacacattggcaat

SEQ ID NO: 15305 - RNA, 20 nt, synthetic construct
  source 1..20: mol_type = other RNA
agtgtttctgaggtgaacac

SEQ ID NO: 15306 - RNA, 20 nt, synthetic construct
  source 1..20: mol_type = other RNA
cctcagaaacactggaagcc

SEQ ID NO: 15307 - RNA, 20 nt, synthetic construct
  source 1..20: mol_type = other RNA
ctggtatctggcttccagtg

SEQ ID NO: 15308 - RNA, 20 nt, synthetic construct
  source 1..20: mol_type = other RNA
tgattatcattttaacaata

SEQ ID NO: 15309 - RNA, 20 nt, synthetic construct
  source 1..20: mol_type = other RNA
cggttgatctctttttgttc

SEQ ID NO: 15310 - RNA, 20 nt, synthetic construct
  source 1..20: mol_type = other RNA
gcattcccggttgatctctt

SEQ ID NO: 15311 - RNA, 20 nt, synthetic construct
  source 1..20: mol_type = other RNA
aggcattttattgctggatt

SEQ ID NO: 15312 - RNA, 20 nt, synthetic construct
  source 1..20: mol_type = other RNA
ttggggcagtgcacaatatg

SEQ ID NO: 15313 - RNA, 20 nt, synthetic construct
  source 1..20: mol_type = other RNA
ttctttggggcagtgcacaa

SEQ ID NO: 15314 - RNA, 20 nt, synthetic construct
  source 1..20: mol_type = other RNA
ggtttctttctttggggcag

SEQ ID NO: 15315 - RNA, 20 nt, synthetic construct
  source 1..20: mol_type = other RNA
tacagtttccggtttctttc

SEQ ID NO: 15316 - RNA, 20 nt, synthetic construct
  source 1..20: mol_type = other RNA
aattcttacagtttccggtt

SEQ ID NO: 15317 - RNA, 20 nt, synthetic construct
  source 1..20: mol_type = other RNA
ggtcacctctcttgttacat

SEQ ID NO: 15318 - RNA, 20 nt, synthetic construct
  source 1..20: mol_type = other RNA
ttcgggtcacctctcttgtt

SEQ ID NO: 15319 - RNA, 20 nt, synthetic construct
  source 1..20: mol_type = other RNA
acctaattccttcgggtcac

SEQ ID NO: 15320 - RNA, 20 nt, synthetic construct
  source 1..20: mol_type = other RNA
tctacctaattccttcgggt

SEQ ID NO: 15321 - RNA, 20 nt, synthetic construct
  source 1..20: mol_type = other RNA
tcttctacctaattccttcg

SEQ ID NO: 15322 - RNA, 20 nt, synthetic construct
  source 1..20: mol_type = other RNA
attcttcttctacctaattc

SEQ ID NO: 15323 - RNA, 20 nt, synthetic construct
  source 1..20: mol_type = other RNA
tgttcaattcttcttctacc

SEQ ID NO: 15324 - RNA, 20 nt, synthetic construct
  source 1..20: mol_type = other RNA
tttcttgttcaattcttctt

SEQ ID NO: 15325 - RNA, 20 nt, synthetic construct
  source 1..20: mol_type = other RNA
ttacgtgggctgcagaaagt

SEQ ID NO: 15326 - RNA, 20 nt, synthetic construct
  source 1..20: mol_type = other RNA
tcattacgtgggctgcagaa

SEQ ID NO: 15327 - RNA, 20 nt, synthetic construct
  source 1..20: mol_type = other RNA
gcagcccacgtaatgaagaa

SEQ ID NO: 15328 - RNA, 20 nt, synthetic construct
  source 1..20: mol_type = other RNA
tgatcaaatttctatatctt

SEQ ID NO: 15329 - RNA, 20 nt, synthetic construct
  source 1..20: mol_type = other RNA
atatctttgtaaatgagagt

SEQ ID NO: 15330 - RNA, 20 nt, synthetic construct
  source 1..20: mol_type = other RNA
agtagtcaactctcatttac

SEQ ID NO: 15331 - RNA, 20 nt, synthetic construct
  source 1..20: mol_type = other RNA
tacctctacatatgctgaag

SEQ ID NO: 15332 - RNA, 20 nt, synthetic construct
  source 1..20: mol_type = other RNA
gcatatgtagaggtaagaat

SEQ ID NO: 15333 - RNA, 20 nt, synthetic construct
  source 1..20: mol_type = other RNA
aattcttacctctacatatg

SEQ ID NO: 15334 - RNA, 20 nt, synthetic construct
  source 1..20: mol_type = other RNA
tgatttatgctaccatttca

SEQ ID NO: 15335 - RNA, 20 nt, synthetic construct
  source 1..20: mol_type = other RNA
aattaatcccttcgtgattt

SEQ ID NO: 15336 - RNA, 20 nt, synthetic construct
  source 1..20: mol_type = other RNA
aagtgtaccgttgtaagttt

SEQ ID NO: 15337 - RNA, 20 nt, synthetic construct
  source 1..20: mol_type = other RNA
ttacctcatgcacgatggtg

SEQ ID NO: 15338 - RNA, 20 nt, synthetic construct
  source 1..20: mol_type = other RNA
aacccgcacagtaccctttt

SEQ ID NO: 15339 - RNA, 20 nt, synthetic construct
  source 1..20: mol_type = other RNA
aagggatattgcaaatccta

SEQ ID NO: 15340 - RNA, 20 nt, synthetic construct
  source 1..20: mol_type = other RNA
aacctttgtgattgctctag

SEQ ID NO: 15341 - RNA, 20 nt, synthetic construct
  source 1..20: mol_type = other RNA
tattataccaaaaacctcag

SEQ ID NO: 15342 - RNA, 20 nt, synthetic construct
  source 1..20: mol_type = other RNA
ctcttttgaatgcatggact

SEQ ID NO: 15343 - RNA, 20 nt, synthetic construct
  source 1..20: mol_type = other RNA
ttggcttccctcttttgaat

SEQ ID NO: 15344 - RNA, 20 nt, synthetic construct
  source 1..20: mol_type = other RNA
tccttggcttccctcttttg

SEQ ID NO: 15345 - RNA, 20 nt, synthetic construct
  source 1..20: mol_type = other RNA
aaagagggaagccaaggaag

SEQ ID NO: 15346 - RNA, 20 nt, synthetic construct
  source 1..20: mol_type = other RNA
agttcttccttggcttccct

SEQ ID NO: 15347 - RNA, 20 nt, synthetic construct
  source 1..20: mol_type = other RNA
agagctcaggctcttataca

SEQ ID NO: 15348 - RNA, 20 nt, synthetic construct
  source 1..20: mol_type = other RNA
atgagcaactggatgtataa

SEQ ID NO: 15349 - RNA, 20 nt, synthetic construct
  source 1..20: mol_type = other RNA
aggaagctggttcaatgagc

SEQ ID NO: 15350 - RNA, 20 nt, synthetic construct
  source 1..20: mol_type = other RNA
tggaatggagggtctggggt

SEQ ID NO: 15351 - RNA, 20 nt, synthetic construct
  source 1..20: mol_type = other RNA
aacactgtctctctagagac

SEQ ID NO: 15352 - RNA, 20 nt, synthetic construct
  source 1..20: mol_type = other RNA
cattttctcaggcagccaga

SEQ ID NO: 15353 - RNA, 20 nt, synthetic construct
  source 1..20: mol_type = other RNA
tgacctctggctgcctgaga

SEQ ID NO: 15354 - RNA, 20 nt, synthetic construct
  source 1..20: mol_type = other RNA
caggcagccagaggtcatga

SEQ ID NO: 15355 - RNA, 20 nt, synthetic construct
  source 1..20: mol_type = other RNA
ttatgcctcccaagaacgtt

SEQ ID NO: 15356 - RNA, 20 nt, synthetic construct
  source 1..20: mol_type = other RNA
ctcttccttatgcctcccaa

SEQ ID NO: 15357 - RNA, 20 nt, synthetic construct
  source 1..20: mol_type = other RNA
tgggaggcataaggaagagc

SEQ ID NO: 15358 - RNA, 20 nt, synthetic construct
  source 1..20: mol_type = other RNA
agatccccgcagcccaaact

SEQ ID NO: 15359 - RNA, 20 nt, synthetic construct
  source 1..20: mol_type = other RNA
ctgctgctccgtagctgtcc

SEQ ID NO: 15360 - RNA, 20 nt, synthetic construct
  source 1..20: mol_type = other RNA
gatctcttagtccaccctgc

SEQ ID NO: 15361 - RNA, 20 nt, synthetic construct
  source 1..20: mol_type = other RNA
tttatgccatgggtcccact

SEQ ID NO: 15362 - RNA, 20 nt, synthetic construct
  source 1..20: mol_type = other RNA
ttcaactcatccccctttcc

SEQ ID NO: 15363 - RNA, 20 nt, synthetic construct
  source 1..20: mol_type = other RNA
actcatccccctttccctca

SEQ ID NO: 15364 - RNA, 20 nt, synthetic construct
  source 1..20: mol_type = other RNA
ctcagtcccggagtagctgc

SEQ ID NO: 15365 - RNA, 20 nt, synthetic construct
  source 1..20: mol_type = other RNA
ctcctgctctcagtctaccc

SEQ ID NO: 15366 - RNA, 20 nt, synthetic construct
  source 1..20: mol_type = other RNA
taggcaggtccttctctcct

SEQ ID NO: 15367 - RNA, 20 nt, synthetic construct
  source 1..20: mol_type = other RNA
agagatactgcatcctgcct

SEQ ID NO: 15368 - RNA, 20 nt, synthetic construct
  source 1..20: mol_type = other RNA
caaagctgccctggaaaact

SEQ ID NO: 15369 - RNA, 20 nt, synthetic construct
  source 1..20: mol_type = other RNA
agggcagctttgagaagtct

SEQ ID NO: 15370 - RNA, 20 nt, synthetic construct
  source 1..20: mol_type = other RNA
ccaagacttctcaaagctgc

SEQ ID NO: 15371 - RNA, 20 nt, synthetic construct
  source 1..20: mol_type = other RNA
cacagaaaagcattgtgcaa

SEQ ID NO: 15372 - RNA, 20 nt, synthetic construct
  source 1..20: mol_type = other RNA
gtgggaaaggtagagccttt

SEQ ID NO: 15373 - RNA, 20 nt, synthetic construct
  source 1..20: mol_type = other RNA
ctacgtattgagtacataga

SEQ ID NO: 15374 - RNA, 20 nt, synthetic construct
  source 1..20: mol_type = other RNA
aggtcaaccctcacactcta

SEQ ID NO: 15375 - RNA, 20 nt, synthetic construct
  source 1..20: mol_type = other RNA
gaaaacacacgtcatccagg

SEQ ID NO: 15376 - RNA, 20 nt, synthetic construct
  source 1..20: mol_type = other RNA
tcagaaaacacacgtcatcc

SEQ ID NO: 15377 - RNA, 20 nt, synthetic construct
  source 1..20: mol_type = other RNA
gaagaactacatgttcgttg

SEQ ID NO: 15378 - RNA, 20 nt, synthetic construct
  source 1..20: mol_type = other RNA
aatgtgggagttgcaacgaa

SEQ ID NO: 15379 - RNA, 20 nt, synthetic construct
  source 1..20: mol_type = other RNA
ttgcaactcccacattagaa

SEQ ID NO: 15380 - RNA, 20 nt, synthetic construct
  source 1..20: mol_type = other RNA
tattctaatgtgggagttgc

SEQ ID NO: 15381 - RNA, 20 nt, synthetic construct
  source 1..20: mol_type = other RNA
catgcaaatgcatctgtatc

SEQ ID NO: 15382 - RNA, 20 nt, synthetic construct
  source 1..20: mol_type = other RNA
gcccaatccatctctctgga

SEQ ID NO: 15383 - RNA, 20 nt, synthetic construct
  source 1..20: mol_type = other RNA
agagagatggattgggcaga

SEQ ID NO: 15384 - RNA, 20 nt, synthetic construct
  source 1..20: mol_type = other RNA
gccttctgcccaatccatct

SEQ ID NO: 15385 - RNA, 20 nt, synthetic construct
  source 1..20: mol_type = other RNA
ccttctgccttctgcccaat

SEQ ID NO: 15386 - RNA, 20 nt, synthetic construct
  source 1..20: mol_type = other RNA
gccacgtgtgtgtgttatct

SEQ ID NO: 15387 - RNA, 20 nt, synthetic construct
  source 1..20: mol_type = other RNA
tagaaacactgagataacac

SEQ ID NO: 15388 - RNA, 20 nt, synthetic construct
  source 1..20: mol_type = other RNA
aagaagcgtttgctacttta

SEQ ID NO: 15389 - RNA, 20 nt, synthetic construct
  source 1..20: mol_type = other RNA
cattaaaagtaccatatgat

SEQ ID NO: 15390 - RNA, 20 nt, synthetic construct
  source 1..20: mol_type = other RNA
aatattcccattaaaagtac

SEQ ID NO: 15391 - RNA, 20 nt, synthetic construct
  source 1..20: mol_type = other RNA
aaaacgatacacgtcacaag

SEQ ID NO: 15392 - RNA, 20 nt, synthetic construct
  source 1..20: mol_type = other RNA
tgatcaagccactggaaatt

SEQ ID NO: 15393 - RNA, 20 nt, synthetic construct
  source 1..20: mol_type = other RNA
agtggcttgatcatgaacta

SEQ ID NO: 15394 - RNA, 20 nt, synthetic construct
  source 1..20: mol_type = other RNA
tgcagtagttcatgatcaag

SEQ ID NO: 15395 - RNA, 20 nt, synthetic construct
  source 1..20: mol_type = other RNA
gcgtctgagcattgcgtcag

SEQ ID NO: 15396 - RNA, 20 nt, synthetic construct
  source 1..20: mol_type = other RNA
gaaggagcctctaggcttgg

SEQ ID NO: 15397 - RNA, 20 nt, synthetic construct
  source 1..20: mol_type = other RNA
aagcctagaggctccttccg

SEQ ID NO: 15398 - RNA, 20 nt, synthetic construct
  source 1..20: mol_type = other RNA
gaacaaggtaaggagtctgt

SEQ ID NO: 15399 - RNA, 20 nt, synthetic construct
  source 1..20: mol_type = other RNA
tcccagcatcgaagcgtgta

SEQ ID NO: 15400 - RNA, 20 nt, synthetic construct
  source 1..20: mol_type = other RNA
atggcttttcatcccagcat

SEQ ID NO: 15401 - RNA, 20 nt, synthetic construct
  source 1..20: mol_type = other RNA
atgctgggatgaaaagccat

SEQ ID NO: 15402 - RNA, 20 nt, synthetic construct
  source 1..20: mol_type = other RNA
cactgatgcagccgccttca

SEQ ID NO: 15403 - RNA, 20 nt, synthetic construct
  source 1..20: mol_type = other RNA
atggtaaacggatgctcgag

SEQ ID NO: 15404 - RNA, 20 nt, synthetic construct
  source 1..20: mol_type = other RNA
tcctacatggtagaactcag

SEQ ID NO: 15405 - RNA, 20 nt, synthetic construct
  source 1..20: mol_type = other RNA
accatgtaggaggaagcctc

SEQ ID NO: 15406 - RNA, 20 nt, synthetic construct
  source 1..20: mol_type = other RNA
ggtgcaacgtggttgggctt

SEQ ID NO: 15407 - RNA, 20 nt, synthetic construct
  source 1..20: mol_type = other RNA
aaattcaccttgttgtaaaa

SEQ ID NO: 15408 - RNA, 20 nt, synthetic construct
  source 1..20: mol_type = other RNA
ccttgttgtaaaacgggcta

SEQ ID NO: 15409 - RNA, 20 nt, synthetic construct
  source 1..20: mol_type = other RNA
aagccagtaagcttttccgg

SEQ ID NO: 15410 - RNA, 20 nt, synthetic construct
  source 1..20: mol_type = other RNA
ggggatttcttcaagtagcc

SEQ ID NO: 15411 - RNA, 20 nt, synthetic construct
  source 1..20: mol_type = other RNA
tcaagtagccagcattcaga

SEQ ID NO: 15412 - RNA, 20 nt, synthetic construct
  source 1..20: mol_type = other RNA
agtagccagcattcagagca

SEQ ID NO: 15413 - RNA, 20 nt, synthetic construct
  source 1..20: mol_type = other RNA
gagcaatcttcagcattgca

SEQ ID NO: 15414 - RNA, 20 nt, synthetic construct
  source 1..20: mol_type = other RNA
cagaatctgcaatgctgaag

SEQ ID NO: 15415 - RNA, 20 nt, synthetic construct
  source 1..20: mol_type = other RNA
gcattgcagattctgagaaa

SEQ ID NO: 15416 - RNA, 20 nt, synthetic construct
  source 1..20: mol_type = other RNA
gagaaatgtggctctggagc

SEQ ID NO: 15417 - RNA, 20 nt, synthetic construct
  source 1..20: mol_type = other RNA
cgagggtgacaggctccaga

SEQ ID NO: 15418 - RNA, 20 nt, synthetic construct
  source 1..20: mol_type = other RNA
atgtggccctgggtctatgg

SEQ ID NO: 15419 - RNA, 20 nt, synthetic construct
  source 1..20: mol_type = other RNA
aagcctagggctgaagagcc

SEQ ID NO: 15420 - RNA, 20 nt, synthetic construct
  source 1..20: mol_type = other RNA
gccctaggctttgaagggag

SEQ ID NO: 15421 - RNA, 20 nt, synthetic construct
  source 1..20: mol_type = other RNA
cagtattcttaaacctcttt

SEQ ID NO: 15422 - RNA, 20 nt, synthetic construct
  source 1..20: mol_type = other RNA
taaacctctttctgatgaca

SEQ ID NO: 15423 - RNA, 20 nt, synthetic construct
  source 1..20: mol_type = other RNA
gatgacacttgtacctgtga

SEQ ID NO: 15424 - RNA, 20 nt, synthetic construct
  source 1..20: mol_type = other RNA
ctctagacccctcacaggta

SEQ ID NO: 15425 - RNA, 20 nt, synthetic construct
  source 1..20: mol_type = other RNA
ggatgcagggcatgagagga

SEQ ID NO: 15426 - RNA, 20 nt, synthetic construct
  source 1..20: mol_type = other RNA
cttggaggagagagggaatc

SEQ ID NO: 15427 - RNA, 20 nt, synthetic construct
  source 1..20: mol_type = other RNA
tcccttggaggagagaggga

SEQ ID NO: 15428 - RNA, 20 nt, synthetic construct
  source 1..20: mol_type = other RNA
ctctctcctccaagggaaga

SEQ ID NO: 15429 - RNA, 20 nt, synthetic construct
  source 1..20: mol_type = other RNA
cagggatgtgtgcacgccaa

SEQ ID NO: 15430 - RNA, 20 nt, synthetic construct
  source 1..20: mol_type = other RNA
gtcagatacataggaccgtt

SEQ ID NO: 15431 - RNA, 20 nt, synthetic construct
  source 1..20: mol_type = other RNA
gggccatggggcagaaaacg

SEQ ID NO: 15432 - RNA, 20 nt, synthetic construct
  source 1..20: mol_type = other RNA
gccccatggcccggaagcca

SEQ ID NO: 15433 - RNA, 20 nt, synthetic construct
  source 1..20: mol_type = other RNA
ctagaccgttgatcatgaaa

SEQ ID NO: 15434 - RNA, 20 nt, synthetic construct
  source 1..20: mol_type = other RNA
tgatcaacggtctagggaaa

SEQ ID NO: 15435 - RNA, 20 nt, synthetic construct
  source 1..20: mol_type = other RNA
atgtctgtcccaaactcttc

SEQ ID NO: 15436 - RNA, 20 nt, synthetic construct
  source 1..20: mol_type = other RNA
cccgacagccaattaccacc

SEQ ID NO: 15437 - RNA, 20 nt, synthetic construct
  source 1..20: mol_type = other RNA
tgcaaacggcaccgcatttg

SEQ ID NO: 15438 - RNA, 20 nt, synthetic construct
  source 1..20: mol_type = other RNA
aggaaactctactgaatctt

SEQ ID NO: 15439 - RNA, 20 nt, synthetic construct
  source 1..20: mol_type = other RNA
gtagagtttcctagaaaggt

SEQ ID NO: 15440 - RNA, 20 nt, synthetic construct
  source 1..20: mol_type = other RNA
tagaaaggtgctacctcgtg

SEQ ID NO: 15441 - RNA, 20 nt, synthetic construct
  source 1..20: mol_type = other RNA
tcattggaaagtgagctcac

SEQ ID NO: 15442 - RNA, 20 nt, synthetic construct
  source 1..20: mol_type = other RNA
aatgaggaatctgatctgtt

SEQ ID NO: 15443 - RNA, 20 nt, synthetic construct
  source 1..20: mol_type = other RNA
cctgacaccttagagaaaca

SEQ ID NO: 15444 - RNA, 20 nt, synthetic construct
  source 1..20: mol_type = other RNA
ctaaggtgtcaggtgaaata

SEQ ID NO: 15445 - RNA, 20 nt, synthetic construct
  source 1..20: mol_type = other RNA
tggaaatatttcacctgaca

SEQ ID NO: 15446 - RNA, 20 nt, synthetic construct
  source 1..20: mol_type = other RNA
agaactgtagtaagttcttg

SEQ ID NO: 15447 - RNA, 20 nt, synthetic construct
  source 1..20: mol_type = other RNA
aagaacttactacagttcta

SEQ ID NO: 15448 - RNA, 20 nt, synthetic construct
  source 1..20: mol_type = other RNA
tcccattctagaactgtagt

SEQ ID NO: 15449 - RNA, 20 nt, synthetic construct
  source 1..20: mol_type = other RNA
agaatgggaggaatctgttg

SEQ ID NO: 15450 - RNA, 20 nt, synthetic construct
  source 1..20: mol_type = other RNA
cacatccatctgcctatgga

SEQ ID NO: 15451 - RNA, 20 nt, synthetic construct
  source 1..20: mol_type = other RNA
ttatccataggcagatggat

SEQ ID NO: 15452 - RNA, 20 nt, synthetic construct
  source 1..20: mol_type = other RNA
cttttccttatccataggca

SEQ ID NO: 15453 - RNA, 20 nt, synthetic construct
  source 1..20: mol_type = other RNA
catagactcctttctggttg

SEQ ID NO: 15454 - RNA, 20 nt, synthetic construct
  source 1..20: mol_type = other RNA
ggttgtgtcacaaatggctt

SEQ ID NO: 15455 - RNA, 20 nt, synthetic construct
  source 1..20: mol_type = other RNA
catgtttctctatgctcaga

SEQ ID NO: 15456 - RNA, 20 nt, synthetic construct
  source 1..20: mol_type = other RNA
ctatgctcagagatactcag

SEQ ID NO: 15457 - RNA, 20 nt, synthetic construct
  source 1..20: mol_type = other RNA
cgtgttttcatttcagcacc

SEQ ID NO: 15458 - RNA, 20 nt, synthetic construct
  source 1..20: mol_type = other RNA
tttcagcaccgactgagcaa

SEQ ID NO: 15459 - RNA, 20 nt, synthetic construct
  source 1..20: mol_type = other RNA
gcaccgactgagcaaaggcc

SEQ ID NO: 15460 - RNA, 20 nt, synthetic construct
  source 1..20: mol_type = other RNA
tgtgacagtggtggagtatg

SEQ ID NO: 15461 - RNA, 20 nt, synthetic construct
  source 1..20: mol_type = other RNA
tcctgtgacagtggtggagt

SEQ ID NO: 15462 - RNA, 20 nt, synthetic construct
  source 1..20: mol_type = other RNA
ggggtccgactatgcgagtg

SEQ ID NO: 15463 - RNA, 20 nt, synthetic construct
  source 1..20: mol_type = other RNA
cttatggtaaagaacaaaga

SEQ ID NO: 15464 - RNA, 20 nt, synthetic construct
  source 1..20: mol_type = other RNA
tctcttatggtaaagaacaa

SEQ ID NO: 15465 - RNA, 20 nt, synthetic construct
  source 1..20: mol_type = other RNA
ttaccataagagaagaaagg

SEQ ID NO: 15466 - RNA, 20 nt, synthetic construct
  source 1..20: mol_type = other RNA
cttggccctttcttctctta

SEQ ID NO: 15467 - RNA, 20 nt, synthetic construct
  source 1..20: mol_type = other RNA
gttacaagagatgtgtctca

SEQ ID NO: 15468 - RNA, 20 nt, synthetic construct
  source 1..20: mol_type = other RNA
gagaactcagcttgagacac

SEQ ID NO: 15469 - RNA, 20 nt, synthetic construct
  source 1..20: mol_type = other RNA
ccgaactcaacttgtgacag

SEQ ID NO: 15470 - RNA, 20 nt, synthetic construct
  source 1..20: mol_type = other RNA
ctcagacccttagctccaag

SEQ ID NO: 15471 - RNA, 20 nt, synthetic construct
  source 1..20: mol_type = other RNA
cttctctcagacccttagct

SEQ ID NO: 15472 - RNA, 20 nt, synthetic construct
  source 1..20: mol_type = other RNA
gctcaatagaactaggagga

SEQ ID NO: 15473 - RNA, 20 nt, synthetic construct
  source 1..20: mol_type = other RNA
tcctagttctattgagcaga

SEQ ID NO: 15474 - RNA, 20 nt, synthetic construct
  source 1..20: mol_type = other RNA
cttctgctcaatagaactag

SEQ ID NO: 15475 - RNA, 20 nt, synthetic construct
  source 1..20: mol_type = other RNA
attgagcagaagggaaatct

SEQ ID NO: 15476 - RNA, 20 nt, synthetic construct
  source 1..20: mol_type = other RNA
cacctccagatttcccttct

SEQ ID NO: 15477 - RNA, 20 nt, synthetic construct
  source 1..20: mol_type = other RNA
taatgtgatcttctcacctc

SEQ ID NO: 15478 - RNA, 20 nt, synthetic construct
  source 1..20: mol_type = other RNA
tcataatgtgatcttctcac

SEQ ID NO: 15479 - RNA, 20 nt, synthetic construct
  source 1..20: mol_type = other RNA
gactttcttcataatgtgat

SEQ ID NO: 15480 - RNA, 20 nt, synthetic construct
  source 1..20: mol_type = other RNA
acaacaccaactaaacgtca

SEQ ID NO: 15481 - RNA, 20 nt, synthetic construct
  source 1..20: mol_type = other RNA
aactggaaagtctccattga

SEQ ID NO: 15482 - RNA, 20 nt, synthetic construct
  source 1..20: mol_type = other RNA
agttggaattccgttattct

SEQ ID NO: 15483 - RNA, 20 nt, synthetic construct
  source 1..20: mol_type = other RNA
gttattctggcttccacttc

SEQ ID NO: 15484 - RNA, 20 nt, synthetic construct
  source 1..20: mol_type = other RNA
ggaagtggaagccagaataa

SEQ ID NO: 15485 - RNA, 20 nt, synthetic construct
  source 1..20: mol_type = other RNA
cttcaggaagtggaagccag

SEQ ID NO: 15486 - RNA, 20 nt, synthetic construct
  source 1..20: mol_type = other RNA
ggcttccacttcctgaaggg

SEQ ID NO: 15487 - RNA, 20 nt, synthetic construct
  source 1..20: mol_type = other RNA
acttcctgaagggaaggttg

SEQ ID NO: 15488 - RNA, 20 nt, synthetic construct
  source 1..20: mol_type = other RNA
tgaagggaaggttgcgtttg

SEQ ID NO: 15489 - RNA, 20 nt, synthetic construct
  source 1..20: mol_type = other RNA
tcttgaacccagagagaaaa

SEQ ID NO: 15490 - RNA, 20 nt, synthetic construct
  source 1..20: mol_type = other RNA
ttcctcttgaacccagagag

SEQ ID NO: 15491 - RNA, 20 nt, synthetic construct
  source 1..20: mol_type = other RNA
ctctgggttcaagaggaaag

SEQ ID NO: 15492 - RNA, 20 nt, synthetic construct
  source 1..20: mol_type = other RNA
agaggaaagaataggtgctt

SEQ ID NO: 15493 - RNA, 20 nt, synthetic construct
  source 1..20: mol_type = other RNA
cctgtccataaataagcacc

SEQ ID NO: 15494 - RNA, 20 nt, synthetic construct
  source 1..20: mol_type = other RNA
atatctacgtatattccgat

SEQ ID NO: 15495 - RNA, 20 nt, synthetic construct
  source 1..20: mol_type = other RNA
gacaatcggaatatacgtag

SEQ ID NO: 15496 - RNA, 20 nt, synthetic construct
  source 1..20: mol_type = other RNA
gattgtcagaaaaacactcg

SEQ ID NO: 15497 - RNA, 20 nt, synthetic construct
  source 1..20: mol_type = other RNA
ggccactggtacttaggaac

SEQ ID NO: 15498 - RNA, 20 nt, synthetic construct
  source 1..20: mol_type = other RNA
taagtaccagtggcctgaag

SEQ ID NO: 15499 - RNA, 20 nt, synthetic construct
  source 1..20: mol_type = other RNA
cttgctgggaacctgtatcc

SEQ ID NO: 15500 - RNA, 20 nt, synthetic construct
  source 1..20: mol_type = other RNA
ttggatcttctcttgctggg

SEQ ID NO: 15501 - RNA, 20 nt, synthetic construct
  source 1..20: mol_type = other RNA
cagcaagagaagatccaagg

SEQ ID NO: 15502 - RNA, 20 nt, synthetic construct
  source 1..20: mol_type = other RNA
ttccttggatcttctcttgc

SEQ ID NO: 15503 - RNA, 20 nt, synthetic construct
  source 1..20: mol_type = other RNA
gcatccctctctgtgctgac

SEQ ID NO: 15504 - RNA, 20 nt, synthetic construct
  source 1..20: mol_type = other RNA
ctccatccacccatcccttt

SEQ ID NO: 15505 - RNA, 20 nt, synthetic construct
  source 1..20: mol_type = other RNA
atgtctctggtagtcgcttg

SEQ ID NO: 15506 - RNA, 20 nt, synthetic construct
  source 1..20: mol_type = other RNA
acatgtgggacaacagatgg

SEQ ID NO: 15507 - RNA, 20 nt, synthetic construct
  source 1..20: mol_type = other RNA
ctaggtcctctaccatctgt

SEQ ID NO: 15508 - RNA, 20 nt, synthetic construct
  source 1..20: mol_type = other RNA
tcctggatacccttcctgca

SEQ ID NO: 15509 - RNA, 20 nt, synthetic construct
  source 1..20: mol_type = other RNA
gtgcaggaagggtatccagg

SEQ ID NO: 15510 - RNA, 20 nt, synthetic construct
  source 1..20: mol_type = other RNA
tggatacccttcctgcactg

SEQ ID NO: 15511 - RNA, 20 nt, synthetic construct
  source 1..20: mol_type = other RNA
tgcactgaatagcaaggaga

SEQ ID NO: 15512 - RNA, 20 nt, synthetic construct
  source 1..20: mol_type = other RNA
gcaagatggctacagtctgc

SEQ ID NO: 15513 - RNA, 20 nt, synthetic construct
  source 1..20: mol_type = other RNA
gctaccacagtcatcccaaa

SEQ ID NO: 15514 - RNA, 20 nt, synthetic construct
  source 1..20: mol_type = other RNA
agcagacctagaaaaatttc

SEQ ID NO: 15515 - RNA, 20 nt, synthetic construct
  source 1..20: mol_type = other RNA
tatttctagcagacctagaa

SEQ ID NO: 15516 - RNA, 20 nt, synthetic construct
  source 1..20: mol_type = other RNA
aggtctgctagaaataagaa

SEQ ID NO: 15517 - RNA, 20 nt, synthetic construct
  source 1..20: mol_type = other RNA
tccacacaaaccagttctta

SEQ ID NO: 15518 - RNA, 20 nt, synthetic construct
  source 1..20: mol_type = other RNA
atgcgtatttgtagagctct

SEQ ID NO: 15519 - RNA, 20 nt, synthetic construct
  source 1..20: mol_type = other RNA
tgtgcacaggcagcgtcatg

SEQ ID NO: 15520 - RNA, 20 nt, synthetic construct
  source 1..20: mol_type = other RNA
cgtggaaccatttcctgtgc

SEQ ID NO: 15521 - RNA, 20 nt, synthetic construct
  source 1..20: mol_type = other RNA
ttgccacactttctcgtgga

SEQ ID NO: 15522 - RNA, 20 nt, synthetic construct
  source 1..20: mol_type = other RNA
acgagaaagtgtggcaaaga

SEQ ID NO: 15523 - RNA, 20 nt, synthetic construct
  source 1..20: mol_type = other RNA
cagtaaatgttctttgccac

SEQ ID NO: 15524 - RNA, 20 nt, synthetic construct
  source 1..20: mol_type = other RNA
tgtgctcttgtacttgctgt

SEQ ID NO: 15525 - RNA, 20 nt, synthetic construct
  source 1..20: mol_type = other RNA
ttattgagcttcctgtgctc

SEQ ID NO: 15526 - RNA, 20 nt, synthetic construct
  source 1..20: mol_type = other RNA
tcccagctagaccagagagt

SEQ ID NO: 15527 - RNA, 20 nt, synthetic construct
  source 1..20: mol_type = other RNA
cagctagaccagagagtcct

SEQ ID NO: 15528 - RNA, 20 nt, synthetic construct
  source 1..20: mol_type = other RNA
ggggtctccactgaattggc

SEQ ID NO: 15529 - RNA, 20 nt, synthetic construct
  source 1..20: mol_type = other RNA
gtggagaccccagaacagcc

SEQ ID NO: 15530 - RNA, 20 nt, synthetic construct
  source 1..20: mol_type = other RNA
agtaatatactaagtgtacc

SEQ ID NO: 15531 - RNA, 20 nt, synthetic construct
  source 1..20: mol_type = other RNA
agctgtgcaaggggttgtct

SEQ ID NO: 15532 - RNA, 20 nt, synthetic construct
  source 1..20: mol_type = other RNA
ttgattggaaaccgatttga

SEQ ID NO: 15533 - RNA, 20 nt, synthetic construct
  source 1..20: mol_type = other RNA
aatcaatgaagtgcctgtga

SEQ ID NO: 15534 - RNA, 20 nt, synthetic construct
  source 1..20: mol_type = other RNA
tctcacaggcacttcattga

SEQ ID NO: 15535 - RNA, 20 nt, synthetic construct
  source 1..20: mol_type = other RNA
aaagagagttgagatttcct

SEQ ID NO: 15536 - RNA, 20 nt, synthetic construct
  source 1..20: mol_type = other RNA
acatgtagtcagattttaaa

SEQ ID NO: 15537 - RNA, 20 nt, synthetic construct
  source 1..20: mol_type = other RNA
tggtcatgggtcacacgaaa

SEQ ID NO: 15538 - RNA, 20 nt, synthetic construct
  source 1..20: mol_type = other RNA
tgtgacccatgaccaggaaa

SEQ ID NO: 15539 - RNA, 20 nt, synthetic construct
  source 1..20: mol_type = other RNA
tgagcctgtttgtattaccc

SEQ ID NO: 15540 - RNA, 20 nt, synthetic construct
  source 1..20: mol_type = other RNA
ctcattcctgagcctgtttg

SEQ ID NO: 15541 - RNA, 20 nt, synthetic construct
  source 1..20: mol_type = other RNA
aatcatttctctcattcctg

SEQ ID NO: 15542 - RNA, 20 nt, synthetic construct
  source 1..20: mol_type = other RNA
cgcaattctaatcatttctc

SEQ ID NO: 15543 - RNA, 20 nt, synthetic construct
  source 1..20: mol_type = other RNA
aatatttaaaaaaacaacat

SEQ ID NO: 15544 - RNA, 20 nt, synthetic construct
  source 1..20: mol_type = other RNA
tgcatgttgtttttttaaat

SEQ ID NO: 15545 - RNA, 20 nt, synthetic construct
  source 1..20: mol_type = other RNA
cttgatatgatatctgcttt

SEQ ID NO: 15546 - RNA, 20 nt, synthetic construct
  source 1..20: mol_type = other RNA
gtactgttaatttctcttga

SEQ ID NO: 15547 - RNA, 20 nt, synthetic construct
  source 1..20: mol_type = other RNA
attaagacatacttttttta

SEQ ID NO: 15548 - RNA, 20 nt, synthetic construct
  source 1..20: mol_type = other RNA
tctgaaacgtctaaattgat

SEQ ID NO: 15549 - RNA, 20 nt, synthetic construct
  source 1..20: mol_type = other RNA
gaggaaaacattacccaaca

SEQ ID NO: 15550 - RNA, 20 nt, synthetic construct
  source 1..20: mol_type = other RNA
ctagaattgtgtgttgggta

SEQ ID NO: 15551 - RNA, 20 nt, synthetic construct
  source 1..20: mol_type = other RNA
gtaggttctctagaattgtg

SEQ ID NO: 15552 - RNA, 20 nt, synthetic construct
  source 1..20: mol_type = other RNA
agagaacctacagaatgagc

SEQ ID NO: 15553 - RNA, 20 nt, synthetic construct
  source 1..20: mol_type = other RNA
gtttgtgtgtgtgtgtgtgt

SEQ ID NO: 15554 - RNA, 20 nt, synthetic construct
  source 1..20: mol_type = other RNA
gcgtgtgtgtgagtatgggt

SEQ ID NO: 15555 - RNA, 20 nt, synthetic construct
  source 1..20: mol_type = other RNA
aacacacacagacacgcgca

SEQ ID NO: 15556 - RNA, 20 nt, synthetic construct
  source 1..20: mol_type = other RNA
ggggtgcgcgtgtctgtgtg

SEQ ID NO: 15557 - RNA, 20 nt, synthetic construct
  source 1..20: mol_type = other RNA
tcaggggtgcgcgtgtctgt

SEQ ID NO: 15558 - RNA, 20 nt, synthetic construct
  source 1..20: mol_type = other RNA
ctgtttcttcaggggtgcgc

SEQ ID NO: 15559 - RNA, 20 nt, synthetic construct
  source 1..20: mol_type = other RNA
tacatgtctgtgaggctcgc

SEQ ID NO: 15560 - RNA, 20 nt, synthetic construct
  source 1..20: mol_type = other RNA
tattttcctacatgtctgtg

SEQ ID NO: 15561 - RNA, 20 nt, synthetic construct
  source 1..20: mol_type = other RNA
cacatgcaggaaatcttttc

SEQ ID NO: 15562 - RNA, 20 nt, synthetic construct
  source 1..20: mol_type = other RNA
tgcatgtgggaagcaagtca

SEQ ID NO: 15563 - RNA, 20 nt, synthetic construct
  source 1..20: mol_type = other RNA
aaactcccttgctctttact

SEQ ID NO: 15564 - RNA, 20 nt, synthetic construct
  source 1..20: mol_type = other RNA
attccaaactcccttgctct

SEQ ID NO: 15565 - RNA, 20 nt, synthetic construct
  source 1..20: mol_type = other RNA
ggtatttgtttctattccaa

SEQ ID NO: 15566 - RNA, 20 nt, synthetic construct
  source 1..20: mol_type = other RNA
taattgaaaagttatcagcc

SEQ ID NO: 15567 - RNA, 20 nt, synthetic construct
  source 1..20: mol_type = other RNA
tcgtaattgaaaagttatca

SEQ ID NO: 15568 - RNA, 20 nt, synthetic construct
  source 1..20: mol_type = other RNA
attacgaagaacattaaaaa

SEQ ID NO: 15569 - RNA, 20 nt, synthetic construct
  source 1..20: mol_type = other RNA
gtgattttttttaatgttct

SEQ ID NO: 15570 - RNA, 20 nt, synthetic construct
  source 1..20: mol_type = other RNA
cgattctgtgatttttttta

SEQ ID NO: 15571 - RNA, 20 nt, synthetic construct
  source 1..20: mol_type = other RNA
ctatgtgatcccttgagttt

SEQ ID NO: 15572 - RNA, 20 nt, synthetic construct
  source 1..20: mol_type = other RNA
gaaattccctatgtgatccc

SEQ ID NO: 15573 - RNA, 20 nt, synthetic construct
  source 1..20: mol_type = other RNA
gaaaaaaaacccaacctgta

SEQ ID NO: 15574 - RNA, 20 nt, synthetic construct
  source 1..20: mol_type = other RNA
aactgtgatgtacaaaagta

SEQ ID NO: 15575 - RNA, 20 nt, synthetic construct
  source 1..20: mol_type = other RNA
aaggtaacaaggcaaagata

SEQ ID NO: 15576 - RNA, 20 nt, synthetic construct
  source 1..20: mol_type = other RNA
tattatatctttgccttgtt

SEQ ID NO: 15577 - RNA, 20 nt, synthetic construct
  source 1..20: mol_type = other RNA
tcttattatatctttgcctt

SEQ ID NO: 15578 - RNA, 20 nt, synthetic construct
  source 1..20: mol_type = other RNA
cgtgacaggtttcttcttat

SEQ ID NO: 15579 - RNA, 20 nt, synthetic construct
  source 1..20: mol_type = other RNA
tccagtttctcgtgacaggt

SEQ ID NO: 15580 - RNA, 20 nt, synthetic construct
  source 1..20: mol_type = other RNA
tacaagtacactgatacaaa

SEQ ID NO: 15581 - RNA, 20 nt, synthetic construct
  source 1..20: mol_type = other RNA
gaggtgaacacattggcaat

SEQ ID NO: 15582 - RNA, 20 nt, synthetic construct
  source 1..20: mol_type = other RNA
agtgtttctgaggtgaacac

SEQ ID NO: 15583 - RNA, 20 nt, synthetic construct
  source 1..20: mol_type = other RNA
cctcagaaacactggaagcc

SEQ ID NO: 15584 - RNA, 20 nt, synthetic construct
  source 1..20: mol_type = other RNA
ctggtatctggcttccagtg

SEQ ID NO: 15585 - RNA, 20 nt, synthetic construct
  source 1..20: mol_type = other RNA
tgattatcattttaacaata

SEQ ID NO: 15586 - RNA, 20 nt, synthetic construct
  source 1..20: mol_type = other RNA
cggttgatctctttttgttc

SEQ ID NO: 15587 - RNA, 20 nt, synthetic construct
  source 1..20: mol_type = other RNA
gcattcccggttgatctctt

SEQ ID NO: 15588 - RNA, 20 nt, synthetic construct
  source 1..20: mol_type = other RNA
aggcattttattgctggatt

SEQ ID NO: 15589 - RNA, 20 nt, synthetic construct
  source 1..20: mol_type = other RNA
ttggggcagtgcacaatatg

SEQ ID NO: 15590 - RNA, 20 nt, synthetic construct
  source 1..20: mol_type = other RNA
ttctttggggcagtgcacaa

SEQ ID NO: 15591 - RNA, 20 nt, synthetic construct
  source 1..20: mol_type = other RNA
ggtttctttctttggggcag

SEQ ID NO: 15592 - RNA, 20 nt, synthetic construct
  source 1..20: mol_type = other RNA
tacagtttccggtttctttc

SEQ ID NO: 15593 - RNA, 20 nt, synthetic construct
  source 1..20: mol_type = other RNA
aattcttacagtttccggtt

SEQ ID NO: 15594 - RNA, 20 nt, synthetic construct
  source 1..20: mol_type = other RNA
ggtcacctctcttgttacat

SEQ ID NO: 15595 - RNA, 20 nt, synthetic construct
  source 1..20: mol_type = other RNA
ttcgggtcacctctcttgtt

SEQ ID NO: 15596 - RNA, 20 nt, synthetic construct
  source 1..20: mol_type = other RNA
acctaattccttcgggtcac

SEQ ID NO: 15597 - RNA, 20 nt, synthetic construct
  source 1..20: mol_type = other RNA
tctacctaattccttcgggt

SEQ ID NO: 15598 - RNA, 20 nt, synthetic construct
  source 1..20: mol_type = other RNA
tcttctacctaattccttcg

SEQ ID NO: 15599 - RNA, 20 nt, synthetic construct
  source 1..20: mol_type = other RNA
attcttcttctacctaattc

SEQ ID NO: 15600 - RNA, 20 nt, synthetic construct
  source 1..20: mol_type = other RNA
tgttcaattcttcttctacc

SEQ ID NO: 15601 - RNA, 20 nt, synthetic construct
  source 1..20: mol_type = other RNA
tttcttgttcaattcttctt

SEQ ID NO: 15602 - RNA, 20 nt, synthetic construct
  source 1..20: mol_type = other RNA
ttacgtgggctgcagaaagt

SEQ ID NO: 15603 - RNA, 20 nt, synthetic construct
  source 1..20: mol_type = other RNA
tcattacgtgggctgcagaa

SEQ ID NO: 15604 - RNA, 20 nt, synthetic construct
  source 1..20: mol_type = other RNA
gcagcccacgtaatgaagaa

SEQ ID NO: 15605 - RNA, 20 nt, synthetic construct
  source 1..20: mol_type = other RNA
tgatcaaatttctatatctt

SEQ ID NO: 15606 - RNA, 20 nt, synthetic construct
  source 1..20: mol_type = other RNA
atatctttgtaaatgagagt

SEQ ID NO: 15607 - RNA, 20 nt, synthetic construct
  source 1..20: mol_type = other RNA
agtagtcaactctcatttac

SEQ ID NO: 15608 - RNA, 20 nt, synthetic construct
  source 1..20: mol_type = other RNA
tacctctacatatgctgaag

SEQ ID NO: 15609 - RNA, 20 nt, synthetic construct
  source 1..20: mol_type = other RNA
gcatatgtagaggtaagaat

SEQ ID NO: 15610 - RNA, 20 nt, synthetic construct
  source 1..20: mol_type = other RNA
aattcttacctctacatatg

SEQ ID NO: 15611 - RNA, 20 nt, synthetic construct
  source 1..20: mol_type = other RNA
tgatttatgctaccatttca

SEQ ID NO: 15612 - RNA, 20 nt, synthetic construct
  source 1..20: mol_type = other RNA
aattaatcccttcgtgattt

SEQ ID NO: 15613 - RNA, 20 nt, synthetic construct
  source 1..20: mol_type = other RNA
aagtgtaccgttgtaagttt

SEQ ID NO: 15614 - RNA, 20 nt, synthetic construct
  source 1..20: mol_type = other RNA
ttacctcatgcacgatggtg

SEQ ID NO: 15615 - RNA, 20 nt, synthetic construct
  source 1..20: mol_type = other RNA
aacccgcacagtaccctttt

SEQ ID NO: 15616 - RNA, 20 nt, synthetic construct
  source 1..20: mol_type = other RNA
aagggatattgcaaatccta

SEQ ID NO: 15617 - RNA, 20 nt, synthetic construct
  source 1..20: mol_type = other RNA
aacctttgtgattgctctag

SEQ ID NO: 15618 - RNA, 20 nt, synthetic construct
  source 1..20: mol_type = other RNA
tattataccaaaaacctcag

SEQ ID NO: 15619 - RNA, 20 nt, synthetic construct
  source 1..20: mol_type = other RNA
ctcttttgaatgcatggact

SEQ ID NO: 15620 - RNA, 20 nt, synthetic construct
  source 1..20: mol_type = other RNA
ttggcttccctcttttgaat

SEQ ID NO: 15621 - RNA, 20 nt, synthetic construct
  source 1..20: mol_type = other RNA
tccttggcttccctcttttg

SEQ ID NO: 15622 - RNA, 20 nt, synthetic construct
  source 1..20: mol_type = other RNA
aaagagggaagccaaggaag

SEQ ID NO: 15623 - RNA, 20 nt, synthetic construct
  source 1..20: mol_type = other RNA
agttcttccttggcttccct

SEQ ID NO: 15624 - RNA, 20 nt, synthetic construct
  source 1..20: mol_type = other RNA
agagctcaggctcttataca

SEQ ID NO: 15625 - RNA, 20 nt, synthetic construct
  source 1..20: mol_type = other RNA
atgagcaactggatgtataa

SEQ ID NO: 15626 - RNA, 20 nt, synthetic construct
  source 1..20: mol_type = other RNA
aggaagctggttcaatgagc

SEQ ID NO: 15627 - RNA, 20 nt, synthetic construct
  source 1..20: mol_type = other RNA
tggaatggagggtctggggt

SEQ ID NO: 15628 - RNA, 20 nt, synthetic construct
  source 1..20: mol_type = other RNA
aacactgtctctctagagac

SEQ ID NO: 15629 - RNA, 20 nt, synthetic construct
  source 1..20: mol_type = other RNA
cattttctcaggcagccaga

SEQ ID NO: 15630 - RNA, 20 nt, synthetic construct
  source 1..20: mol_type = other RNA
tgacctctggctgcctgaga

SEQ ID NO: 15631 - RNA, 20 nt, synthetic construct
  source 1..20: mol_type = other RNA
caggcagccagaggtcatga

SEQ ID NO: 15632 - RNA, 20 nt, synthetic construct
  source 1..20: mol_type = other RNA
ttatgcctcccaagaacgtt

SEQ ID NO: 15633 - RNA, 20 nt, synthetic construct
  source 1..20: mol_type = other RNA
ctcttccttatgcctcccaa

SEQ ID NO: 15634 - RNA, 20 nt, synthetic construct
  source 1..20: mol_type = other RNA
tgggaggcataaggaagagc

SEQ ID NO: 15635 - RNA, 20 nt, synthetic construct
  source 1..20: mol_type = other RNA
agatccccgcagcccaaact

SEQ ID NO: 15636 - RNA, 20 nt, synthetic construct
  source 1..20: mol_type = other RNA
ctgctgctccgtagctgtcc

SEQ ID NO: 15637 - RNA, 20 nt, synthetic construct
  source 1..20: mol_type = other RNA
gatctcttagtccaccctgc

SEQ ID NO: 15638 - RNA, 20 nt, synthetic construct
  source 1..20: mol_type = other RNA
tttatgccatgggtcccact

SEQ ID NO: 15639 - RNA, 20 nt, synthetic construct
  source 1..20: mol_type = other RNA
ttcaactcatccccctttcc

SEQ ID NO: 15640 - RNA, 20 nt, synthetic construct
  source 1..20: mol_type = other RNA
actcatccccctttccctca

SEQ ID NO: 15641 - RNA, 20 nt, synthetic construct
  source 1..20: mol_type = other RNA
ctcagtcccggagtagctgc

SEQ ID NO: 15642 - RNA, 20 nt, synthetic construct
  source 1..20: mol_type = other RNA
ctcctgctctcagtctaccc

SEQ ID NO: 15643 - RNA, 20 nt, synthetic construct
  source 1..20: mol_type = other RNA
taggcaggtccttctctcct

SEQ ID NO: 15644 - RNA, 20 nt, synthetic construct
  source 1..20: mol_type = other RNA
agagatactgcatcctgcct

SEQ ID NO: 15645 - RNA, 20 nt, synthetic construct
  source 1..20: mol_type = other RNA
caaagctgccctggaaaact

SEQ ID NO: 15646 - RNA, 20 nt, synthetic construct
  source 1..20: mol_type = other RNA
agggcagctttgagaagtct

SEQ ID NO: 15647 - RNA, 20 nt, synthetic construct
  source 1..20: mol_type = other RNA
ccaagacttctcaaagctgc

SEQ ID NO: 15648 - RNA, 20 nt, synthetic construct
  source 1..20: mol_type = other RNA
cacagaaaagcattgtgcaa

SEQ ID NO: 15649 - RNA, 20 nt, synthetic construct
  source 1..20: mol_type = other RNA
gtgggaaaggtagagccttt

SEQ ID NO: 15650 - RNA, 20 nt, synthetic construct
  source 1..20: mol_type = other RNA
ctacgtattgagtacataga

SEQ ID NO: 15651 - RNA, 20 nt, synthetic construct
  source 1..20: mol_type = other RNA
aggtcaaccctcacactcta

SEQ ID NO: 15652 - RNA, 20 nt, synthetic construct
  source 1..20: mol_type = other RNA
gaaaacgcacgtcatccagg

SEQ ID NO: 15653 - RNA, 20 nt, synthetic construct
  source 1..20: mol_type = other RNA
tcagaaaacgcacgtcatcc

SEQ ID NO: 15654 - RNA, 20 nt, synthetic construct
  source 1..20: mol_type = other RNA
gaagaactacatgttcgttg

SEQ ID NO: 15655 - RNA, 20 nt, synthetic construct
  source 1..20: mol_type = other RNA
aatgtgggagttgcaacgaa

SEQ ID NO: 15656 - RNA, 20 nt, synthetic construct
  source 1..20: mol_type = other RNA
ttgcaactcccacattagaa

SEQ ID NO: 15657 - RNA, 20 nt, synthetic construct
  source 1..20: mol_type = other RNA
tattctaatgtgggagttgc

SEQ ID NO: 15658 - RNA, 20 nt, synthetic construct
  source 1..20: mol_type = other RNA
catgcaaatgcatctgtatc

SEQ ID NO: 15659 - RNA, 20 nt, synthetic construct
  source 1..20: mol_type = other RNA
gcccaatccatctctctgga

SEQ ID NO: 15660 - RNA, 20 nt, synthetic construct
  source 1..20: mol_type = other RNA
agagagatggattgggcaga

SEQ ID NO: 15661 - RNA, 20 nt, synthetic construct
  source 1..20: mol_type = other RNA
gccttctgcccaatccatct

SEQ ID NO: 15662 - RNA, 20 nt, synthetic construct
  source 1..20: mol_type = other RNA
ccttctgccttctgcccaat

SEQ ID NO: 15663 - RNA, 20 nt, synthetic construct
  source 1..20: mol_type = other RNA
gccacgtgtgtgtgttatct

SEQ ID NO: 15664 - RNA, 20 nt, synthetic construct
  source 1..20: mol_type = other RNA
tagaaacactgagataacac

SEQ ID NO: 15665 - RNA, 20 nt, synthetic construct
  source 1..20: mol_type = other RNA
aagaagcgtttgctacttta

SEQ ID NO: 15666 - RNA, 20 nt, synthetic construct
  source 1..20: mol_type = other RNA
cattaaaagtaccatatgat

SEQ ID NO: 15667 - RNA, 20 nt, synthetic construct
  source 1..20: mol_type = other RNA
aatattcccattaaaagtac

SEQ ID NO: 15668 - RNA, 20 nt, synthetic construct
  source 1..20: mol_type = other RNA
aaaacgatacacgtcacaag

SEQ ID NO: 15669 - RNA, 20 nt, synthetic construct
  source 1..20: mol_type = other RNA
tgatcaagccactggaaatt

SEQ ID NO: 15670 - RNA, 20 nt, synthetic construct
  source 1..20: mol_type = other RNA
agtggcttgatcatgaacta

SEQ ID NO: 15671 - RNA, 20 nt, synthetic construct
  source 1..20: mol_type = other RNA
tgcagtagttcatgatcaag

SEQ ID NO: 15672 - RNA, 20 nt, synthetic construct
  source 1..20: mol_type = other RNA
gcgtctgagcattgcgtcag

SEQ ID NO: 15673 - RNA, 20 nt, synthetic construct
  source 1..20: mol_type = other RNA
gaaggagcctctaggcttgg

SEQ ID NO: 15674 - RNA, 20 nt, synthetic construct
  source 1..20: mol_type = other RNA
aagcctagaggctccttccg

SEQ ID NO: 15675 - RNA, 20 nt, synthetic construct
  source 1..20: mol_type = other RNA
gaacaaggtaaggagtctgt

SEQ ID NO: 15676 - RNA, 20 nt, synthetic construct
  source 1..20: mol_type = other RNA
tcccagcatcgaagcgtgta

SEQ ID NO: 15677 - RNA, 20 nt, synthetic construct
  source 1..20: mol_type = other RNA
atggcttttcatcccagcat

SEQ ID NO: 15678 - RNA, 20 nt, synthetic construct
  source 1..20: mol_type = other RNA
atgctgggatgaaaagccat

SEQ ID NO: 15679 - RNA, 20 nt, synthetic construct
  source 1..20: mol_type = other RNA
cactgatgcagccgccttca

SEQ ID NO: 15680 - RNA, 20 nt, synthetic construct
  source 1..20: mol_type = other RNA
atggtaaacggatgctcgag

SEQ ID NO: 15681 - RNA, 20 nt, synthetic construct
  source 1..20: mol_type = other RNA
tcctacatggtagaactcag

SEQ ID NO: 15682 - RNA, 20 nt, synthetic construct
  source 1..20: mol_type = other RNA
accatgtaggaggaagcctc

SEQ ID NO: 15683 - RNA, 20 nt, synthetic construct
  source 1..20: mol_type = other RNA
ggtgcaacgtggttgggctt

SEQ ID NO: 15684 - RNA, 20 nt, synthetic construct
  source 1..20: mol_type = other RNA
aaattcaccttgttgtaaaa

SEQ ID NO: 15685 - RNA, 20 nt, synthetic construct
  source 1..20: mol_type = other RNA
ccttgttgtaaaacgggcta

SEQ ID NO: 15686 - RNA, 20 nt, synthetic construct
  source 1..20: mol_type = other RNA
aagccagtaagcttttccgg

SEQ ID NO: 15687 - RNA, 20 nt, synthetic construct
  source 1..20: mol_type = other RNA
ggggatttcttcaagtagcc

SEQ ID NO: 15688 - RNA, 20 nt, synthetic construct
  source 1..20: mol_type = other RNA
tcaagtagccagcattcaga

SEQ ID NO: 15689 - RNA, 20 nt, synthetic construct
  source 1..20: mol_type = other RNA
agtagccagcattcagagca

SEQ ID NO: 15690 - RNA, 20 nt, synthetic construct
  source 1..20: mol_type = other RNA
gagcaatcttcagcattgca

SEQ ID NO: 15691 - RNA, 20 nt, synthetic construct
  source 1..20: mol_type = other RNA
cagaatctgcaatgctgaag

SEQ ID NO: 15692 - RNA, 20 nt, synthetic construct
  source 1..20: mol_type = other RNA
gcattgcagattctgagaaa

SEQ ID NO: 15693 - RNA, 20 nt, synthetic construct
  source 1..20: mol_type = other RNA
gagaaatgtggctctggagc

SEQ ID NO: 15694 - RNA, 20 nt, synthetic construct
  source 1..20: mol_type = other RNA
cgagggtgacaggctccaga

SEQ ID NO: 15695 - RNA, 20 nt, synthetic construct
  source 1..20: mol_type = other RNA
atgtggccctgggtctatgg

SEQ ID NO: 15696 - RNA, 20 nt, synthetic construct
  source 1..20: mol_type = other RNA
aagcctagggctgaagagcc

SEQ ID NO: 15697 - RNA, 20 nt, synthetic construct
  source 1..20: mol_type = other RNA
gccctaggctttgaagggag

SEQ ID NO: 15698 - RNA, 20 nt, synthetic construct
  source 1..20: mol_type = other RNA
cagtattcttaaacctcttt

SEQ ID NO: 15699 - RNA, 20 nt, synthetic construct
  source 1..20: mol_type = other RNA
taaacctctttctgatgaca

SEQ ID NO: 15700 - RNA, 20 nt, synthetic construct
  source 1..20: mol_type = other RNA
gatgacacttgtacctgtga

SEQ ID NO: 15701 - RNA, 20 nt, synthetic construct
  source 1..20: mol_type = other RNA
ctctagacccctcacaggta

SEQ ID NO: 15702 - RNA, 20 nt, synthetic construct
  source 1..20: mol_type = other RNA
ggatgcagggcatgagagga

SEQ ID NO: 15703 - RNA, 20 nt, synthetic construct
  source 1..20: mol_type = other RNA
cttggaggagagagggaatc

SEQ ID NO: 15704 - RNA, 20 nt, synthetic construct
  source 1..20: mol_type = other RNA
tcccttggaggagagaggga

SEQ ID NO: 15705 - RNA, 20 nt, synthetic construct
  source 1..20: mol_type = other RNA
ctctctcctccaagggaaga

SEQ ID NO: 15706 - RNA, 20 nt, synthetic construct
  source 1..20: mol_type = other RNA
cagggatgtgtgcacgccaa

SEQ ID NO: 15707 - RNA, 20 nt, synthetic construct
  source 1..20: mol_type = other RNA
gtcagatacataggaccgtt

SEQ ID NO: 15708 - RNA, 20 nt, synthetic construct
  source 1..20: mol_type = other RNA
gggccatggggcagaaaacg

SEQ ID NO: 15709 - RNA, 20 nt, synthetic construct
  source 1..20: mol_type = other RNA
gccccatggcccggaagcca

SEQ ID NO: 15710 - RNA, 20 nt, synthetic construct
  source 1..20: mol_type = other RNA
ctagaccgttgatcatgaaa

SEQ ID NO: 15711 - RNA, 20 nt, synthetic construct
  source 1..20: mol_type = other RNA
tgatcaacggtctagggaaa

SEQ ID NO: 15712 - RNA, 20 nt, synthetic construct
  source 1..20: mol_type = other RNA
atgtctgtcccaaactctgc

SEQ ID NO: 15713 - RNA, 20 nt, synthetic construct
  source 1..20: mol_type = other RNA
tgcaaacggcaccgcatttg

SEQ ID NO: 15714 - RNA, 20 nt, synthetic construct
  source 1..20: mol_type = other RNA
aggaaactctactgaatctt

SEQ ID NO: 15715 - RNA, 20 nt, synthetic construct
  source 1..20: mol_type = other RNA
gtagagtttcctagaaaggt

SEQ ID NO: 15716 - RNA, 20 nt, synthetic construct
  source 1..20: mol_type = other RNA
tagaaaggtgctacctcgtg

SEQ ID NO: 15717 - RNA, 20 nt, synthetic construct
  source 1..20: mol_type = other RNA
tcattggaaagtgagctcac

SEQ ID NO: 15718 - RNA, 20 nt, synthetic construct
  source 1..20: mol_type = other RNA
aatgaggaatctgatctgtt

SEQ ID NO: 15719 - RNA, 20 nt, synthetic construct
  source 1..20: mol_type = other RNA
cctgacaccttagagaaaca

SEQ ID NO: 15720 - RNA, 20 nt, synthetic construct
  source 1..20: mol_type = other RNA
ctaaggtgtcaggtgaaata

SEQ ID NO: 15721 - RNA, 20 nt, synthetic construct
  source 1..20: mol_type = other RNA
tggaaatatttcacctgaca

SEQ ID NO: 15722 - RNA, 20 nt, synthetic construct
  source 1..20: mol_type = other RNA
agaactgtagtaagttcttg

SEQ ID NO: 15723 - RNA, 20 nt, synthetic construct
  source 1..20: mol_type = other RNA
aagaacttactacagttcta

SEQ ID NO: 15724 - RNA, 20 nt, synthetic construct
  source 1..20: mol_type = other RNA
tcccattctagaactgtagt

SEQ ID NO: 15725 - RNA, 20 nt, synthetic construct
  source 1..20: mol_type = other RNA
agaatgggaggaatctgttg

SEQ ID NO: 15726 - RNA, 20 nt, synthetic construct
  source 1..20: mol_type = other RNA
cacatccatctgcctatgga

SEQ ID NO: 15727 - RNA, 20 nt, synthetic construct
  source 1..20: mol_type = other RNA
ttatccataggcagatggat

SEQ ID NO: 15728 - RNA, 20 nt, synthetic construct
  source 1..20: mol_type = other RNA
cttttccttatccataggca

SEQ ID NO: 15729 - RNA, 20 nt, synthetic construct
  source 1..20: mol_type = other RNA
catagactcctttctggttg

SEQ ID NO: 15730 - RNA, 20 nt, synthetic construct
  source 1..20: mol_type = other RNA
ggttgtgtcacaaatggctt

SEQ ID NO: 15731 - RNA, 20 nt, synthetic construct
  source 1..20: mol_type = other RNA
catgtttctctatgctcaga

SEQ ID NO: 15732 - RNA, 20 nt, synthetic construct
  source 1..20: mol_type = other RNA
ctatgctcagagatactcag

SEQ ID NO: 15733 - RNA, 20 nt, synthetic construct
  source 1..20: mol_type = other RNA
cgtgttttcatttcagcacc

SEQ ID NO: 15734 - RNA, 20 nt, synthetic construct
  source 1..20: mol_type = other RNA
tttcagcaccgactgagcaa

SEQ ID NO: 15735 - RNA, 20 nt, synthetic construct
  source 1..20: mol_type = other RNA
gcaccgactgagcaaaggcc

SEQ ID NO: 15736 - RNA, 20 nt, synthetic construct
  source 1..20: mol_type = other RNA
tgtgacagtggtggagtatg

SEQ ID NO: 15737 - RNA, 20 nt, synthetic construct
  source 1..20: mol_type = other RNA
tcctgtgacagtggtggagt

SEQ ID NO: 15738 - RNA, 20 nt, synthetic construct
  source 1..20: mol_type = other RNA
ggggtccgactatgcgagtg

SEQ ID NO: 15739 - RNA, 20 nt, synthetic construct
  source 1..20: mol_type = other RNA
cttatggtaaagaacaaaga

SEQ ID NO: 15740 - RNA, 20 nt, synthetic construct
  source 1..20: mol_type = other RNA
tctcttatggtaaagaacaa

SEQ ID NO: 15741 - RNA, 20 nt, synthetic construct
  source 1..20: mol_type = other RNA
ttaccataagagaagaaagg

SEQ ID NO: 15742 - RNA, 20 nt, synthetic construct
  source 1..20: mol_type = other RNA
cttggccctttcttctctta

SEQ ID NO: 15743 - RNA, 20 nt, synthetic construct
  source 1..20: mol_type = other RNA
gttacaagagatgtgtctca

SEQ ID NO: 15744 - RNA, 20 nt, synthetic construct
  source 1..20: mol_type = other RNA
gagaactcagcttgagacac

SEQ ID NO: 15745 - RNA, 20 nt, synthetic construct
  source 1..20: mol_type = other RNA
ccgaactcaacttgtgacag

SEQ ID NO: 15746 - RNA, 20 nt, synthetic construct
  source 1..20: mol_type = other RNA
ctcagacccttagctccaag

SEQ ID NO: 15747 - RNA, 20 nt, synthetic construct
  source 1..20: mol_type = other RNA
cttctctcagacccttagct

SEQ ID NO: 15748 - RNA, 20 nt, synthetic construct
  source 1..20: mol_type = other RNA
gctcaatagaactaggagga

SEQ ID NO: 15749 - RNA, 20 nt, synthetic construct
  source 1..20: mol_type = other RNA
tcctagttctattgagcaga

SEQ ID NO: 15750 - RNA, 20 nt, synthetic construct
  source 1..20: mol_type = other RNA
cttctgctcaatagaactag

SEQ ID NO: 15751 - RNA, 20 nt, synthetic construct
  source 1..20: mol_type = other RNA
attgagcagaagggaaatct

SEQ ID NO: 15752 - RNA, 20 nt, synthetic construct
  source 1..20: mol_type = other RNA
taatgtgatctcctcacctc

SEQ ID NO: 15753 - RNA, 20 nt, synthetic construct
  source 1..20: mol_type = other RNA
tcataatgtgatctcctcac

SEQ ID NO: 15754 - RNA, 20 nt, synthetic construct
  source 1..20: mol_type = other RNA
gactttcttcataatgtgat

SEQ ID NO: 15755 - RNA, 20 nt, synthetic construct
  source 1..20: mol_type = other RNA
acaacaccaactaaacgtca

SEQ ID NO: 15756 - RNA, 20 nt, synthetic construct
  source 1..20: mol_type = other RNA
aactggaaagtctccattga

SEQ ID NO: 15757 - RNA, 20 nt, synthetic construct
  source 1..20: mol_type = other RNA
agttggaattccgttattct

SEQ ID NO: 15758 - RNA, 20 nt, synthetic construct
  source 1..20: mol_type = other RNA
gttattctggcttccacttc

SEQ ID NO: 15759 - RNA, 20 nt, synthetic construct
  source 1..20: mol_type = other RNA
ggaagtggaagccagaataa

SEQ ID NO: 15760 - RNA, 20 nt, synthetic construct
  source 1..20: mol_type = other RNA
cttcaggaagtggaagccag

SEQ ID NO: 15761 - RNA, 20 nt, synthetic construct
  source 1..20: mol_type = other RNA
ggcttccacttcctgaaggg

SEQ ID NO: 15762 - RNA, 20 nt, synthetic construct
  source 1..20: mol_type = other RNA
acttcctgaagggaaggttg

SEQ ID NO: 15763 - RNA, 20 nt, synthetic construct
  source 1..20: mol_type = other RNA
tgaagggaaggttgcgtttg

SEQ ID NO: 15764 - RNA, 20 nt, synthetic construct
  source 1..20: mol_type = other RNA
tcttgaacccagagagaaaa

SEQ ID NO: 15765 - RNA, 20 nt, synthetic construct
  source 1..20: mol_type = other RNA
ttcctcttgaacccagagag

SEQ ID NO: 15766 - RNA, 20 nt, synthetic construct
  source 1..20: mol_type = other RNA
ctctgggttcaagaggaaag

SEQ ID NO: 15767 - RNA, 20 nt, synthetic construct
  source 1..20: mol_type = other RNA
agaggaaagaataggtgctt

SEQ ID NO: 15768 - RNA, 20 nt, synthetic construct
  source 1..20: mol_type = other RNA
cctgtccataaataagcacc

SEQ ID NO: 15769 - RNA, 20 nt, synthetic construct
  source 1..20: mol_type = other RNA
atatctacgtatattccgat

SEQ ID NO: 15770 - RNA, 20 nt, synthetic construct
  source 1..20: mol_type = other RNA
gacaatcggaatatacgtag

SEQ ID NO: 15771 - RNA, 20 nt, synthetic construct
  source 1..20: mol_type = other RNA
gattgtcagaaaaacactcg

SEQ ID NO: 15772 - RNA, 20 nt, synthetic construct
  source 1..20: mol_type = other RNA
ggccactggtacttaggaac

SEQ ID NO: 15773 - RNA, 20 nt, synthetic construct
  source 1..20: mol_type = other RNA
taagtaccagtggcctgaag

SEQ ID NO: 15774 - RNA, 20 nt, synthetic construct
  source 1..20: mol_type = other RNA
cttgctgggaacctgtatcc

SEQ ID NO: 15775 - RNA, 20 nt, synthetic construct
  source 1..20: mol_type = other RNA
ttggatcttctcttgctggg

SEQ ID NO: 15776 - RNA, 20 nt, synthetic construct
  source 1..20: mol_type = other RNA
cagcaagagaagatccaagg

SEQ ID NO: 15777 - RNA, 20 nt, synthetic construct
  source 1..20: mol_type = other RNA
ttccttggatcttctcttgc

SEQ ID NO: 15778 - RNA, 20 nt, synthetic construct
  source 1..20: mol_type = other RNA
gcatccctctctgtgctgac

SEQ ID NO: 15779 - RNA, 20 nt, synthetic construct
  source 1..20: mol_type = other RNA
ctccatccacccatcccttt

SEQ ID NO: 15780 - RNA, 20 nt, synthetic construct
  source 1..20: mol_type = other RNA
atgtctctggtagtcgcttg

SEQ ID NO: 15781 - RNA, 20 nt, synthetic construct
  source 1..20: mol_type = other RNA
acatgtgggacaacagatgg

SEQ ID NO: 15782 - RNA, 20 nt, synthetic construct
  source 1..20: mol_type = other RNA
ctaggtcctctaccatctgt

SEQ ID NO: 15783 - RNA, 20 nt, synthetic construct
  source 1..20: mol_type = other RNA
tcctggatacccttcctgca

SEQ ID NO: 15784 - RNA, 20 nt, synthetic construct
  source 1..20: mol_type = other RNA
gtgcaggaagggtatccagg

SEQ ID NO: 15785 - RNA, 20 nt, synthetic construct
  source 1..20: mol_type = other RNA
tggatacccttcctgcactg

SEQ ID NO: 15786 - RNA, 20 nt, synthetic construct
  source 1..20: mol_type = other RNA
tgcactgaatagcaaggaga

SEQ ID NO: 15787 - RNA, 20 nt, synthetic construct
  source 1..20: mol_type = other RNA
gcaagatggctacagtctgc

SEQ ID NO: 15788 - RNA, 20 nt, synthetic construct
  source 1..20: mol_type = other RNA
gctaccacagtcatcccaaa

SEQ ID NO: 15789 - RNA, 20 nt, synthetic construct
  source 1..20: mol_type = other RNA
agcagacctagaaaaatttc

SEQ ID NO: 15790 - RNA, 20 nt, synthetic construct
  source 1..20: mol_type = other RNA
tatttctagcagacctagaa

SEQ ID NO: 15791 - RNA, 20 nt, synthetic construct
  source 1..20: mol_type = other RNA
aggtctgctagaaataagaa

SEQ ID NO: 15792 - RNA, 20 nt, synthetic construct
  source 1..20: mol_type = other RNA
tccacacaaaccagttctta

SEQ ID NO: 15793 - RNA, 20 nt, synthetic construct
  source 1..20: mol_type = other RNA
atgcgtatttgtagagctct

SEQ ID NO: 15794 - RNA, 20 nt, synthetic construct
  source 1..20: mol_type = other RNA
tgtgcacaggcagcgtcatg

SEQ ID NO: 15795 - RNA, 20 nt, synthetic construct
  source 1..20: mol_type = other RNA
cgtggaaccatttcctgtgc

SEQ ID NO: 15796 - RNA, 20 nt, synthetic construct
  source 1..20: mol_type = other RNA
ttgccacactttctcgtgga

SEQ ID NO: 15797 - RNA, 20 nt, synthetic construct
  source 1..20: mol_type = other RNA
acgagaaagtgtggcaaaga

SEQ ID NO: 15798 - RNA, 20 nt, synthetic construct
  source 1..20: mol_type = other RNA
cagtaaatgttctttgccac

SEQ ID NO: 15799 - RNA, 20 nt, synthetic construct
  source 1..20: mol_type = other RNA
tgtgctcttgtacttgctgt

SEQ ID NO: 15800 - RNA, 20 nt, synthetic construct
  source 1..20: mol_type = other RNA
ttattgagcttcctgtgctc

SEQ ID NO: 15801 - RNA, 20 nt, synthetic construct
  source 1..20: mol_type = other RNA
tcccagctagaccagagagt

SEQ ID NO: 15802 - RNA, 20 nt, synthetic construct
  source 1..20: mol_type = other RNA
cagctagaccagagagtcct

SEQ ID NO: 15803 - RNA, 20 nt, synthetic construct
  source 1..20: mol_type = other RNA
ggggtctccactgaattggc

SEQ ID NO: 15804 - RNA, 20 nt, synthetic construct
  source 1..20: mol_type = other RNA
gtggagaccccagaacagcc

SEQ ID NO: 15805 - RNA, 20 nt, synthetic construct
  source 1..20: mol_type = other RNA
aagtgtacctttaaattacg

SEQ ID NO: 15806 - RNA, 20 nt, synthetic construct
  source 1..20: mol_type = other RNA
agtaatattctaagtgtacc

SEQ ID NO: 15807 - RNA, 20 nt, synthetic construct
  source 1..20: mol_type = other RNA
agctgtgcaaggggttgtct

SEQ ID NO: 15808 - RNA, 20 nt, synthetic construct
  source 1..20: mol_type = other RNA
ttgattggaaaccgatttga

SEQ ID NO: 15809 - RNA, 20 nt, synthetic construct
  source 1..20: mol_type = other RNA
aatcaatgaagtgcctgtga

SEQ ID NO: 15810 - RNA, 20 nt, synthetic construct
  source 1..20: mol_type = other RNA
tctcacaggcacttcattga

SEQ ID NO: 15811 - RNA, 20 nt, synthetic construct
  source 1..20: mol_type = other RNA
aaagagagttgagatttcct

SEQ ID NO: 15812 - RNA, 20 nt, synthetic construct
  source 1..20: mol_type = other RNA
acatgtagtcagattttaaa

SEQ ID NO: 15813 - RNA, 20 nt, synthetic construct
  source 1..20: mol_type = other RNA
tggtcatgggtcacacgaaa

SEQ ID NO: 15814 - RNA, 20 nt, synthetic construct
  source 1..20: mol_type = other RNA
tgtgacccatgaccaggaaa

SEQ ID NO: 15815 - RNA, 20 nt, synthetic construct
  source 1..20: mol_type = other RNA
tgagcctgtttgtattaccc

SEQ ID NO: 15816 - RNA, 20 nt, synthetic construct
  source 1..20: mol_type = other RNA
ctcattcctgagcctgtttg

SEQ ID NO: 15817 - RNA, 20 nt, synthetic construct
  source 1..20: mol_type = other RNA
aatcatttctctcattcctg

SEQ ID NO: 15818 - RNA, 20 nt, synthetic construct
  source 1..20: mol_type = other RNA
cgcaattctaatcatttctc

SEQ ID NO: 15819 - RNA, 20 nt, synthetic construct
  source 1..20: mol_type = other RNA
aatatttaaaaaaacaacat

SEQ ID NO: 15820 - RNA, 20 nt, synthetic construct
  source 1..20: mol_type = other RNA
tgcatgttgtttttttaaat

SEQ ID NO: 15821 - RNA, 20 nt, synthetic construct
  source 1..20: mol_type = other RNA
cttgatatgatatctgcttt

SEQ ID NO: 15822 - RNA, 20 nt, synthetic construct
  source 1..20: mol_type = other RNA
gtactgttaatttctcttga

SEQ ID NO: 15823 - RNA, 20 nt, synthetic construct
  source 1..20: mol_type = other RNA
attaagacatacttttttta

SEQ ID NO: 15824 - RNA, 20 nt, synthetic construct
  source 1..20: mol_type = other RNA
tctgaaacgtctaatttgat

SEQ ID NO: 15825 - RNA, 20 nt, synthetic construct
  source 1..20: mol_type = other RNA
gaggaaaacattacccaaca

SEQ ID NO: 15826 - RNA, 20 nt, synthetic construct
  source 1..20: mol_type = other RNA
ctaaaattgtgtgttgggta

SEQ ID NO: 15827 - RNA, 20 nt, synthetic construct
  source 1..20: mol_type = other RNA
gtaggttctctaaaattgtg

SEQ ID NO: 15828 - RNA, 20 nt, synthetic construct
  source 1..20: mol_type = other RNA
gtttgtgtgtgtgtgtgtgt

SEQ ID NO: 15829 - RNA, 20 nt, synthetic construct
  source 1..20: mol_type = other RNA
gcgtgtgtgtgagtatgggt

SEQ ID NO: 15830 - RNA, 20 nt, synthetic construct
  source 1..20: mol_type = other RNA
aacacacacagacacgcgca

SEQ ID NO: 15831 - RNA, 20 nt, synthetic construct
  source 1..20: mol_type = other RNA
ggggtgcgcgtgtctgtgtg

SEQ ID NO: 15832 - RNA, 20 nt, synthetic construct
  source 1..20: mol_type = other RNA
tcaggggtgcgcgtgtctgt

SEQ ID NO: 15833 - RNA, 20 nt, synthetic construct
  source 1..20: mol_type = other RNA
ctgtttcttcaggggtgcgc

SEQ ID NO: 15834 - RNA, 20 nt, synthetic construct
  source 1..20: mol_type = other RNA
tacatgtctgtgaggctcgc

SEQ ID NO: 15835 - RNA, 20 nt, synthetic construct
  source 1..20: mol_type = other RNA
tattttcctacatgtctgtg

SEQ ID NO: 15836 - RNA, 20 nt, synthetic construct
  source 1..20: mol_type = other RNA
cacatgcaggaaatcttttc

SEQ ID NO: 15837 - RNA, 20 nt, synthetic construct
  source 1..20: mol_type = other RNA
tgcatgtgggaagcaagtca

SEQ ID NO: 15838 - RNA, 20 nt, synthetic construct
  source 1..20: mol_type = other RNA
attataaactcccttgctct

SEQ ID NO: 15839 - RNA, 20 nt, synthetic construct
  source 1..20: mol_type = other RNA
ggtatttgtttctattataa

SEQ ID NO: 15840 - RNA, 20 nt, synthetic construct
  source 1..20: mol_type = other RNA
taattgaaaagttatcagcc

SEQ ID NO: 15841 - RNA, 20 nt, synthetic construct
  source 1..20: mol_type = other RNA
tcgtaattgaaaagttatca

SEQ ID NO: 15842 - RNA, 20 nt, synthetic construct
  source 1..20: mol_type = other RNA
attacgaagaacattaaaaa

SEQ ID NO: 15843 - RNA, 20 nt, synthetic construct
  source 1..20: mol_type = other RNA
gtgattttttttaatgttct

SEQ ID NO: 15844 - RNA, 20 nt, synthetic construct
  source 1..20: mol_type = other RNA
cgattctgtgatttttttta

SEQ ID NO: 15845 - RNA, 20 nt, synthetic construct
  source 1..20: mol_type = other RNA
ctatatgatcccttgagttt

SEQ ID NO: 15846 - RNA, 20 nt, synthetic construct
  source 1..20: mol_type = other RNA
gaaattccctatatgatccc

SEQ ID NO: 15847 - RNA, 20 nt, synthetic construct
  source 1..20: mol_type = other RNA
gaaaaaaaacccaacctgta

SEQ ID NO: 15848 - RNA, 20 nt, synthetic construct
  source 1..20: mol_type = other RNA
aactgtgatgtacaaaagta

SEQ ID NO: 15849 - RNA, 20 nt, synthetic construct
  source 1..20: mol_type = other RNA
aaggtaacaaggcaaagatg

SEQ ID NO: 15850 - RNA, 20 nt, synthetic construct
  source 1..20: mol_type = other RNA
tattacatctttgccttgtt

SEQ ID NO: 15851 - RNA, 20 nt, synthetic construct
  source 1..20: mol_type = other RNA
tcttattacatctttgcctt

SEQ ID NO: 15852 - RNA, 20 nt, synthetic construct
  source 1..20: mol_type = other RNA
cgtgacaggtttcttcttat

SEQ ID NO: 15853 - RNA, 20 nt, synthetic construct
  source 1..20: mol_type = other RNA
tccagtttctcgtgacaggt

SEQ ID NO: 15854 - RNA, 20 nt, synthetic construct
  source 1..20: mol_type = other RNA
tacaagtacactgatacaaa

SEQ ID NO: 15855 - RNA, 20 nt, synthetic construct
  source 1..20: mol_type = other RNA
gaggtgaacacattggcaat

SEQ ID NO: 15856 - RNA, 20 nt, synthetic construct
  source 1..20: mol_type = other RNA
agtgtttctgaggtgaacac

SEQ ID NO: 15857 - RNA, 20 nt, synthetic construct
  source 1..20: mol_type = other RNA
cctcagaaacactggaagcc

SEQ ID NO: 15858 - RNA, 20 nt, synthetic construct
  source 1..20: mol_type = other RNA
ctggtatctggcttccagtg

SEQ ID NO: 15859 - RNA, 20 nt, synthetic construct
  source 1..20: mol_type = other RNA
tgattatcattttaacaata

SEQ ID NO: 15860 - RNA, 20 nt, synthetic construct
  source 1..20: mol_type = other RNA
cggttgatctctttttgttc

SEQ ID NO: 15861 - RNA, 20 nt, synthetic construct
  source 1..20: mol_type = other RNA
gcattcccggttgatctctt

SEQ ID NO: 15862 - RNA, 20 nt, synthetic construct
  source 1..20: mol_type = other RNA
aggcattttattgctggatt

SEQ ID NO: 15863 - RNA, 20 nt, synthetic construct
  source 1..20: mol_type = other RNA
ttggggcagtgcacaatatg

SEQ ID NO: 15864 - RNA, 20 nt, synthetic construct
  source 1..20: mol_type = other RNA
ttctttggggcagtgcacaa

SEQ ID NO: 15865 - RNA, 20 nt, synthetic construct
  source 1..20: mol_type = other RNA
ggtttctttctttggggcag

SEQ ID NO: 15866 - RNA, 20 nt, synthetic construct
  source 1..20: mol_type = other RNA
tacagtttccggtttctttc

SEQ ID NO: 15867 - RNA, 20 nt, synthetic construct
  source 1..20: mol_type = other RNA
aattcttacagtttccggtt

SEQ ID NO: 15868 - RNA, 20 nt, synthetic construct
  source 1..20: mol_type = other RNA
ggtcacctctcttgttacat

SEQ ID NO: 15869 - RNA, 20 nt, synthetic construct
  source 1..20: mol_type = other RNA
ttcgggtcacctctcttgtt

SEQ ID NO: 15870 - RNA, 20 nt, synthetic construct
  source 1..20: mol_type = other RNA
acctaattccttcgggtcac

SEQ ID NO: 15871 - RNA, 20 nt, synthetic construct
  source 1..20: mol_type = other RNA
tctacctaattccttcgggt

SEQ ID NO: 15872 - RNA, 20 nt, synthetic construct
  source 1..20: mol_type = other RNA
tcttctacctaattccttcg

SEQ ID NO: 15873 - RNA, 20 nt, synthetic construct
  source 1..20: mol_type = other RNA
attcttcttctacctaattc

SEQ ID NO: 15874 - RNA, 20 nt, synthetic construct
  source 1..20: mol_type = other RNA
tgttcaattcttcttctacc

SEQ ID NO: 15875 - RNA, 20 nt, synthetic construct
  source 1..20: mol_type = other RNA
tttcttgttcaattcttctt

SEQ ID NO: 15876 - RNA, 20 nt, synthetic construct
  source 1..20: mol_type = other RNA
ttacgtgggctgcagaaagt

SEQ ID NO: 15877 - RNA, 20 nt, synthetic construct
  source 1..20: mol_type = other RNA
tcattacgtgggctgcagaa

SEQ ID NO: 15878 - RNA, 20 nt, synthetic construct
  source 1..20: mol_type = other RNA
gcagcccacgtaatgaagaa

SEQ ID NO: 15879 - RNA, 20 nt, synthetic construct
  source 1..20: mol_type = other RNA
tgatcaaatttctatatctt

SEQ ID NO: 15880 - RNA, 20 nt, synthetic construct
  source 1..20: mol_type = other RNA
atatctttgtaaatgagagt

SEQ ID NO: 15881 - RNA, 20 nt, synthetic construct
  source 1..20: mol_type = other RNA
agtagtcaactctcatttac

SEQ ID NO: 15882 - RNA, 20 nt, synthetic construct
  source 1..20: mol_type = other RNA
tacctctacatatgctgaag

SEQ ID NO: 15883 - RNA, 20 nt, synthetic construct
  source 1..20: mol_type = other RNA
gcatatgtagaggtaagaat

SEQ ID NO: 15884 - RNA, 20 nt, synthetic construct
  source 1..20: mol_type = other RNA
aattcttacctctacatatg

SEQ ID NO: 15885 - RNA, 20 nt, synthetic construct
  source 1..20: mol_type = other RNA
tgatttatgctaccatttca

SEQ ID NO: 15886 - RNA, 20 nt, synthetic construct
  source 1..20: mol_type = other RNA
aattaatcccttcgtgattt

SEQ ID NO: 15887 - RNA, 20 nt, synthetic construct
  source 1..20: mol_type = other RNA
aagtgtaccgttgtaagttt

SEQ ID NO: 15888 - RNA, 20 nt, synthetic construct
  source 1..20: mol_type = other RNA
ttacctcatgcacgatggtg

SEQ ID NO: 15889 - RNA, 20 nt, synthetic construct
  source 1..20: mol_type = other RNA
aacccgcacagtaccctttt

SEQ ID NO: 15890 - RNA, 20 nt, synthetic construct
  source 1..20: mol_type = other RNA
aagggatattgcaaatccta

SEQ ID NO: 15891 - RNA, 20 nt, synthetic construct
  source 1..20: mol_type = other RNA
aacctttgtgattgctctag

SEQ ID NO: 15892 - RNA, 20 nt, synthetic construct
  source 1..20: mol_type = other RNA
tattataccaaaaacctcag

SEQ ID NO: 15893 - RNA, 20 nt, synthetic construct
  source 1..20: mol_type = other RNA
ctcttttgaatgcatggact

SEQ ID NO: 15894 - RNA, 20 nt, synthetic construct
  source 1..20: mol_type = other RNA
ttggcttccctcttttgaat

SEQ ID NO: 15895 - RNA, 20 nt, synthetic construct
  source 1..20: mol_type = other RNA
tccttggcttccctcttttg

SEQ ID NO: 15896 - RNA, 20 nt, synthetic construct
  source 1..20: mol_type = other RNA
aaagagggaagccaaggaag

SEQ ID NO: 15897 - RNA, 20 nt, synthetic construct
  source 1..20: mol_type = other RNA
agttcttccttggcttccct

SEQ ID NO: 15898 - RNA, 20 nt, synthetic construct
  source 1..20: mol_type = other RNA
agagctcaggctcttataca

SEQ ID NO: 15899 - RNA, 20 nt, synthetic construct
  source 1..20: mol_type = other RNA
atgagcaactggatgtataa

SEQ ID NO: 15900 - RNA, 20 nt, synthetic construct
  source 1..20: mol_type = other RNA
aggaagctggttcaatgagc

SEQ ID NO: 15901 - RNA, 20 nt, synthetic construct
  source 1..20: mol_type = other RNA
tggaatggagggtctggggt

SEQ ID NO: 15902 - RNA, 20 nt, synthetic construct
  source 1..20: mol_type = other RNA
aacactgtctctctagagac

SEQ ID NO: 15903 - RNA, 20 nt, synthetic construct
  source 1..20: mol_type = other RNA
cattttctcaggcagccaga

SEQ ID NO: 15904 - RNA, 20 nt, synthetic construct
  source 1..20: mol_type = other RNA
tgacctctggctgcctgaga

SEQ ID NO: 15905 - RNA, 20 nt, synthetic construct
  source 1..20: mol_type = other RNA
caggcagccagaggtcatga

SEQ ID NO: 15906 - RNA, 20 nt, synthetic construct
  source 1..20: mol_type = other RNA
ttatgcctcccaagaacgtt

SEQ ID NO: 15907 - RNA, 20 nt, synthetic construct
  source 1..20: mol_type = other RNA
ctcttccttatgcctcccaa

SEQ ID NO: 15908 - RNA, 20 nt, synthetic construct
  source 1..20: mol_type = other RNA
tgggaggcataaggaagagc

SEQ ID NO: 15909 - RNA, 20 nt, synthetic construct
  source 1..20: mol_type = other RNA
agatccccgcagcccaaact

SEQ ID NO: 15910 - RNA, 20 nt, synthetic construct
  source 1..20: mol_type = other RNA
ctgctgctccgtagctgtcc

SEQ ID NO: 15911 - RNA, 20 nt, synthetic construct
  source 1..20: mol_type = other RNA
gatctcttagtccaccctgc

SEQ ID NO: 15912 - RNA, 20 nt, synthetic construct
  source 1..20: mol_type = other RNA
tttatgccatgggtcccact

SEQ ID NO: 15913 - RNA, 20 nt, synthetic construct
  source 1..20: mol_type = other RNA
ttcaactcatccccctttcc

SEQ ID NO: 15914 - RNA, 20 nt, synthetic construct
  source 1..20: mol_type = other RNA
actcatccccctttccctca

SEQ ID NO: 15915 - RNA, 20 nt, synthetic construct
  source 1..20: mol_type = other RNA
ctcagtcccggagtagctgc

SEQ ID NO: 15916 - RNA, 20 nt, synthetic construct
  source 1..20: mol_type = other RNA
ctcctgctctcagtctaccc

SEQ ID NO: 15917 - RNA, 20 nt, synthetic construct
  source 1..20: mol_type = other RNA
taggcaggtccttctctcct

SEQ ID NO: 15918 - RNA, 20 nt, synthetic construct
  source 1..20: mol_type = other RNA
agagatactgcatcctgcct

SEQ ID NO: 15919 - RNA, 20 nt, synthetic construct
  source 1..20: mol_type = other RNA
caaagctgccctggaaaact

SEQ ID NO: 15920 - RNA, 20 nt, synthetic construct
  source 1..20: mol_type = other RNA
agggcagctttgagaagtct

SEQ ID NO: 15921 - RNA, 20 nt, synthetic construct
  source 1..20: mol_type = other RNA
ccaagacttctcaaagctgc

SEQ ID NO: 15922 - RNA, 20 nt, synthetic construct
  source 1..20: mol_type = other RNA
cacagaaaagcattgtgcaa

SEQ ID NO: 15923 - RNA, 20 nt, synthetic construct
  source 1..20: mol_type = other RNA
gtgggaaaggtagagccttt

SEQ ID NO: 15924 - RNA, 20 nt, synthetic construct
  source 1..20: mol_type = other RNA
ctacgtattgagtacataga

SEQ ID NO: 15925 - RNA, 20 nt, synthetic construct
  source 1..20: mol_type = other RNA
aggtcaaccctcacactcta

SEQ ID NO: 15926 - RNA, 20 nt, synthetic construct
  source 1..20: mol_type = other RNA
gaaaacgcacgtcatccagg

SEQ ID NO: 15927 - RNA, 20 nt, synthetic construct
  source 1..20: mol_type = other RNA
tcagaaaacgcacgtcatcc

SEQ ID NO: 15928 - RNA, 20 nt, synthetic construct
  source 1..20: mol_type = other RNA
gaagaactacatgttcgttg

SEQ ID NO: 15929 - RNA, 20 nt, synthetic construct
  source 1..20: mol_type = other RNA
aatgtgggagttgcaacgaa

SEQ ID NO: 15930 - RNA, 20 nt, synthetic construct
  source 1..20: mol_type = other RNA
ttgcaactcccacattagaa

SEQ ID NO: 15931 - RNA, 20 nt, synthetic construct
  source 1..20: mol_type = other RNA
tattctaatgtgggagttgc

SEQ ID NO: 15932 - RNA, 20 nt, synthetic construct
  source 1..20: mol_type = other RNA
catgcaaatgcatctgtatc

SEQ ID NO: 15933 - RNA, 20 nt, synthetic construct
  source 1..20: mol_type = other RNA
gcccaatccatctctctgga

SEQ ID NO: 15934 - RNA, 20 nt, synthetic construct
  source 1..20: mol_type = other RNA
agagagatggattgggcaga

SEQ ID NO: 15935 - RNA, 20 nt, synthetic construct
  source 1..20: mol_type = other RNA
gccttctgcccaatccatct

SEQ ID NO: 15936 - RNA, 20 nt, synthetic construct
  source 1..20: mol_type = other RNA
ccttctgccttctgcccaat

SEQ ID NO: 15937 - RNA, 20 nt, synthetic construct
  source 1..20: mol_type = other RNA
gccacgtgtgtgtgttatct

SEQ ID NO: 15938 - RNA, 20 nt, synthetic construct
  source 1..20: mol_type = other RNA
tagaaacactgagataacac

SEQ ID NO: 15939 - RNA, 20 nt, synthetic construct
  source 1..20: mol_type = other RNA
aagaagcgtttgctacttta

SEQ ID NO: 15940 - RNA, 20 nt, synthetic construct
  source 1..20: mol_type = other RNA
cattaaaagtaccatatgat

SEQ ID NO: 15941 - RNA, 20 nt, synthetic construct
  source 1..20: mol_type = other RNA
aatattcccattaaaagtac

SEQ ID NO: 15942 - RNA, 20 nt, synthetic construct
  source 1..20: mol_type = other RNA
aaaacgatacacgtcacaag

SEQ ID NO: 15943 - RNA, 20 nt, synthetic construct
  source 1..20: mol_type = other RNA
tgatcaagccactggaaatt

SEQ ID NO: 15944 - RNA, 20 nt, synthetic construct
  source 1..20: mol_type = other RNA
agtggcttgatcatgaacta

SEQ ID NO: 15945 - RNA, 20 nt, synthetic construct
  source 1..20: mol_type = other RNA
tgcagtagttcatgatcaag

SEQ ID NO: 15946 - RNA, 20 nt, synthetic construct
  source 1..20: mol_type = other RNA
gcgtctgagcattgcgtcag

SEQ ID NO: 15947 - RNA, 20 nt, synthetic construct
  source 1..20: mol_type = other RNA
gaaggagcctctaggcttgg

SEQ ID NO: 15948 - RNA, 20 nt, synthetic construct
  source 1..20: mol_type = other RNA
aagcctagaggctccttccg

SEQ ID NO: 15949 - RNA, 20 nt, synthetic construct
  source 1..20: mol_type = other RNA
gaacaaggtaaggagtctgt

SEQ ID NO: 15950 - RNA, 20 nt, synthetic construct
  source 1..20: mol_type = other RNA
tcccagcatcgaagcgtgta

SEQ ID NO: 15951 - RNA, 20 nt, synthetic construct
  source 1..20: mol_type = other RNA
atggcttttcatcccagcat

SEQ ID NO: 15952 - RNA, 20 nt, synthetic construct
  source 1..20: mol_type = other RNA
atgctgggatgaaaagccat

SEQ ID NO: 15953 - RNA, 20 nt, synthetic construct
  source 1..20: mol_type = other RNA
cactgatgcagccgccttca

SEQ ID NO: 15954 - RNA, 20 nt, synthetic construct
  source 1..20: mol_type = other RNA
atggtaaacggatgctcgag

SEQ ID NO: 15955 - RNA, 20 nt, synthetic construct
  source 1..20: mol_type = other RNA
tcctacatggtagaactcag

SEQ ID NO: 15956 - RNA, 20 nt, synthetic construct
  source 1..20: mol_type = other RNA
accatgtaggaggaagcctc

SEQ ID NO: 15957 - RNA, 20 nt, synthetic construct
  source 1..20: mol_type = other RNA
ggtgcaacgtggttgggctt

SEQ ID NO: 15958 - RNA, 20 nt, synthetic construct
  source 1..20: mol_type = other RNA
aaattcaccttgttgtaaaa

SEQ ID NO: 15959 - RNA, 20 nt, synthetic construct
  source 1..20: mol_type = other RNA
ccttgttgtaaaacgggcta

SEQ ID NO: 15960 - RNA, 20 nt, synthetic construct
  source 1..20: mol_type = other RNA
aagccagtaagcttttccgg

SEQ ID NO: 15961 - RNA, 20 nt, synthetic construct
  source 1..20: mol_type = other RNA
ggggatttcttcaagtagcc

SEQ ID NO: 15962 - RNA, 20 nt, synthetic construct
  source 1..20: mol_type = other RNA
tcaagtagccagcattcaga

SEQ ID NO: 15963 - RNA, 20 nt, synthetic construct
  source 1..20: mol_type = other RNA
agtagccagcattcagagca

SEQ ID NO: 15964 - RNA, 20 nt, synthetic construct
  source 1..20: mol_type = other RNA
gagcaatcttcagcattgca

SEQ ID NO: 15965 - RNA, 20 nt, synthetic construct
  source 1..20: mol_type = other RNA
cagaatctgcaatgctgaag

SEQ ID NO: 15966 - RNA, 20 nt, synthetic construct
  source 1..20: mol_type = other RNA
gcattgcagattctgagaaa

SEQ ID NO: 15967 - RNA, 20 nt, synthetic construct
  source 1..20: mol_type = other RNA
gagaaatgtggctctggagc

SEQ ID NO: 15968 - RNA, 20 nt, synthetic construct
  source 1..20: mol_type = other RNA
cgaggatgacaggctccaga

SEQ ID NO: 15969 - RNA, 20 nt, synthetic construct
  source 1..20: mol_type = other RNA
atatggtcctgggtctatgg

SEQ ID NO: 15970 - RNA, 20 nt, synthetic construct
  source 1..20: mol_type = other RNA
aagcctaggactgaagagcc

SEQ ID NO: 15971 - RNA, 20 nt, synthetic construct
  source 1..20: mol_type = other RNA
gtcctaggctttgaagggag

SEQ ID NO: 15972 - RNA, 20 nt, synthetic construct
  source 1..20: mol_type = other RNA
cagtgttcttaaacctcttt

SEQ ID NO: 15973 - RNA, 20 nt, synthetic construct
  source 1..20: mol_type = other RNA
taaacctctttctgatggca

SEQ ID NO: 15974 - RNA, 20 nt, synthetic construct
  source 1..20: mol_type = other RNA
gatggcacttgtacctgtga

SEQ ID NO: 15975 - RNA, 20 nt, synthetic construct
  source 1..20: mol_type = other RNA
ctctagacccctcacaggta

SEQ ID NO: 15976 - RNA, 20 nt, synthetic construct
  source 1..20: mol_type = other RNA
cctttactgcaattcaggat

SEQ ID NO: 15977 - RNA, 20 nt, synthetic construct
  source 1..20: mol_type = other RNA
catgccctgcatcctgaatt

SEQ ID NO: 15978 - RNA, 20 nt, synthetic construct
  source 1..20: mol_type = other RNA
ggatgcagggcatgagaaga

SEQ ID NO: 15979 - RNA, 20 nt, synthetic construct
  source 1..20: mol_type = other RNA
cttggaggagggagggaatc

SEQ ID NO: 15980 - RNA, 20 nt, synthetic construct
  source 1..20: mol_type = other RNA
tcccttggaggagggaggga

SEQ ID NO: 15981 - RNA, 20 nt, synthetic construct
  source 1..20: mol_type = other RNA
ctccctcctccaagggaaga

SEQ ID NO: 15982 - RNA, 20 nt, synthetic construct
  source 1..20: mol_type = other RNA
caaggatgtgtgcacgccaa

SEQ ID NO: 15983 - RNA, 20 nt, synthetic construct
  source 1..20: mol_type = other RNA
gtcagatatataggatcgtt

SEQ ID NO: 15984 - RNA, 20 nt, synthetic construct
  source 1..20: mol_type = other RNA
aggccatggggcagaaaacg

SEQ ID NO: 15985 - RNA, 20 nt, synthetic construct
  source 1..20: mol_type = other RNA
gccccatggcctggaagcca

SEQ ID NO: 15986 - RNA, 20 nt, synthetic construct
  source 1..20: mol_type = other RNA
ctagatcgttgatcatgaaa

SEQ ID NO: 15987 - RNA, 20 nt, synthetic construct
  source 1..20: mol_type = other RNA
tgatcaacgatctagggaaa

SEQ ID NO: 15988 - RNA, 20 nt, synthetic construct
  source 1..20: mol_type = other RNA
atgtctttcccctcctctgc

SEQ ID NO: 15989 - RNA, 20 nt, synthetic construct
  source 1..20: mol_type = other RNA
cctcctctgccctcgacagc

SEQ ID NO: 15990 - RNA, 20 nt, synthetic construct
  source 1..20: mol_type = other RNA
tacaaagggcactgcatttg

SEQ ID NO: 15991 - RNA, 20 nt, synthetic construct
  source 1..20: mol_type = other RNA
atgaaactctactgaatgtt

SEQ ID NO: 15992 - RNA, 20 nt, synthetic construct
  source 1..20: mol_type = other RNA
gtagagtttcatagaaaggt

SEQ ID NO: 15993 - RNA, 20 nt, synthetic construct
  source 1..20: mol_type = other RNA
tagaaaggtgctacttcgtg

SEQ ID NO: 15994 - RNA, 20 nt, synthetic construct
  source 1..20: mol_type = other RNA
cactgcaaagtgcgctcacg

SEQ ID NO: 15995 - RNA, 20 nt, synthetic construct
  source 1..20: mol_type = other RNA
tgagcgcactttgcagtgag

SEQ ID NO: 15996 - RNA, 20 nt, synthetic construct
  source 1..20: mol_type = other RNA
gttctgtttttctaaggatt

SEQ ID NO: 15997 - RNA, 20 nt, synthetic construct
  source 1..20: mol_type = other RNA
cctgaaatccttagaaaaac

SEQ ID NO: 15998 - RNA, 20 nt, synthetic construct
  source 1..20: mol_type = other RNA
gtttttctaaggatttcagg

SEQ ID NO: 15999 - RNA, 20 nt, synthetic construct
  source 1..20: mol_type = other RNA
aaggatttcaggtgaaatat

SEQ ID NO: 16000 - RNA, 20 nt, synthetic construct
  source 1..20: mol_type = other RNA
aggaaatatttcacctgaaa

SEQ ID NO: 16001 - RNA, 20 nt, synthetic construct
  source 1..20: mol_type = other RNA
ggtgaaatatttcctagaac

SEQ ID NO: 16002 - RNA, 20 nt, synthetic construct
  source 1..20: mol_type = other RNA
tagaacttactacagttcta

SEQ ID NO: 16003 - RNA, 20 nt, synthetic construct
  source 1..20: mol_type = other RNA
taccaatctagaactgtagt

SEQ ID NO: 16004 - RNA, 20 nt, synthetic construct
  source 1..20: mol_type = other RNA
agattggtaggaatctgtag

SEQ ID NO: 16005 - RNA, 20 nt, synthetic construct
  source 1..20: mol_type = other RNA
cccatccatctgcctacagg

SEQ ID NO: 16006 - RNA, 20 nt, synthetic construct
  source 1..20: mol_type = other RNA
cttacctgtaggcagatgga

SEQ ID NO: 16007 - RNA, 20 nt, synthetic construct
  source 1..20: mol_type = other RNA
taattctcatagactccttt

SEQ ID NO: 16008 - RNA, 20 nt, synthetic construct
  source 1..20: mol_type = other RNA
catagactcctttctggttg

SEQ ID NO: 16009 - RNA, 20 nt, synthetic construct
  source 1..20: mol_type = other RNA
ggttgtgtcataaatggctt

SEQ ID NO: 16010 - RNA, 20 nt, synthetic construct
  source 1..20: mol_type = other RNA
catatttcgttattctcaga

SEQ ID NO: 16011 - RNA, 20 nt, synthetic construct
  source 1..20: mol_type = other RNA
ttattctcagagatactcag

SEQ ID NO: 16012 - RNA, 20 nt, synthetic construct
  source 1..20: mol_type = other RNA
cagagatactcagtttattt

SEQ ID NO: 16013 - RNA, 20 nt, synthetic construct
  source 1..20: mol_type = other RNA
tgtgttttcatttcagcacc

SEQ ID NO: 16014 - RNA, 20 nt, synthetic construct
  source 1..20: mol_type = other RNA
tttcagcaccgactgagcag

SEQ ID NO: 16015 - RNA, 20 nt, synthetic construct
  source 1..20: mol_type = other RNA
gcaccgactgagcagaggcc

SEQ ID NO: 16016 - RNA, 20 nt, synthetic construct
  source 1..20: mol_type = other RNA
agtgacagtggtggagtatg

SEQ ID NO: 16017 - RNA, 20 nt, synthetic construct
  source 1..20: mol_type = other RNA
tccagtgacagtggtggagt

SEQ ID NO: 16018 - RNA, 20 nt, synthetic construct
  source 1..20: mol_type = other RNA
ggggtccgactatgcgagtg

SEQ ID NO: 16019 - RNA, 20 nt, synthetic construct
  source 1..20: mol_type = other RNA
cttatggtaaagaacaaaga

SEQ ID NO: 16020 - RNA, 20 nt, synthetic construct
  source 1..20: mol_type = other RNA
ttaccataagagaataaagg

SEQ ID NO: 16021 - RNA, 20 nt, synthetic construct
  source 1..20: mol_type = other RNA
gttggccctttattctctta

SEQ ID NO: 16022 - RNA, 20 nt, synthetic construct
  source 1..20: mol_type = other RNA
gtgacaagagacatgcttca

SEQ ID NO: 16023 - RNA, 20 nt, synthetic construct
  source 1..20: mol_type = other RNA
gagaactcagcttgaagcat

SEQ ID NO: 16024 - RNA, 20 nt, synthetic construct
  source 1..20: mol_type = other RNA
agctgagttctccgaactca

SEQ ID NO: 16025 - RNA, 20 nt, synthetic construct
  source 1..20: mol_type = other RNA
ccgaactcaacttgtgtcag

SEQ ID NO: 16026 - RNA, 20 nt, synthetic construct
  source 1..20: mol_type = other RNA
gatggtgtagcaaaatgtct

SEQ ID NO: 16027 - RNA, 20 nt, synthetic construct
  source 1..20: mol_type = other RNA
ctcagacccttagctccaag

SEQ ID NO: 16028 - RNA, 20 nt, synthetic construct
  source 1..20: mol_type = other RNA
ttggagctaagggtctgaga

SEQ ID NO: 16029 - RNA, 20 nt, synthetic construct
  source 1..20: mol_type = other RNA
cttctctcagacccttagct

SEQ ID NO: 16030 - RNA, 20 nt, synthetic construct
  source 1..20: mol_type = other RNA
gctccacaaaactaggagga

SEQ ID NO: 16031 - RNA, 20 nt, synthetic construct
  source 1..20: mol_type = other RNA
tcctagttttgtggagcaga

SEQ ID NO: 16032 - RNA, 20 nt, synthetic construct
  source 1..20: mol_type = other RNA
cttctgctccacaaaactag

SEQ ID NO: 16033 - RNA, 20 nt, synthetic construct
  source 1..20: mol_type = other RNA
taaggtgatctcctcgcctc

SEQ ID NO: 16034 - RNA, 20 nt, synthetic construct
  source 1..20: mol_type = other RNA
tcataaggtgatctcctcgc

SEQ ID NO: 16035 - RNA, 20 nt, synthetic construct
  source 1..20: mol_type = other RNA
gactttcttcataaggtgat

SEQ ID NO: 16036 - RNA, 20 nt, synthetic construct
  source 1..20: mol_type = other RNA
tcattctgactttcttcata

SEQ ID NO: 16037 - RNA, 20 nt, synthetic construct
  source 1..20: mol_type = other RNA
ttgacgcttagtgggtgttg

SEQ ID NO: 16038 - RNA, 20 nt, synthetic construct
  source 1..20: mol_type = other RNA
aactggaaagtcttcattga

SEQ ID NO: 16039 - RNA, 20 nt, synthetic construct
  source 1..20: mol_type = other RNA
agttggaattccgttattct

SEQ ID NO: 16040 - RNA, 20 nt, synthetic construct
  source 1..20: mol_type = other RNA
gttattctgacttccaattc

SEQ ID NO: 16041 - RNA, 20 nt, synthetic construct
  source 1..20: mol_type = other RNA
ggaattggaagtcagaataa

SEQ ID NO: 16042 - RNA, 20 nt, synthetic construct
  source 1..20: mol_type = other RNA
cttcaggaattggaagtcag

SEQ ID NO: 16043 - RNA, 20 nt, synthetic construct
  source 1..20: mol_type = other RNA
gacttccaattcctgaaggg

SEQ ID NO: 16044 - RNA, 20 nt, synthetic construct
  source 1..20: mol_type = other RNA
aattcctgaagggaagattg

SEQ ID NO: 16045 - RNA, 20 nt, synthetic construct
  source 1..20: mol_type = other RNA
tgaagggaagattgtgtttg

SEQ ID NO: 16046 - RNA, 20 nt, synthetic construct
  source 1..20: mol_type = other RNA
tcatgagcccagacagaaaa

SEQ ID NO: 16047 - RNA, 20 nt, synthetic construct
  source 1..20: mol_type = other RNA
gtctgggctcatgaggaaag

SEQ ID NO: 16048 - RNA, 20 nt, synthetic construct
  source 1..20: mol_type = other RNA
cctgtccataagtaagcaca

SEQ ID NO: 16049 - RNA, 20 nt, synthetic construct
  source 1..20: mol_type = other RNA
atttctacctgtattccaat

SEQ ID NO: 16050 - RNA, 20 nt, synthetic construct
  source 1..20: mol_type = other RNA
ccctattggaatacaggtag

SEQ ID NO: 16051 - RNA, 20 nt, synthetic construct
  source 1..20: mol_type = other RNA
acctgtattccaatagggag

SEQ ID NO: 16052 - RNA, 20 nt, synthetic construct
  source 1..20: mol_type = other RNA
aatagggagaaaatctcttg

SEQ ID NO: 16053 - RNA, 20 nt, synthetic construct
  source 1..20: mol_type = other RNA
ggccactggtacttaggacc

SEQ ID NO: 16054 - RNA, 20 nt, synthetic construct
  source 1..20: mol_type = other RNA
cttgctgggaacctctatcc

SEQ ID NO: 16055 - RNA, 20 nt, synthetic construct
  source 1..20: mol_type = other RNA
ttggatcttctcttgctggg

SEQ ID NO: 16056 - RNA, 20 nt, synthetic construct
  source 1..20: mol_type = other RNA
cagcaagagaagatccaagg

SEQ ID NO: 16057 - RNA, 20 nt, synthetic construct
  source 1..20: mol_type = other RNA
ttccttggatcttctcttgc

SEQ ID NO: 16058 - RNA, 20 nt, synthetic construct
  source 1..20: mol_type = other RNA
gcatccctctctgtgctgac

SEQ ID NO: 16059 - RNA, 20 nt, synthetic construct
  source 1..20: mol_type = other RNA
atccatctacccatcccttt

SEQ ID NO: 16060 - RNA, 20 nt, synthetic construct
  source 1..20: mol_type = other RNA
atgtctttggttgttgatta

SEQ ID NO: 16061 - RNA, 20 nt, synthetic construct
  source 1..20: mol_type = other RNA
acatgtgggacaacagatgg

SEQ ID NO: 16062 - RNA, 20 nt, synthetic construct
  source 1..20: mol_type = other RNA
ctaggtcctctaccatctgt

SEQ ID NO: 16063 - RNA, 20 nt, synthetic construct
  source 1..20: mol_type = other RNA
tcctggatacccttcctgca

SEQ ID NO: 16064 - RNA, 20 nt, synthetic construct
  source 1..20: mol_type = other RNA
gtgcaggaagggtatccagg

SEQ ID NO: 16065 - RNA, 20 nt, synthetic construct
  source 1..20: mol_type = other RNA
tggatacccttcctgcactg

SEQ ID NO: 16066 - RNA, 20 nt, synthetic construct
  source 1..20: mol_type = other RNA
tgcactgaatagcaaggaga

SEQ ID NO: 16067 - RNA, 20 nt, synthetic construct
  source 1..20: mol_type = other RNA
tatttgtagcggacctagaa

SEQ ID NO: 16068 - RNA, 20 nt, synthetic construct
  source 1..20: mol_type = other RNA
aggtccgctacaaataagaa

SEQ ID NO: 16069 - RNA, 20 nt, synthetic construct
  source 1..20: mol_type = other RNA
tccacaaaccagttcttatt

SEQ ID NO: 16070 - RNA, 20 nt, synthetic construct
  source 1..20: mol_type = other RNA
atgcgtatttgtagagctcc

SEQ ID NO: 16071 - RNA, 20 nt, synthetic construct
  source 1..20: mol_type = other RNA
gtgcacatgcagtgtcatgt

SEQ ID NO: 16072 - RNA, 20 nt, synthetic construct
  source 1..20: mol_type = other RNA
gtagaaccattttctgtgca

SEQ ID NO: 16073 - RNA, 20 nt, synthetic construct
  source 1..20: mol_type = other RNA
ttgccacactttctgtagaa

SEQ ID NO: 16074 - RNA, 20 nt, synthetic construct
  source 1..20: mol_type = other RNA
acagaaagtgtggcaaagaa

SEQ ID NO: 16075 - RNA, 20 nt, synthetic construct
  source 1..20: mol_type = other RNA
cagtaaatgttctttgccac

SEQ ID NO: 16076 - RNA, 20 nt, synthetic construct
  source 1..20: mol_type = other RNA
cttgtagttgctgtttctca

SEQ ID NO: 16077 - RNA, 20 nt, synthetic construct
  source 1..20: mol_type = other RNA
taattgagcttgctgttctc

SEQ ID NO: 16078 - RNA, 20 nt, synthetic construct
  source 1..20: mol_type = other RNA
taccagctagatgagagagt

SEQ ID NO: 16079 - RNA, 20 nt, synthetic construct
  source 1..20: mol_type = other RNA
gtgagcactctctcatctag

SEQ ID NO: 16080 - RNA, 20 nt, synthetic construct
  source 1..20: mol_type = other RNA
ggggtctccactgaattggc

SEQ ID NO: 16081 - RNA, 20 nt, synthetic construct
  source 1..20: mol_type = other RNA
gtggagaccccagaacagcc

SEQ ID NO: 16082 - RNA, 20 nt, synthetic construct
  source 1..20: mol_type = other RNA
aagtacaattagtatattac

SEQ ID NO: 16083 - RNA, 20 nt, synthetic construct
  source 1..20: mol_type = other RNA
agtaatatactaattgtact

SEQ ID NO: 16084 - RNA, 20 nt, synthetic construct
  source 1..20: mol_type = other RNA
gctgtgcaaggggttgtctg

SEQ ID NO: 16085 - RNA, 20 nt, synthetic construct
  source 1..20: mol_type = other RNA
ttgattggaaacccatttga

SEQ ID NO: 16086 - RNA, 20 nt, synthetic construct
  source 1..20: mol_type = other RNA
aatcaatgaagtgcctgtga

SEQ ID NO: 16087 - RNA, 20 nt, synthetic construct
  source 1..20: mol_type = other RNA
tctcacaggcacttcattga

SEQ ID NO: 16088 - RNA, 20 nt, synthetic construct
  source 1..20: mol_type = other RNA
gaagagagttgagatttcct

SEQ ID NO: 16089 - RNA, 20 nt, synthetic construct
  source 1..20: mol_type = other RNA
gaagtaaacaacaaagtcaa

SEQ ID NO: 16090 - RNA, 20 nt, synthetic construct
  source 1..20: mol_type = other RNA
acacgtagtcaaatttttaa

SEQ ID NO: 16091 - RNA, 20 nt, synthetic construct
  source 1..20: mol_type = other RNA
tttctacacgtagtcaaatt

SEQ ID NO: 16092 - RNA, 20 nt, synthetic construct
  source 1..20: mol_type = other RNA
ggtcatggatcacacgaaat

SEQ ID NO: 16093 - RNA, 20 nt, synthetic construct
  source 1..20: mol_type = other RNA
tgtgatccatgaccagaaaa

SEQ ID NO: 16094 - RNA, 20 nt, synthetic construct
  source 1..20: mol_type = other RNA
gagcctgtttgtattgcctg

SEQ ID NO: 16095 - RNA, 20 nt, synthetic construct
  source 1..20: mol_type = other RNA
aattatcgatgtcatttctg

SEQ ID NO: 16096 - RNA, 20 nt, synthetic construct
  source 1..20: mol_type = other RNA
tgcaattctaattatcgatg

SEQ ID NO: 16097 - RNA, 20 nt, synthetic construct
  source 1..20: mol_type = other RNA
gatatttaaaaaaagtgcaa

SEQ ID NO: 16098 - RNA, 20 nt, synthetic construct
  source 1..20: mol_type = other RNA
atactattaatttgtcttga

SEQ ID NO: 16099 - RNA, 20 nt, synthetic construct
  source 1..20: mol_type = other RNA
ttaatttgatttggctattc

SEQ ID NO: 16100 - RNA, 20 nt, synthetic construct
  source 1..20: mol_type = other RNA
tttaagacatactttttgta

SEQ ID NO: 16101 - RNA, 20 nt, synthetic construct
  source 1..20: mol_type = other RNA
tcatttaagacatacttttt

SEQ ID NO: 16102 - RNA, 20 nt, synthetic construct
  source 1..20: mol_type = other RNA
ggcggacatacagtaatttc

SEQ ID NO: 16103 - RNA, 20 nt, synthetic construct
  source 1..20: mol_type = other RNA
gaaacatctaaatttttcag

SEQ ID NO: 16104 - RNA, 20 nt, synthetic construct
  source 1..20: mol_type = other RNA
tctgaaacatctaaattttt

SEQ ID NO: 16105 - RNA, 20 nt, synthetic construct
  source 1..20: mol_type = other RNA
gaagaaaaaattaaccaaaa

SEQ ID NO: 16106 - RNA, 20 nt, synthetic construct
  source 1..20: mol_type = other RNA
gcagaattgtttttggttaa

SEQ ID NO: 16107 - RNA, 20 nt, synthetic construct
  source 1..20: mol_type = other RNA
gtaggttctgcagaattgtt

SEQ ID NO: 16108 - RNA, 20 nt, synthetic construct
  source 1..20: mol_type = other RNA
gcagaacctacagaatgagc

SEQ ID NO: 16109 - RNA, 20 nt, synthetic construct
  source 1..20: mol_type = other RNA
aaacacacccatacacacac

SEQ ID NO: 16110 - RNA, 20 nt, synthetic construct
  source 1..20: mol_type = other RNA
aacacacacacaaacacaca

SEQ ID NO: 16111 - RNA, 20 nt, synthetic construct
  source 1..20: mol_type = other RNA
ttagggatgtgcatgtgtgt

SEQ ID NO: 16112 - RNA, 20 nt, synthetic construct
  source 1..20: mol_type = other RNA
ctatttctttagggatgtgc

SEQ ID NO: 16113 - RNA, 20 nt, synthetic construct
  source 1..20: mol_type = other RNA
tgcatgtctctgagggtcgg

SEQ ID NO: 16114 - RNA, 20 nt, synthetic construct
  source 1..20: mol_type = other RNA
tatattttcctgcatgtctc

SEQ ID NO: 16115 - RNA, 20 nt, synthetic construct
  source 1..20: mol_type = other RNA
cacatgcaggaaatcttctt

SEQ ID NO: 16116 - RNA, 20 nt, synthetic construct
  source 1..20: mol_type = other RNA
tgcatgtgggaagcaagtca

SEQ ID NO: 16117 - RNA, 20 nt, synthetic construct
  source 1..20: mol_type = other RNA
ggtatttgtatctactccaa

SEQ ID NO: 16118 - RNA, 20 nt, synthetic construct
  source 1..20: mol_type = other RNA
taattgaaaagttatcagcc

SEQ ID NO: 16119 - RNA, 20 nt, synthetic construct
  source 1..20: mol_type = other RNA
tcataattgaaaagttatca

SEQ ID NO: 16120 - RNA, 20 nt, synthetic construct
  source 1..20: mol_type = other RNA
aacgttcttcataattgaaa

SEQ ID NO: 16121 - RNA, 20 nt, synthetic construct
  source 1..20: mol_type = other RNA
attatgaagaacgttagaaa

SEQ ID NO: 16122 - RNA, 20 nt, synthetic construct
  source 1..20: mol_type = other RNA
tgaatctgtgatttttctaa

SEQ ID NO: 16123 - RNA, 20 nt, synthetic construct
  source 1..20: mol_type = other RNA
tgaaactaaagggatcaaat

SEQ ID NO: 16124 - RNA, 20 nt, synthetic construct
  source 1..20: mol_type = other RNA
tatttgatccctttagtttc

SEQ ID NO: 16125 - RNA, 20 nt, synthetic construct
  source 1..20: mol_type = other RNA
cgaaatttcctatttgatcc

SEQ ID NO: 16126 - RNA, 20 nt, synthetic construct
  source 1..20: mol_type = other RNA
agaaaaaaaactacatgatg

SEQ ID NO: 16127 - RNA, 20 nt, synthetic construct
  source 1..20: mol_type = other RNA
ctacatcacagttcaaaggt

SEQ ID NO: 16128 - RNA, 20 nt, synthetic construct
  source 1..20: mol_type = other RNA
aaggtaacaaggcaaggata

SEQ ID NO: 16129 - RNA, 20 nt, synthetic construct
  source 1..20: mol_type = other RNA
tatatccttgccttgttacc

SEQ ID NO: 16130 - RNA, 20 nt, synthetic construct
  source 1..20: mol_type = other RNA
tcttatatccttgccttgtt

SEQ ID NO: 16131 - RNA, 20 nt, synthetic construct
  source 1..20: mol_type = other RNA
tcttcttatatccttgcctt

SEQ ID NO: 16132 - RNA, 20 nt, synthetic construct
  source 1..20: mol_type = other RNA
cgtgagatgtttcttcttct

SEQ ID NO: 16133 - RNA, 20 nt, synthetic construct
  source 1..20: mol_type = other RNA
ccagtttctcgtgagatgtt

SEQ ID NO: 16134 - RNA, 20 nt, synthetic construct
  source 1..20: mol_type = other RNA
tagagtacagtgatacaaat

SEQ ID NO: 16135 - RNA, 20 nt, synthetic construct
  source 1..20: mol_type = other RNA
gaggtgaacgcattagcaat

SEQ ID NO: 16136 - RNA, 20 nt, synthetic construct
  source 1..20: mol_type = other RNA
agtgtttctgaggtgaacgc

SEQ ID NO: 16137 - RNA, 20 nt, synthetic construct
  source 1..20: mol_type = other RNA
cctcagaaacactggaagcc

SEQ ID NO: 16138 - RNA, 20 nt, synthetic construct
  source 1..20: mol_type = other RNA
ctggtatctggcttccagtg

SEQ ID NO: 16139 - RNA, 20 nt, synthetic construct
  source 1..20: mol_type = other RNA
tcattatcattttaataata

SEQ ID NO: 16140 - RNA, 20 nt, synthetic construct
  source 1..20: mol_type = other RNA
tgttcctcattatcatttta

SEQ ID NO: 16141 - RNA, 20 nt, synthetic construct
  source 1..20: mol_type = other RNA
cggttgatctcttcttgttc

SEQ ID NO: 16142 - RNA, 20 nt, synthetic construct
  source 1..20: mol_type = other RNA
gcattctcggttgatctctt

SEQ ID NO: 16143 - RNA, 20 nt, synthetic construct
  source 1..20: mol_type = other RNA
aggcattttattgctggatt

SEQ ID NO: 16144 - RNA, 20 nt, synthetic construct
  source 1..20: mol_type = other RNA
ttgttttgggcagtgcacaa

SEQ ID NO: 16145 - RNA, 20 nt, synthetic construct
  source 1..20: mol_type = other RNA
agtttctttgttttgggcag

SEQ ID NO: 16146 - RNA, 20 nt, synthetic construct
  source 1..20: mol_type = other RNA
aaagtcttacactttccagt

SEQ ID NO: 16147 - RNA, 20 nt, synthetic construct
  source 1..20: mol_type = other RNA
ggtcacctctgttgctacat

SEQ ID NO: 16148 - RNA, 20 nt, synthetic construct
  source 1..20: mol_type = other RNA
ttcgggtcacctctgttgct

SEQ ID NO: 16149 - RNA, 20 nt, synthetic construct
  source 1..20: mol_type = other RNA
tatacctaattctttcgggt

SEQ ID NO: 16150 - RNA, 20 nt, synthetic construct
  source 1..20: mol_type = other RNA
tcttatacctaattctttcg

SEQ ID NO: 16151 - RNA, 20 nt, synthetic construct
  source 1..20: mol_type = other RNA
attcttcttatacctaattc

SEQ ID NO: 16152 - RNA, 20 nt, synthetic construct
  source 1..20: mol_type = other RNA
tctattcttcttatacctaa

SEQ ID NO: 16153 - RNA, 20 nt, synthetic construct
  source 1..20: mol_type = other RNA
tgcaattcttctattcttct

SEQ ID NO: 16154 - RNA, 20 nt, synthetic construct
  source 1..20: mol_type = other RNA
tctttttttaaatatttgaa

SEQ ID NO: 16155 - RNA, 20 nt, synthetic construct
  source 1..20: mol_type = other RNA
aatatttaaaaaaagatgaa

SEQ ID NO: 16156 - RNA, 20 nt, synthetic construct
  source 1..20: mol_type = other RNA
tttgatattttatctgtttt

SEQ ID NO: 16157 - RNA, 20 nt, synthetic construct
  source 1..20: mol_type = other RNA
tttaagacatagctttttac

SEQ ID NO: 16158 - RNA, 20 nt, synthetic construct
  source 1..20: mol_type = other RNA
gaaatgtctaaattgatcag

SEQ ID NO: 16159 - RNA, 20 nt, synthetic construct
  source 1..20: mol_type = other RNA
tattcagaaatgtctaaatt

SEQ ID NO: 16160 - RNA, 20 nt, synthetic construct
  source 1..20: mol_type = other RNA
gaataggaaactaaccaaaa

SEQ ID NO: 16161 - RNA, 20 nt, synthetic construct
  source 1..20: mol_type = other RNA
gtagaattgatttttggtta

SEQ ID NO: 16162 - RNA, 20 nt, synthetic construct
  source 1..20: mol_type = other RNA
acagaaccaactacacacat

SEQ ID NO: 16163 - RNA, 20 nt, synthetic construct
  source 1..20: mol_type = other RNA
cacacacacacacacacaca

SEQ ID NO: 16164 - RNA, 20 nt, synthetic construct
  source 1..20: mol_type = other RNA
tgagggttgtgtgtgtgtgt

SEQ ID NO: 16165 - RNA, 20 nt, synthetic construct
  source 1..20: mol_type = other RNA
ctatttcttgagggttgtgt

SEQ ID NO: 16166 - RNA, 20 nt, synthetic construct
  source 1..20: mol_type = other RNA
atttcactatttcttgaggg

SEQ ID NO: 16167 - RNA, 20 nt, synthetic construct
  source 1..20: mol_type = other RNA
gttggttttctatttcacta

SEQ ID NO: 16168 - RNA, 20 nt, synthetic construct
  source 1..20: mol_type = other RNA
tattttgcaacatgtctgtg

SEQ ID NO: 16169 - RNA, 20 nt, synthetic construct
  source 1..20: mol_type = other RNA
catatgcaggaaatcttttc

SEQ ID NO: 16170 - RNA, 20 nt, synthetic construct
  source 1..20: mol_type = other RNA
tgcatatgggaagcaagtca

SEQ ID NO: 16171 - RNA, 20 nt, synthetic construct
  source 1..20: mol_type = other RNA
gtgacttgcttcccatatgc

SEQ ID NO: 16172 - RNA, 20 nt, synthetic construct
  source 1..20: mol_type = other RNA
cttttctgtgacttgcttcc

SEQ ID NO: 16173 - RNA, 20 nt, synthetic construct
  source 1..20: mol_type = other RNA
aatctcccgttctcttttct

SEQ ID NO: 16174 - RNA, 20 nt, synthetic construct
  source 1..20: mol_type = other RNA
gtttccaatctcccgttctc

SEQ ID NO: 16175 - RNA, 20 nt, synthetic construct
  source 1..20: mol_type = other RNA
ggtatttgtttctgtttcca

SEQ ID NO: 16176 - RNA, 20 nt, synthetic construct
  source 1..20: mol_type = other RNA
gccatccttgattccggtat

SEQ ID NO: 16177 - RNA, 20 nt, synthetic construct
  source 1..20: mol_type = other RNA
tgatcaatgaaaagttttcg

SEQ ID NO: 16178 - RNA, 20 nt, synthetic construct
  source 1..20: mol_type = other RNA
ttgatcaagaatattaacaa

SEQ ID NO: 16179 - RNA, 20 nt, synthetic construct
  source 1..20: mol_type = other RNA
tgtttttgcgattttgttaa

SEQ ID NO: 16180 - RNA, 20 nt, synthetic construct
  source 1..20: mol_type = other RNA
aaacgcctatttgatgcatt

SEQ ID NO: 16181 - RNA, 20 nt, synthetic construct
  source 1..20: mol_type = other RNA
atgcatcaaataggcgtttc

SEQ ID NO: 16182 - RNA, 20 nt, synthetic construct
  source 1..20: mol_type = other RNA
ttttttcgaaacgcctattt

SEQ ID NO: 16183 - RNA, 20 nt, synthetic construct
  source 1..20: mol_type = other RNA
aaaaaaagaaaaaatctggt

SEQ ID NO: 16184 - RNA, 20 nt, synthetic construct
  source 1..20: mol_type = other RNA
taccgtgaaaatgtgaagta

SEQ ID NO: 16185 - RNA, 20 nt, synthetic construct
  source 1..20: mol_type = other RNA
cattttcacggtaagaagac

SEQ ID NO: 16186 - RNA, 20 nt, synthetic construct
  source 1..20: mol_type = other RNA
cggtaagaagacaaagatat

SEQ ID NO: 16187 - RNA, 20 nt, synthetic construct
  source 1..20: mol_type = other RNA
tgttattatatctttgtctt

SEQ ID NO: 16188 - RNA, 20 nt, synthetic construct
  source 1..20: mol_type = other RNA
cataagaagtttcttgttat

SEQ ID NO: 16189 - RNA, 20 nt, synthetic construct
  source 1..20: mol_type = other RNA
ccagtttctcataagaagtt

SEQ ID NO: 16190 - RNA, 20 nt, synthetic construct
  source 1..20: mol_type = other RNA
tatgagaaactggggaaaaa

SEQ ID NO: 16191 - RNA, 20 nt, synthetic construct
  source 1..20: mol_type = other RNA
agcaagaaacagcttgtttt

SEQ ID NO: 16192 - RNA, 20 nt, synthetic construct
  source 1..20: mol_type = other RNA
tctagcaagaaacagcttgt

SEQ ID NO: 16193 - RNA, 20 nt, synthetic construct
  source 1..20: mol_type = other RNA
tgctagaagaacagtgatac

SEQ ID NO: 16194 - RNA, 20 nt, synthetic construct
  source 1..20: mol_type = other RNA
agtgtttttgacgagaatgc

SEQ ID NO: 16195 - RNA, 20 nt, synthetic construct
  source 1..20: mol_type = other RNA
cgtcaaaaacactggaagcc

SEQ ID NO: 16196 - RNA, 20 nt, synthetic construct
  source 1..20: mol_type = other RNA
cggtatctggcttccagtgt

SEQ ID NO: 16197 - RNA, 20 nt, synthetic construct
  source 1..20: mol_type = other RNA
tgtttaccacattaataaca

SEQ ID NO: 16198 - RNA, 20 nt, synthetic construct
  source 1..20: mol_type = other RNA
tgttcctgtttaccacatta

SEQ ID NO: 16199 - RNA, 20 nt, synthetic construct
  source 1..20: mol_type = other RNA
tggttgatctcttcttgttc

SEQ ID NO: 16200 - RNA, 20 nt, synthetic construct
  source 1..20: mol_type = other RNA
aggcattttattgctggatt

SEQ ID NO: 16201 - RNA, 20 nt, synthetic construct
  source 1..20: mol_type = other RNA
ttgtttggggcagtgcacaa

SEQ ID NO: 16202 - RNA, 20 nt, synthetic construct
  source 1..20: mol_type = other RNA
ggtttctttgtttggggcag

SEQ ID NO: 16203 - RNA, 20 nt, synthetic construct
  source 1..20: mol_type = other RNA
tacagtttccggtttctttg

SEQ ID NO: 16204 - RNA, 20 nt, synthetic construct
  source 1..20: mol_type = other RNA
aaattcttacagtttccggt

SEQ ID NO: 16205 - RNA, 20 nt, synthetic construct
  source 1..20: mol_type = other RNA
tttgggtcacctctcttgtt

SEQ ID NO: 16206 - RNA, 20 nt, synthetic construct
  source 1..20: mol_type = other RNA
acctaattcctttgggtcac

SEQ ID NO: 16207 - RNA, 20 nt, synthetic construct
  source 1..20: mol_type = other RNA
tctacctaattcctttgggt

SEQ ID NO: 16208 - RNA, 20 nt, synthetic construct
  source 1..20: mol_type = other RNA
tcttctacctaattcctttg

SEQ ID NO: 16209 - RNA, 20 nt, synthetic construct
  source 1..20: mol_type = other RNA
tgtactattcttcttctacc

SEQ ID NO: 16210 - RNA, 20 nt, synthetic construct
  source 1..20: mol_type = other RNA
cttcttgtactattcttctt

SEQ ID NO: 16211 - RNA, 20 nt, synthetic construct
  source 1..20: mol_type = other RNA
ttacatgggctgcagaaagt

SEQ ID NO: 16212 - RNA, 20 nt, synthetic construct
  source 1..20: mol_type = other RNA
tcattacatgggctgcagaa

SEQ ID NO: 16213 - RNA, 20 nt, synthetic construct
  source 1..20: mol_type = other RNA
gcagcccatgtaatgaagaa

SEQ ID NO: 16214 - RNA, 20 nt, synthetic construct
  source 1..20: mol_type = other RNA
tgaccaaatttctatatatt

SEQ ID NO: 16215 - RNA, 20 nt, synthetic construct
  source 1..20: mol_type = other RNA
atatatttttaaatgagcgt

SEQ ID NO: 16216 - RNA, 20 nt, synthetic construct
  source 1..20: mol_type = other RNA
agtagtcaacgctcatttaa

SEQ ID NO: 16217 - RNA, 20 nt, synthetic construct
  source 1..20: mol_type = other RNA
tacctctacatatgctaaaa

SEQ ID NO: 16218 - RNA, 20 nt, synthetic construct
  source 1..20: mol_type = other RNA
aattcttacctctacatatg

SEQ ID NO: 16219 - RNA, 20 nt, synthetic construct
  source 1..20: mol_type = other RNA
ctacatgatttacgctactt

SEQ ID NO: 16220 - RNA, 20 nt, synthetic construct
  source 1..20: mol_type = other RNA
aattattccctacatgattt

SEQ ID NO: 16221 - RNA, 20 nt, synthetic construct
  source 1..20: mol_type = other RNA
tacctcatgcacaatggtat

SEQ ID NO: 16222 - RNA, 20 nt, synthetic construct
  source 1..20: mol_type = other RNA
aggagatattgcaaatccta

SEQ ID NO: 16223 - RNA, 20 nt, synthetic construct
  source 1..20: mol_type = other RNA
aaactttgtgattgctctag

SEQ ID NO: 16224 - RNA, 20 nt, synthetic construct
  source 1..20: mol_type = other RNA
tattatacaatatacctcag

SEQ ID NO: 16225 - RNA, 20 nt, synthetic construct
  source 1..20: mol_type = other RNA
ctcttttgaatacatggaat

SEQ ID NO: 16226 - RNA, 20 nt, synthetic construct
  source 1..20: mol_type = other RNA
atgtattcaaaagagagaag

SEQ ID NO: 16227 - RNA, 20 nt, synthetic construct
  source 1..20: mol_type = other RNA
ttggcttctctcttttgaat

SEQ ID NO: 16228 - RNA, 20 nt, synthetic construct
  source 1..20: mol_type = other RNA
tccttggcttctctcttttg

SEQ ID NO: 16229 - RNA, 20 nt, synthetic construct
  source 1..20: mol_type = other RNA
aaagagagaagccaaggaag

SEQ ID NO: 16230 - RNA, 20 nt, synthetic construct
  source 1..20: mol_type = other RNA
ttcttccttggcttctctct

SEQ ID NO: 16231 - RNA, 20 nt, synthetic construct
  source 1..20: mol_type = other RNA
atgagctacaggatgtacta

SEQ ID NO: 16232 - RNA, 20 nt, synthetic construct
  source 1..20: mol_type = other RNA
aggaagctggttcaatgagc

SEQ ID NO: 16233 - RNA, 20 nt, synthetic construct
  source 1..20: mol_type = other RNA
tggaatggagggtctgggat

SEQ ID NO: 16234 - RNA, 20 nt, synthetic construct
  source 1..20: mol_type = other RNA
tccccatggcccgtaataca

SEQ ID NO: 16235 - RNA, 20 nt, synthetic construct
  source 1..20: mol_type = other RNA
cattttctcaggcagccaca

SEQ ID NO: 16236 - RNA, 20 nt, synthetic construct
  source 1..20: mol_type = other RNA
tgacctgtggctgcctgaga

SEQ ID NO: 16237 - RNA, 20 nt, synthetic construct
  source 1..20: mol_type = other RNA
caggcagccacaggtcatga

SEQ ID NO: 16238 - RNA, 20 nt, synthetic construct
  source 1..20: mol_type = other RNA
ttatgcctcccaagaacgtt

SEQ ID NO: 16239 - RNA, 20 nt, synthetic construct
  source 1..20: mol_type = other RNA
tgggaggcataaggaagagc

SEQ ID NO: 16240 - RNA, 20 nt, synthetic construct
  source 1..20: mol_type = other RNA
agatccccgcagcccaaact

SEQ ID NO: 16241 - RNA, 20 nt, synthetic construct
  source 1..20: mol_type = other RNA
tccgtagctgtccgacctct

SEQ ID NO: 16242 - RNA, 20 nt, synthetic construct
  source 1..20: mol_type = other RNA
gatctcttagtctaccctgc

SEQ ID NO: 16243 - RNA, 20 nt, synthetic construct
  source 1..20: mol_type = other RNA
tttatgccatgggtcccact

SEQ ID NO: 16244 - RNA, 20 nt, synthetic construct
  source 1..20: mol_type = other RNA
ttcaactcatccccctttcc

SEQ ID NO: 16245 - RNA, 20 nt, synthetic construct
  source 1..20: mol_type = other RNA
actcatccccctttccctca

SEQ ID NO: 16246 - RNA, 20 nt, synthetic construct
  source 1..20: mol_type = other RNA
ctcagtgcagagtagctgcg

SEQ ID NO: 16247 - RNA, 20 nt, synthetic construct
  source 1..20: mol_type = other RNA
ctcctgctctcagtctaccc

SEQ ID NO: 16248 - RNA, 20 nt, synthetic construct
  source 1..20: mol_type = other RNA
tgggcaggaccttctctcct

SEQ ID NO: 16249 - RNA, 20 nt, synthetic construct
  source 1..20: mol_type = other RNA
agagatgctgcattctgcct

SEQ ID NO: 16250 - RNA, 20 nt, synthetic construct
  source 1..20: mol_type = other RNA
gcctgggagcaagttttcca

SEQ ID NO: 16251 - RNA, 20 nt, synthetic construct
  source 1..20: mol_type = other RNA
caaagctgccctggaaaact

SEQ ID NO: 16252 - RNA, 20 nt, synthetic construct
  source 1..20: mol_type = other RNA
agggcagctttgagaagtct

SEQ ID NO: 16253 - RNA, 20 nt, synthetic construct
  source 1..20: mol_type = other RNA
gcaagacttctcaaagctgc

SEQ ID NO: 16254 - RNA, 20 nt, synthetic construct
  source 1..20: mol_type = other RNA
catatcatgtgggtcaaata

SEQ ID NO: 16255 - RNA, 20 nt, synthetic construct
  source 1..20: mol_type = other RNA
gtcattcccatatcatgtgg

SEQ ID NO: 16256 - RNA, 20 nt, synthetic construct
  source 1..20: mol_type = other RNA
catggaaaagcactgtgcaa

SEQ ID NO: 16257 - RNA, 20 nt, synthetic construct
  source 1..20: mol_type = other RNA
atgggaaaagtagagccttt

SEQ ID NO: 16258 - RNA, 20 nt, synthetic construct
  source 1..20: mol_type = other RNA
cgaggttttgagtacataga

SEQ ID NO: 16259 - RNA, 20 nt, synthetic construct
  source 1..20: mol_type = other RNA
ctctctatgtactcaaaacc

SEQ ID NO: 16260 - RNA, 20 nt, synthetic construct
  source 1..20: mol_type = other RNA
aggtcaaccttcactctcta

SEQ ID NO: 16261 - RNA, 20 nt, synthetic construct
  source 1..20: mol_type = other RNA
gaaaaaacatgggatccagg

SEQ ID NO: 16262 - RNA, 20 nt, synthetic construct
  source 1..20: mol_type = other RNA
tcagaaaaaacatgggatcc

SEQ ID NO: 16263 - RNA, 20 nt, synthetic construct
  source 1..20: mol_type = other RNA
gaagaactacctgttagttg

SEQ ID NO: 16264 - RNA, 20 nt, synthetic construct
  source 1..20: mol_type = other RNA
aatgtgcaagttgcaactaa

SEQ ID NO: 16265 - RNA, 20 nt, synthetic construct
  source 1..20: mol_type = other RNA
tattctaatgtgcaagttgc

SEQ ID NO: 16266 - RNA, 20 nt, synthetic construct
  source 1..20: mol_type = other RNA
ccgtatctctctcggtagga

SEQ ID NO: 16267 - RNA, 20 nt, synthetic construct
  source 1..20: mol_type = other RNA
catacaaaagtatctgtatt

SEQ ID NO: 16268 - RNA, 20 nt, synthetic construct
  source 1..20: mol_type = other RNA
acaatacacacatcaaaatc

SEQ ID NO: 16269 - RNA, 20 nt, synthetic construct
  source 1..20: mol_type = other RNA
gcccaatccatctctctgga

SEQ ID NO: 16270 - RNA, 20 nt, synthetic construct
  source 1..20: mol_type = other RNA
agagagatggattgggcaga

SEQ ID NO: 16271 - RNA, 20 nt, synthetic construct
  source 1..20: mol_type = other RNA
gccttctgcccaatccatct

SEQ ID NO: 16272 - RNA, 20 nt, synthetic construct
  source 1..20: mol_type = other RNA
ccttctgccttctgcccaat

SEQ ID NO: 16273 - RNA, 20 nt, synthetic construct
  source 1..20: mol_type = other RNA
tagaaacactgagataatac

SEQ ID NO: 16274 - RNA, 20 nt, synthetic construct
  source 1..20: mol_type = other RNA
aagaagcgtttgctacttta

SEQ ID NO: 16275 - RNA, 20 nt, synthetic construct
  source 1..20: mol_type = other RNA
catacttaaaagattattat

SEQ ID NO: 16276 - RNA, 20 nt, synthetic construct
  source 1..20: mol_type = other RNA
cataaaagtaccatatgatt

SEQ ID NO: 16277 - RNA, 20 nt, synthetic construct
  source 1..20: mol_type = other RNA
aatattcccataaaagtacc

SEQ ID NO: 16278 - RNA, 20 nt, synthetic construct
  source 1..20: mol_type = other RNA
aaaacgatacacgtcacaag

SEQ ID NO: 16279 - RNA, 20 nt, synthetic construct
  source 1..20: mol_type = other RNA
tgatcaagccactggaaatt

SEQ ID NO: 16280 - RNA, 20 nt, synthetic construct
  source 1..20: mol_type = other RNA
agtggcttgatcatgaacta

SEQ ID NO: 16281 - RNA, 20 nt, synthetic construct
  source 1..20: mol_type = other RNA
tgcagtagttcatgatcaag

SEQ ID NO: 16282 - RNA, 20 nt, synthetic construct
  source 1..20: mol_type = other RNA
gcgtctgagcattgtgtcag

SEQ ID NO: 16283 - RNA, 20 nt, synthetic construct
  source 1..20: mol_type = other RNA
gaaggagcctctaggcttgg

SEQ ID NO: 16284 - RNA, 20 nt, synthetic construct
  source 1..20: mol_type = other RNA
aagcctagaggctccttctg

SEQ ID NO: 16285 - RNA, 20 nt, synthetic construct
  source 1..20: mol_type = other RNA
gaacaaggtaaggagcctgt

SEQ ID NO: 16286 - RNA, 20 nt, synthetic construct
  source 1..20: mol_type = other RNA
tcccagcatcgaaacgtgta

SEQ ID NO: 16287 - RNA, 20 nt, synthetic construct
  source 1..20: mol_type = other RNA
atggcttttcatcccagcat

SEQ ID NO: 16288 - RNA, 20 nt, synthetic construct
  source 1..20: mol_type = other RNA
atgctgggatgaaaagccat

SEQ ID NO: 16289 - RNA, 20 nt, synthetic construct
  source 1..20: mol_type = other RNA
cactgatgcagcagcctcca

SEQ ID NO: 16290 - RNA, 20 nt, synthetic construct
  source 1..20: mol_type = other RNA
tcctacatgacagaactcag

SEQ ID NO: 16291 - RNA, 20 nt, synthetic construct
  source 1..20: mol_type = other RNA
gtcatgtaggaggaagcctc

SEQ ID NO: 16292 - RNA, 20 nt, synthetic construct
  source 1..20: mol_type = other RNA
ggtacaacgttgggtgggct

SEQ ID NO: 16293 - RNA, 20 nt, synthetic construct
  source 1..20: mol_type = other RNA
aaagacacagcccacccaac

SEQ ID NO: 16294 - RNA, 20 nt, synthetic construct
  source 1..20: mol_type = other RNA
acgaggtgagttgtgaagtc

SEQ ID NO: 16295 - RNA, 20 nt, synthetic construct
  source 1..20: mol_type = other RNA
caactcacctcgttgaaaaa

SEQ ID NO: 16296 - RNA, 20 nt, synthetic construct
  source 1..20: mol_type = other RNA
aagccagtaagcttttcctg

SEQ ID NO: 16297 - RNA, 20 nt, synthetic construct
  source 1..20: mol_type = other RNA
tgggacttcttcaattagcc

SEQ ID NO: 16298 - RNA, 20 nt, synthetic construct
  source 1..20: mol_type = other RNA
tcaattagccagcattcagt

SEQ ID NO: 16299 - RNA, 20 nt, synthetic construct
  source 1..20: mol_type = other RNA
attagccagcattcagtgca

SEQ ID NO: 16300 - RNA, 20 nt, synthetic construct
  source 1..20: mol_type = other RNA
gtgcaatcttcagcattgca

SEQ ID NO: 16301 - RNA, 20 nt, synthetic construct
  source 1..20: mol_type = other RNA
ctgaatctgcaatgctgaag

SEQ ID NO: 16302 - RNA, 20 nt, synthetic construct
  source 1..20: mol_type = other RNA
gcattgcagattcagagaaa

SEQ ID NO: 16303 - RNA, 20 nt, synthetic construct
  source 1..20: mol_type = other RNA
gagaaatgtggctctggagc

SEQ ID NO: 16304 - RNA, 20 nt, synthetic construct
  source 1..20: mol_type = other RNA
caagggtgacaggctccaga

SEQ ID NO: 16305 - RNA, 20 nt, synthetic construct
  source 1..20: mol_type = other RNA
aaatcaccctggttctatgg

SEQ ID NO: 16306 - RNA, 20 nt, synthetic construct
  source 1..20: mol_type = other RNA
tgtactgctccatagaacca

SEQ ID NO: 16307 - RNA, 20 nt, synthetic construct
  source 1..20: mol_type = other RNA
atggagcagtacatgaactc

SEQ ID NO: 16308 - RNA, 20 nt, synthetic construct
  source 1..20: mol_type = other RNA
ggacttcctcagtcataggt

SEQ ID NO: 16309 - RNA, 20 nt, synthetic construct
  source 1..20: mol_type = other RNA
tcagtcataggtgggctctg

SEQ ID NO: 16310 - RNA, 20 nt, synthetic construct
  source 1..20: mol_type = other RNA
ggtggcagttgtacctgtga

SEQ ID NO: 16311 - RNA, 20 nt, synthetic construct
  source 1..20: mol_type = other RNA
atccagaccgctcacaggta

SEQ ID NO: 16312 - RNA, 20 nt, synthetic construct
  source 1..20: mol_type = other RNA
gtattattgcaactcaggat

SEQ ID NO: 16313 - RNA, 20 nt, synthetic construct
  source 1..20: mol_type = other RNA
tctctcctgcaggggagtaa

SEQ ID NO: 16314 - RNA, 20 nt, synthetic construct
  source 1..20: mol_type = other RNA
cctccacccatccctgataa

SEQ ID NO: 16315 - RNA, 20 nt, synthetic construct
  source 1..20: mol_type = other RNA
gttatcagggatgggtggag

SEQ ID NO: 16316 - RNA, 20 nt, synthetic construct
  source 1..20: mol_type = other RNA
tctaggactgcagacaaaga

SEQ ID NO: 16317 - RNA, 20 nt, synthetic construct
  source 1..20: mol_type = other RNA
gggccatgggagagacaaca

SEQ ID NO: 16318 - RNA, 20 nt, synthetic construct
  source 1..20: mol_type = other RNA
gcttctgggccatgggagag

SEQ ID NO: 16319 - RNA, 20 nt, synthetic construct
  source 1..20: mol_type = other RNA
taacaaaaggcaaggtcttc

SEQ ID NO: 16320 - RNA, 20 nt, synthetic construct
  source 1..20: mol_type = other RNA
ttgttttcatgtctgtccgt

SEQ ID NO: 16321 - RNA, 20 nt, synthetic construct
  source 1..20: mol_type = other RNA
tgtctgtccgtttctctgcc

SEQ ID NO: 16322 - RNA, 20 nt, synthetic construct
  source 1..20: mol_type = other RNA
ctgcccctaacacccaatca

SEQ ID NO: 16323 - RNA, 20 nt, synthetic construct
  source 1..20: mol_type = other RNA
tgaggactatggggcagcaa

SEQ ID NO: 16324 - RNA, 20 nt, synthetic construct
  source 1..20: mol_type = other RNA
actgaatgttcatgaggact

SEQ ID NO: 16325 - RNA, 20 nt, synthetic construct
  source 1..20: mol_type = other RNA
gtagaaattcccataaatgt

SEQ ID NO: 16326 - RNA, 20 nt, synthetic construct
  source 1..20: mol_type = other RNA
cataaatgtgcttgcacgtg

SEQ ID NO: 16327 - RNA, 20 nt, synthetic construct
  source 1..20: mol_type = other RNA
caatggaaactgtgctcacg

SEQ ID NO: 16328 - RNA, 20 nt, synthetic construct
  source 1..20: mol_type = other RNA
attgagaagccctctcattt

SEQ ID NO: 16329 - RNA, 20 nt, synthetic construct
  source 1..20: mol_type = other RNA
cataaaagcttagaaaaaaa

SEQ ID NO: 16330 - RNA, 20 nt, synthetic construct
  source 1..20: mol_type = other RNA
aagcttttatgtgaaatatt

SEQ ID NO: 16331 - RNA, 20 nt, synthetic construct
  source 1..20: mol_type = other RNA
tagaaatatttcacataaaa

SEQ ID NO: 16332 - RNA, 20 nt, synthetic construct
  source 1..20: mol_type = other RNA
aagaacttactacagttcta

SEQ ID NO: 16333 - RNA, 20 nt, synthetic construct
  source 1..20: mol_type = other RNA
taacactttagaactgtagt

SEQ ID NO: 16334 - RNA, 20 nt, synthetic construct
  source 1..20: mol_type = other RNA
aaagtgttaggaatttgttt

SEQ ID NO: 16335 - RNA, 20 nt, synthetic construct
  source 1..20: mol_type = other RNA
ttggtgtttttgtttgttgg

SEQ ID NO: 16336 - RNA, 20 nt, synthetic construct
  source 1..20: mol_type = other RNA
caagtccatctgcctacaaa

SEQ ID NO: 16337 - RNA, 20 nt, synthetic construct
  source 1..20: mol_type = other RNA
ttatttgtaggcagatggac

SEQ ID NO: 16338 - RNA, 20 nt, synthetic construct
  source 1..20: mol_type = other RNA
tgtttctttatttgtaggca

SEQ ID NO: 16339 - RNA, 20 nt, synthetic construct
  source 1..20: mol_type = other RNA
cctgaggtcataattctcag

SEQ ID NO: 16340 - RNA, 20 nt, synthetic construct
  source 1..20: mol_type = other RNA
cagagacttttttctggttt

SEQ ID NO: 16341 - RNA, 20 nt, synthetic construct
  source 1..20: mol_type = other RNA
ggtttgtgccataagtggct

SEQ ID NO: 16342 - RNA, 20 nt, synthetic construct
  source 1..20: mol_type = other RNA
aagaagagacaaacatgtga

SEQ ID NO: 16343 - RNA, 20 nt, synthetic construct
  source 1..20: mol_type = other RNA
catgtttgtctcttcttgga

SEQ ID NO: 16344 - RNA, 20 nt, synthetic construct
  source 1..20: mol_type = other RNA
tggaaacactcagtttgatt

SEQ ID NO: 16345 - RNA, 20 nt, synthetic construct
  source 1..20: mol_type = other RNA
tttcagcaccaactgagcaa

SEQ ID NO: 16346 - RNA, 20 nt, synthetic construct
  source 1..20: mol_type = other RNA
gcaccaactgagcaaaggcc

SEQ ID NO: 16347 - RNA, 20 nt, synthetic construct
  source 1..20: mol_type = other RNA
cttatggtaaagaaaataga

SEQ ID NO: 16348 - RNA, 20 nt, synthetic construct
  source 1..20: mol_type = other RNA
ttcacttatggtaaagaaaa

SEQ ID NO: 16349 - RNA, 20 nt, synthetic construct
  source 1..20: mol_type = other RNA
ttaccataagtgaaggaagg

SEQ ID NO: 16350 - RNA, 20 nt, synthetic construct
  source 1..20: mol_type = other RNA
actgacccttccttcactta

SEQ ID NO: 16351 - RNA, 20 nt, synthetic construct
  source 1..20: mol_type = other RNA
gttagtagagtcatgcttca

SEQ ID NO: 16352 - RNA, 20 nt, synthetic construct
  source 1..20: mol_type = other RNA
agctgagtgttcaggactca

SEQ ID NO: 16353 - RNA, 20 nt, synthetic construct
  source 1..20: mol_type = other RNA
tctgagacaacttgagtcct

SEQ ID NO: 16354 - RNA, 20 nt, synthetic construct
  source 1..20: mol_type = other RNA
ggactcaagttgtctcagat

SEQ ID NO: 16355 - RNA, 20 nt, synthetic construct
  source 1..20: mol_type = other RNA
tgagacattttgctatgcac

SEQ ID NO: 16356 - RNA, 20 nt, synthetic construct
  source 1..20: mol_type = other RNA
cttagactctttgctcaaag

SEQ ID NO: 16357 - RNA, 20 nt, synthetic construct
  source 1..20: mol_type = other RNA
gctccattaaactaggagga

SEQ ID NO: 16358 - RNA, 20 nt, synthetic construct
  source 1..20: mol_type = other RNA
tcctagtttaatggagcaga

SEQ ID NO: 16359 - RNA, 20 nt, synthetic construct
  source 1..20: mol_type = other RNA
taatgtgatatccttgcctc

SEQ ID NO: 16360 - RNA, 20 nt, synthetic construct
  source 1..20: mol_type = other RNA
tcatttgtcatcttgacttg

SEQ ID NO: 16361 - RNA, 20 nt, synthetic construct
  source 1..20: mol_type = other RNA
acaacacccactaaggttca

SEQ ID NO: 16362 - RNA, 20 nt, synthetic construct
  source 1..20: mol_type = other RNA
aaggagaaaaggctgcattg

SEQ ID NO: 16363 - RNA, 20 nt, synthetic construct
  source 1..20: mol_type = other RNA
atgcagccttttctccttgg

SEQ ID NO: 16364 - RNA, 20 nt, synthetic construct
  source 1..20: mol_type = other RNA
ccttggaattctattaaact

SEQ ID NO: 16365 - RNA, 20 nt, synthetic construct
  source 1..20: mol_type = other RNA
attaaactaaactccaattc

SEQ ID NO: 16366 - RNA, 20 nt, synthetic construct
  source 1..20: mol_type = other RNA
ggaattggagtttagtttaa

SEQ ID NO: 16367 - RNA, 20 nt, synthetic construct
  source 1..20: mol_type = other RNA
cttcaggaattggagtttag

SEQ ID NO: 16368 - RNA, 20 nt, synthetic construct
  source 1..20: mol_type = other RNA
tgaagtgaaggttctgttgg

SEQ ID NO: 16369 - RNA, 20 nt, synthetic construct
  source 1..20: mol_type = other RNA
gttggggttttctgttttgg

SEQ ID NO: 16370 - RNA, 20 nt, synthetic construct
  source 1..20: mol_type = other RNA
ttgtaagccaaaacagaaaa

SEQ ID NO: 16371 - RNA, 20 nt, synthetic construct
  source 1..20: mol_type = other RNA
gttttggcttacaaggaaag

SEQ ID NO: 16372 - RNA, 20 nt, synthetic construct
  source 1..20: mol_type = other RNA
atatctacgtctattccaat

SEQ ID NO: 16373 - RNA, 20 nt, synthetic construct
  source 1..20: mol_type = other RNA
acatattggaatagacgtag

SEQ ID NO: 16374 - RNA, 20 nt, synthetic construct
  source 1..20: mol_type = other RNA
aatatgtagaaacacagtcg

SEQ ID NO: 16375 - RNA, 20 nt, synthetic construct
  source 1..20: mol_type = other RNA
gaccactggtggtcagaacc

SEQ ID NO: 16376 - RNA, 20 nt, synthetic construct
  source 1..20: mol_type = other RNA
gaccaccagtggtctgaagg

SEQ ID NO: 16377 - RNA, 20 nt, synthetic construct
  source 1..20: mol_type = other RNA
ctaacaaccagtatcccttc

SEQ ID NO: 16378 - RNA, 20 nt, synthetic construct
  source 1..20: mol_type = other RNA
tgccatttttattctctaac

SEQ ID NO: 16379 - RNA, 20 nt, synthetic construct
  source 1..20: mol_type = other RNA
gtccatctatccaccctttt

SEQ ID NO: 16380 - RNA, 20 nt, synthetic construct
  source 1..20: mol_type = other RNA
atgtctttggtgtcacttat

SEQ ID NO: 16381 - RNA, 20 nt, synthetic construct
  source 1..20: mol_type = other RNA
acatgttggacaacagacag

SEQ ID NO: 16382 - RNA, 20 nt, synthetic construct
  source 1..20: mol_type = other RNA
tttggtccactactgtctgt

SEQ ID NO: 16383 - RNA, 20 nt, synthetic construct
  source 1..20: mol_type = other RNA
ccctgtcactattcttttgg

SEQ ID NO: 16384 - RNA, 20 nt, synthetic construct
  source 1..20: mol_type = other RNA
tcctggaggcccttcttgca

SEQ ID NO: 16385 - RNA, 20 nt, synthetic construct
  source 1..20: mol_type = other RNA
gtgcaagaagggcctccagg

SEQ ID NO: 16386 - RNA, 20 nt, synthetic construct
  source 1..20: mol_type = other RNA
tggaggcccttcttgcactg

SEQ ID NO: 16387 - RNA, 20 nt, synthetic construct
  source 1..20: mol_type = other RNA
tgcactgaagagcaaggtga

SEQ ID NO: 16388 - RNA, 20 nt, synthetic construct
  source 1..20: mol_type = other RNA
ggaagatggctacagtccat

SEQ ID NO: 16389 - RNA, 20 nt, synthetic construct
  source 1..20: mol_type = other RNA
aatctctctcctgcattcag

SEQ ID NO: 16390 - RNA, 20 nt, synthetic construct
  source 1..20: mol_type = other RNA
tgaatgcaggagagagattg

SEQ ID NO: 16391 - RNA, 20 nt, synthetic construct
  source 1..20: mol_type = other RNA
cagcaggcctataaaatcct

SEQ ID NO: 16392 - RNA, 20 nt, synthetic construct
  source 1..20: mol_type = other RNA
cattctcagcaggcctataa

SEQ ID NO: 16393 - RNA, 20 nt, synthetic construct
  source 1..20: mol_type = other RNA
tccacaaatccattctcatt

SEQ ID NO: 16394 - RNA, 20 nt, synthetic construct
  source 1..20: mol_type = other RNA
aggagactactatgcgtgcc

SEQ ID NO: 16395 - RNA, 20 nt, synthetic construct
  source 1..20: mol_type = other RNA
gggcacatgcaacgtcatgt

SEQ ID NO: 16396 - RNA, 20 nt, synthetic construct
  source 1..20: mol_type = other RNA
tgtggaacctttttctgggc

SEQ ID NO: 16397 - RNA, 20 nt, synthetic construct
  source 1..20: mol_type = other RNA
ctactttcttgtggaacctt

SEQ ID NO: 16398 - RNA, 20 nt, synthetic construct
  source 1..20: mol_type = other RNA
tttctctactttcttgtgga

SEQ ID NO: 16399 - RNA, 20 nt, synthetic construct
  source 1..20: mol_type = other RNA
acaagaaagtagagaaaaga

SEQ ID NO: 16400 - RNA, 20 nt, synthetic construct
  source 1..20: mol_type = other RNA
tcaggatatattcttttctc

SEQ ID NO: 16401 - RNA, 20 nt, synthetic construct
  source 1..20: mol_type = other RNA
atcgcagttgctattcctca

SEQ ID NO: 16402 - RNA, 20 nt, synthetic construct
  source 1..20: mol_type = other RNA
gggatactggagttctgacc

SEQ ID NO: 16403 - RNA, 20 nt, synthetic construct
  source 1..20: mol_type = other RNA
gaccagctggaggagagacc

SEQ ID NO: 16404 - RNA, 20 nt, synthetic construct
  source 1..20: mol_type = other RNA
gtgaggtctctcctccagct

SEQ ID NO: 16405 - RNA, 20 nt, synthetic construct
  source 1..20: mol_type = other RNA
caagaggttcagtgaggtct

SEQ ID NO: 16406 - RNA, 20 nt, synthetic construct
  source 1..20: mol_type = other RNA
ggagtctctactgtattccc

SEQ ID NO: 16407 - RNA, 20 nt, synthetic construct
  source 1..20: mol_type = other RNA
actcctaaagtatgactttt

SEQ ID NO: 16408 - RNA, 20 nt, synthetic construct
  source 1..20: mol_type = other RNA
agaaatttactaattctact

SEQ ID NO: 16409 - RNA, 20 nt, synthetic construct
  source 1..20: mol_type = other RNA
agaaaaaaaggcagctctag

SEQ ID NO: 16410 - RNA, 20 nt, synthetic construct
  source 1..20: mol_type = other RNA
gttttgccagggtttgtcta

SEQ ID NO: 16411 - RNA, 20 nt, synthetic construct
  source 1..20: mol_type = other RNA
aagtcaattaactgcctggg

SEQ ID NO: 16412 - RNA, 20 nt, synthetic construct
  source 1..20: mol_type = other RNA
tctcccaggcagttaattga

SEQ ID NO: 16413 - RNA, 20 nt, synthetic construct
  source 1..20: mol_type = other RNA
cagtgtgagttctaaattta

SEQ ID NO: 16414 - RNA, 20 nt, synthetic construct
  source 1..20: mol_type = other RNA
aaatttaaaacttgactaca

SEQ ID NO: 16415 - RNA, 20 nt, synthetic construct
  source 1..20: mol_type = other RNA
ctatgtgtagtcaagtttta

SEQ ID NO: 16416 - RNA, 20 nt, synthetic construct
  source 1..20: mol_type = other RNA
tactaaaagcttctctatgt

SEQ ID NO: 16417 - RNA, 20 nt, synthetic construct
  source 1..20: mol_type = other RNA
cctggtcatggttcatacta

SEQ ID NO: 16418 - RNA, 20 nt, synthetic construct
  source 1..20: mol_type = other RNA
aggtctatttgtattgactg

SEQ ID NO: 16419 - RNA, 20 nt, synthetic construct
  source 1..20: mol_type = other RNA
gtcatttctaggtctatttg

SEQ ID NO: 16420 - RNA, 20 nt, synthetic construct
  source 1..20: mol_type = other RNA
aatcatttctgtcatttcta

SEQ ID NO: 16421 - RNA, 20 nt, synthetic construct
  source 1..20: mol_type = other RNA
taaaacctaaaactcagttg

SEQ ID NO: 16422 - RNA, 20 nt, synthetic construct
  source 1..20: mol_type = other RNA
tgttttcttaaaacctaaaa

SEQ ID NO: 16423 - RNA, 20 nt, synthetic construct
  source 1..20: mol_type = other RNA
gtattcatgttttcttaaaa

SEQ ID NO: 16424 - RNA, 20 nt, synthetic construct
  source 1..20: mol_type = other RNA
ttccgtattcatgttttctt

SEQ ID NO: 16425 - RNA, 20 nt, synthetic construct
  source 1..20: mol_type = other RNA
atactgttactgtctcttga

SEQ ID NO: 16426 - RNA, 20 nt, synthetic construct
  source 1..20: mol_type = other RNA
ttaatttaatttggctcttc

SEQ ID NO: 16427 - RNA, 20 nt, synthetic construct
  source 1..20: mol_type = other RNA
tatactagttctttaattta

SEQ ID NO: 16428 - RNA, 20 nt, synthetic construct
  source 1..20: mol_type = other RNA
tttaagacataccttcttat

SEQ ID NO: 16429 - RNA, 20 nt, synthetic construct
  source 1..20: mol_type = other RNA
gaaacatctcactccattgg

SEQ ID NO: 16430 - RNA, 20 nt, synthetic construct
  source 1..20: mol_type = other RNA
caatggagtgagatgtttca

SEQ ID NO: 16431 - RNA, 20 nt, synthetic construct
  source 1..20: mol_type = other RNA
gttagtttttacttctgaaa

SEQ ID NO: 16432 - RNA, 20 nt, synthetic construct
  source 1..20: mol_type = other RNA
gaagtaaaaactaactgaaa

SEQ ID NO: 16433 - RNA, 20 nt, synthetic construct
  source 1..20: mol_type = other RNA
gtaggtggtataaaattgtt

SEQ ID NO: 16434 - RNA, 20 nt, synthetic construct
  source 1..20: mol_type = other RNA
aagcctgtgcatgtgtgagt

SEQ ID NO: 16435 - RNA, 20 nt, synthetic construct
  source 1..20: mol_type = other RNA
ttttttagtatttgtggagg

SEQ ID NO: 16436 - RNA, 20 nt, synthetic construct
  source 1..20: mol_type = other RNA
cgcctgtctgtgaggatcag

SEQ ID NO: 16437 - RNA, 20 nt, synthetic construct
  source 1..20: mol_type = other RNA
tacccacatgcaggaaatct

SEQ ID NO: 16438 - RNA, 20 nt, synthetic construct
  source 1..20: mol_type = other RNA
tgcatgtgggtaggaagtca

SEQ ID NO: 16439 - RNA, 20 nt, synthetic construct
  source 1..20: mol_type = other RNA
gtgacttcctacccacatgc

SEQ ID NO: 16440 - RNA, 20 nt, synthetic construct
  source 1..20: mol_type = other RNA
tctccttctgtgacttccta

SEQ ID NO: 16441 - RNA, 20 nt, synthetic construct
  source 1..20: mol_type = other RNA
tgtagcaatctctccttcct

SEQ ID NO: 16442 - RNA, 20 nt, synthetic construct
  source 1..20: mol_type = other RNA
agtatttgttcctgtagcaa

SEQ ID NO: 16443 - RNA, 20 nt, synthetic construct
  source 1..20: mol_type = other RNA
tatttgaaaagtttttagct

SEQ ID NO: 16444 - RNA, 20 nt, synthetic construct
  source 1..20: mol_type = other RNA
tcttatttgaaaagttttta

SEQ ID NO: 16445 - RNA, 20 nt, synthetic construct
  source 1..20: mol_type = other RNA
aataagaagaatattaaaaa

SEQ ID NO: 16446 - RNA, 20 nt, synthetic construct
  source 1..20: mol_type = other RNA
tgaatctgtggtttttaata

SEQ ID NO: 16447 - RNA, 20 nt, synthetic construct
  source 1..20: mol_type = other RNA
gcttcttgaatctgtggttt

SEQ ID NO: 16448 - RNA, 20 nt, synthetic construct
  source 1..20: mol_type = other RNA
ttcagcttcttgaatctgtg

SEQ ID NO: 16449 - RNA, 20 nt, synthetic construct
  source 1..20: mol_type = other RNA
agaagctgaatgaatcagac

SEQ ID NO: 16450 - RNA, 20 nt, synthetic construct
  source 1..20: mol_type = other RNA
ctgtctgattcattcagctt

SEQ ID NO: 16451 - RNA, 20 nt, synthetic construct
  source 1..20: mol_type = other RNA
aaaaaaaaaaaaaaaaaaac

SEQ ID NO: 16452 - RNA, 20 nt, synthetic construct
  source 1..20: mol_type = other RNA
cttttgtacatcaccgttca

SEQ ID NO: 16453 - RNA, 20 nt, synthetic construct
  source 1..20: mol_type = other RNA
gactgttgaacggtgatgta

SEQ ID NO: 16454 - RNA, 20 nt, synthetic construct
  source 1..20: mol_type = other RNA
acagtcagaaggcaaagata

SEQ ID NO: 16455 - RNA, 20 nt, synthetic construct
  source 1..20: mol_type = other RNA
tgttattatatctttgcctt

SEQ ID NO: 16456 - RNA, 20 nt, synthetic construct
  source 1..20: mol_type = other RNA
catgagatgtttcttgttat

SEQ ID NO: 16457 - RNA, 20 nt, synthetic construct
  source 1..20: mol_type = other RNA
tccagtttctcatgagatgt

SEQ ID NO: 16458 - RNA, 20 nt, synthetic construct
  source 1..20: mol_type = other RNA
agcaagacacagctcttttt

SEQ ID NO: 16459 - RNA, 20 nt, synthetic construct
  source 1..20: mol_type = other RNA
tctagcaagacacagctctt

SEQ ID NO: 16460 - RNA, 20 nt, synthetic construct
  source 1..20: mol_type = other RNA
gatgagaatgcattagcaat

SEQ ID NO: 16461 - RNA, 20 nt, synthetic construct
  source 1..20: mol_type = other RNA
agtgtttctgatgagaatgc

SEQ ID NO: 16462 - RNA, 20 nt, synthetic construct
  source 1..20: mol_type = other RNA
catcagaaacactggaaccc

SEQ ID NO: 16463 - RNA, 20 nt, synthetic construct
  source 1..20: mol_type = other RNA
agtttatcattttaatgata

SEQ ID NO: 16464 - RNA, 20 nt, synthetic construct
  source 1..20: mol_type = other RNA
catttgatctcttttttttc

SEQ ID NO: 16465 - RNA, 20 nt, synthetic construct
  source 1..20: mol_type = other RNA
aggcattttattgctggatg

SEQ ID NO: 16466 - RNA, 20 nt, synthetic construct
  source 1..20: mol_type = other RNA
aaattattagtttttggttt

SEQ ID NO: 16467 - RNA, 20 nt, synthetic construct
  source 1..20: mol_type = other RNA
ttgggcaacatctcttgtta

SEQ ID NO: 16468 - RNA, 20 nt, synthetic construct
  source 1..20: mol_type = other RNA
agctaattttctttgggcaa

SEQ ID NO: 16469 - RNA, 20 nt, synthetic construct
  source 1..20: mol_type = other RNA
tctagctaattttctttggg

SEQ ID NO: 16470 - RNA, 20 nt, synthetic construct
  source 1..20: mol_type = other RNA
tcttctagctaattttcttt

SEQ ID NO: 16471 - RNA, 20 nt, synthetic construct
  source 1..20: mol_type = other RNA
cctcttgaactattcttctt

SEQ ID NO: 16472 - RNA, 20 nt, synthetic construct
  source 1..20: mol_type = other RNA
agaggagaactttctgcagc

SEQ ID NO: 16473 - RNA, 20 nt, synthetic construct
  source 1..20: mol_type = other RNA
ttacgtgggctgcagaaagt

SEQ ID NO: 16474 - RNA, 20 nt, synthetic construct
  source 1..20: mol_type = other RNA
tcattacgtgggctgcagaa

SEQ ID NO: 16475 - RNA, 20 nt, synthetic construct
  source 1..20: mol_type = other RNA
gcagcccacgtaatgaagaa

SEQ ID NO: 16476 - RNA, 20 nt, synthetic construct
  source 1..20: mol_type = other RNA
tgatcaaatttctatatctt

SEQ ID NO: 16477 - RNA, 20 nt, synthetic construct
  source 1..20: mol_type = other RNA
atatctttttaaatgagagt

SEQ ID NO: 16478 - RNA, 20 nt, synthetic construct
  source 1..20: mol_type = other RNA
agtagtcaactctcatttaa

SEQ ID NO: 16479 - RNA, 20 nt, synthetic construct
  source 1..20: mol_type = other RNA
aatttttacctctacatatg

SEQ ID NO: 16480 - RNA, 20 nt, synthetic construct
  source 1..20: mol_type = other RNA
ccacatgatttagtctatat

SEQ ID NO: 16481 - RNA, 20 nt, synthetic construct
  source 1..20: mol_type = other RNA
aattattccccacatgattt

SEQ ID NO: 16482 - RNA, 20 nt, synthetic construct
  source 1..20: mol_type = other RNA
taccttatccacgatggtat

SEQ ID NO: 16483 - RNA, 20 nt, synthetic construct
  source 1..20: mol_type = other RNA
ttaatattacataccatcgt

SEQ ID NO: 16484 - RNA, 20 nt, synthetic construct
  source 1..20: mol_type = other RNA
acctttcattaatattacat

SEQ ID NO: 16485 - RNA, 20 nt, synthetic construct
  source 1..20: mol_type = other RNA
aaattttatgattgctttag

SEQ ID NO: 16486 - RNA, 20 nt, synthetic construct
  source 1..20: mol_type = other RNA
tattatataatatccctcag

SEQ ID NO: 16487 - RNA, 20 nt, synthetic construct
  source 1..20: mol_type = other RNA
gagggatattatataataag

SEQ ID NO: 16488 - RNA, 20 nt, synthetic construct
  source 1..20: mol_type = other RNA
ctcttttggatacatggaaa

SEQ ID NO: 16489 - RNA, 20 nt, synthetic construct
  source 1..20: mol_type = other RNA
atgtatccaaaagagggaag

SEQ ID NO: 16490 - RNA, 20 nt, synthetic construct
  source 1..20: mol_type = other RNA
ttggcttccctcttttggat

SEQ ID NO: 16491 - RNA, 20 nt, synthetic construct
  source 1..20: mol_type = other RNA
tccttggcttccctcttttg

SEQ ID NO: 16492 - RNA, 20 nt, synthetic construct
  source 1..20: mol_type = other RNA
ttttcttccttggcttccct

SEQ ID NO: 16493 - RNA, 20 nt, synthetic construct
  source 1..20: mol_type = other RNA
agtactcaagctctgagcac

SEQ ID NO: 16494 - RNA, 20 nt, synthetic construct
  source 1..20: mol_type = other RNA
atgagcaactggatgtgctc

SEQ ID NO: 16495 - RNA, 20 nt, synthetic construct
  source 1..20: mol_type = other RNA
aggaagctggttcaatgagc

SEQ ID NO: 16496 - RNA, 20 nt, synthetic construct
  source 1..20: mol_type = other RNA
tggaatggagggtctgggct

SEQ ID NO: 16497 - RNA, 20 nt, synthetic construct
  source 1..20: mol_type = other RNA
cgttttcccaggcagccaca

SEQ ID NO: 16498 - RNA, 20 nt, synthetic construct
  source 1..20: mol_type = other RNA
tgacctgtggctgcctggga

SEQ ID NO: 16499 - RNA, 20 nt, synthetic construct
  source 1..20: mol_type = other RNA
caggcagccacaggtcacga

SEQ ID NO: 16500 - RNA, 20 nt, synthetic construct
  source 1..20: mol_type = other RNA
gagaggttggagcaatgttc

SEQ ID NO: 16501 - RNA, 20 nt, synthetic construct
  source 1..20: mol_type = other RNA
ctcctccttatgcctcctaa

SEQ ID NO: 16502 - RNA, 20 nt, synthetic construct
  source 1..20: mol_type = other RNA
taggaggcataaggaggagt

SEQ ID NO: 16503 - RNA, 20 nt, synthetic construct
  source 1..20: mol_type = other RNA
ccagcctgaggtcctccata

SEQ ID NO: 16504 - RNA, 20 nt, synthetic construct
  source 1..20: mol_type = other RNA
gacctcatagtctgcccagc

SEQ ID NO: 16505 - RNA, 20 nt, synthetic construct
  source 1..20: mol_type = other RNA
ttcaactcatcccccattcc

SEQ ID NO: 16506 - RNA, 20 nt, synthetic construct
  source 1..20: mol_type = other RNA
actcatcccccattccctca

SEQ ID NO: 16507 - RNA, 20 nt, synthetic construct
  source 1..20: mol_type = other RNA
gggactgagggaatggggga

SEQ ID NO: 16508 - RNA, 20 nt, synthetic construct
  source 1..20: mol_type = other RNA
ctcagtcccggaattgctgt

SEQ ID NO: 16509 - RNA, 20 nt, synthetic construct
  source 1..20: mol_type = other RNA
tctcctgctctcagtccatc

SEQ ID NO: 16510 - RNA, 20 nt, synthetic construct
  source 1..20: mol_type = other RNA
tggtcaggacttcctctcct

SEQ ID NO: 16511 - RNA, 20 nt, synthetic construct
  source 1..20: mol_type = other RNA
ggcaggatgcagtatctcta

SEQ ID NO: 16512 - RNA, 20 nt, synthetic construct
  source 1..20: mol_type = other RNA
caaagctgccctggaaacct

SEQ ID NO: 16513 - RNA, 20 nt, synthetic construct
  source 1..20: mol_type = other RNA
agggcagctttgagaagtct

SEQ ID NO: 16514 - RNA, 20 nt, synthetic construct
  source 1..20: mol_type = other RNA
gcaagacttctcaaagctgc

SEQ ID NO: 16515 - RNA, 20 nt, synthetic construct
  source 1..20: mol_type = other RNA
ttctgcaagacttctcaaag

SEQ ID NO: 16516 - RNA, 20 nt, synthetic construct
  source 1..20: mol_type = other RNA
tgtctgtcgataccgtatca

SEQ ID NO: 16517 - RNA, 20 nt, synthetic construct
  source 1..20: mol_type = other RNA
gcatgtaaaaccattgcaca

SEQ ID NO: 16518 - RNA, 20 nt, synthetic construct
  source 1..20: mol_type = other RNA
atgtactcaaaatgtagcca

SEQ ID NO: 16519 - RNA, 20 nt, synthetic construct
  source 1..20: mol_type = other RNA
caggccagcagtctcattca

SEQ ID NO: 16520 - RNA, 20 nt, synthetic construct
  source 1..20: mol_type = other RNA
ccagagaaaaaaatggcatc

SEQ ID NO: 16521 - RNA, 20 nt, synthetic construct
  source 1..20: mol_type = other RNA
ctggagaactatgtgttagt

SEQ ID NO: 16522 - RNA, 20 nt, synthetic construct
  source 1..20: mol_type = other RNA
tatagtaatgtgcgagttgg

SEQ ID NO: 16523 - RNA, 20 nt, synthetic construct
  source 1..20: mol_type = other RNA
aactcgcacattactatatg

SEQ ID NO: 16524 - RNA, 20 nt, synthetic construct
  source 1..20: mol_type = other RNA
acaatacacacgtcaaaatc

SEQ ID NO: 16525 - RNA, 20 nt, synthetic construct
  source 1..20: mol_type = other RNA
gcccaatccatctctctgga

SEQ ID NO: 16526 - RNA, 20 nt, synthetic construct
  source 1..20: mol_type = other RNA
agagagatggattgggcaga

SEQ ID NO: 16527 - RNA, 20 nt, synthetic construct
  source 1..20: mol_type = other RNA
gccttctgcccaatccatct

SEQ ID NO: 16528 - RNA, 20 nt, synthetic construct
  source 1..20: mol_type = other RNA
gatccctttttggccacatg

SEQ ID NO: 16529 - RNA, 20 nt, synthetic construct
  source 1..20: mol_type = other RNA
tagaaacactgagattatac

SEQ ID NO: 16530 - RNA, 20 nt, synthetic construct
  source 1..20: mol_type = other RNA
aggaagtgtgtgctgcatta

SEQ ID NO: 16531 - RNA, 20 nt, synthetic construct
  source 1..20: mol_type = other RNA
ttaaaaaaagtgataatata

SEQ ID NO: 16532 - RNA, 20 nt, synthetic construct
  source 1..20: mol_type = other RNA
catacttaatatattatcac

SEQ ID NO: 16533 - RNA, 20 nt, synthetic construct
  source 1..20: mol_type = other RNA
caaaagagataccatacaat

SEQ ID NO: 16534 - RNA, 20 nt, synthetic construct
  source 1..20: mol_type = other RNA
aaggcaccagtaatgacctt

SEQ ID NO: 16535 - RNA, 20 nt, synthetic construct
  source 1..20: mol_type = other RNA
tgcatatgtacccatttttt

SEQ ID NO: 16536 - RNA, 20 nt, synthetic construct
  source 1..20: mol_type = other RNA
aaaagaatacacatcacaaa

SEQ ID NO: 16537 - RNA, 20 nt, synthetic construct
  source 1..20: mol_type = other RNA
tgatcaagccactggaaatt

SEQ ID NO: 16538 - RNA, 20 nt, synthetic construct
  source 1..20: mol_type = other RNA
agtggcttgatcaagaacta

SEQ ID NO: 16539 - RNA, 20 nt, synthetic construct
  source 1..20: mol_type = other RNA
aaaaaagcctctaggcttgg

SEQ ID NO: 16540 - RNA, 20 nt, synthetic construct
  source 1..20: mol_type = other RNA
taccttgttcaaaaaaagcc

SEQ ID NO: 16541 - RNA, 20 nt, synthetic construct
  source 1..20: mol_type = other RNA
tcccagcatccaagcaggta

SEQ ID NO: 16542 - RNA, 20 nt, synthetic construct
  source 1..20: mol_type = other RNA
gtgctacactggttctcgtg

SEQ ID NO: 16543 - RNA, 20 nt, synthetic construct
  source 1..20: mol_type = other RNA
cgtgtgttggttctgggtct

SEQ ID NO: 16544 - RNA, 20 nt, synthetic construct
  source 1..20: mol_type = other RNA
tcccacatggcagacccaga

SEQ ID NO: 16545 - RNA, 20 nt, synthetic construct
  source 1..20: mol_type = other RNA
gggtctgccatgtgggagga

SEQ ID NO: 16546 - RNA, 20 nt, synthetic construct
  source 1..20: mol_type = other RNA
gcccatcctaaagacacagc

SEQ ID NO: 16547 - RNA, 20 nt, synthetic construct
  source 1..20: mol_type = other RNA
gggtgctcgacttcaccact

SEQ ID NO: 16548 - RNA, 20 nt, synthetic construct
  source 1..20: mol_type = other RNA
ccactcccctcattgtaaaa

SEQ ID NO: 16549 - RNA, 20 nt, synthetic construct
  source 1..20: mol_type = other RNA
tattgtaatatgctgtcaga

SEQ ID NO: 16550 - RNA, 20 nt, synthetic construct
  source 1..20: mol_type = other RNA
aagccagtaaacttttccag

SEQ ID NO: 16551 - RNA, 20 nt, synthetic construct
  source 1..20: mol_type = other RNA
agggatttcttcaagtagac

SEQ ID NO: 16552 - RNA, 20 nt, synthetic construct
  source 1..20: mol_type = other RNA
tcaagtagacagcattcagt

SEQ ID NO: 16553 - RNA, 20 nt, synthetic construct
  source 1..20: mol_type = other RNA
agtagacagcattcagtgca

SEQ ID NO: 16554 - RNA, 20 nt, synthetic construct
  source 1..20: mol_type = other RNA
gtgcaatcttcagcattgca

SEQ ID NO: 16555 - RNA, 20 nt, synthetic construct
  source 1..20: mol_type = other RNA
cggaatctgcaatgctgaag

SEQ ID NO: 16556 - RNA, 20 nt, synthetic construct
  source 1..20: mol_type = other RNA
gcattgcagattccgagaaa

SEQ ID NO: 16557 - RNA, 20 nt, synthetic construct
  source 1..20: mol_type = other RNA
gagaaatgtggctctagatc

SEQ ID NO: 16558 - RNA, 20 nt, synthetic construct
  source 1..20: mol_type = other RNA
caaggataacaggatctaga

SEQ ID NO: 16559 - RNA, 20 nt, synthetic construct
  source 1..20: mol_type = other RNA
atatctccctgggtctgtgg

SEQ ID NO: 16560 - RNA, 20 nt, synthetic construct
  source 1..20: mol_type = other RNA
ggagctcatgtactactcca

SEQ ID NO: 16561 - RNA, 20 nt, synthetic construct
  source 1..20: mol_type = other RNA
gtccgaggcaggttgtgcag

SEQ ID NO: 16562 - RNA, 20 nt, synthetic construct
  source 1..20: mol_type = other RNA
aagctaagaactgcacaacc

SEQ ID NO: 16563 - RNA, 20 nt, synthetic construct
  source 1..20: mol_type = other RNA
tagctttgaagggagtgatt

SEQ ID NO: 16564 - RNA, 20 nt, synthetic construct
  source 1..20: mol_type = other RNA
tgtgcttttgcctctttctg

SEQ ID NO: 16565 - RNA, 20 nt, synthetic construct
  source 1..20: mol_type = other RNA
atcagaaagaggcaaaagca

SEQ ID NO: 16566 - RNA, 20 nt, synthetic construct
  source 1..20: mol_type = other RNA
gatggaacttgtacctgcgg

SEQ ID NO: 16567 - RNA, 20 nt, synthetic construct
  source 1..20: mol_type = other RNA
ccagaccccccgcaggtaca

SEQ ID NO: 16568 - RNA, 20 nt, synthetic construct
  source 1..20: mol_type = other RNA
ctatcttattgtaggtgata

SEQ ID NO: 16569 - RNA, 20 nt, synthetic construct
  source 1..20: mol_type = other RNA
cagggatgagtggaggccaa

SEQ ID NO: 16570 - RNA, 20 nt, synthetic construct
  source 1..20: mol_type = other RNA
cttctcagggatgagtggag

SEQ ID NO: 16571 - RNA, 20 nt, synthetic construct
  source 1..20: mol_type = other RNA
tttttgagcaatcatctagg

SEQ ID NO: 16572 - RNA, 20 nt, synthetic construct
  source 1..20: mol_type = other RNA
gctttgccaaatgcatcacc

SEQ ID NO: 16573 - RNA, 20 nt, synthetic construct
  source 1..20: mol_type = other RNA
tctatgctgttccatgtcgt

SEQ ID NO: 16574 - RNA, 20 nt, synthetic construct
  source 1..20: mol_type = other RNA
tgacgacatggaacagcata

SEQ ID NO: 16575 - RNA, 20 nt, synthetic construct
  source 1..20: mol_type = other RNA
atgctgttccatgtcgtcat

SEQ ID NO: 16576 - RNA, 20 nt, synthetic construct
  source 1..20: mol_type = other RNA
atgtcgtcatgaacactctg

SEQ ID NO: 16577 - RNA, 20 nt, synthetic construct
  source 1..20: mol_type = other RNA
aggaatctctacagagtgtt

SEQ ID NO: 16578 - RNA, 20 nt, synthetic construct
  source 1..20: mol_type = other RNA
tagaaatgagcttccatgtt

SEQ ID NO: 16579 - RNA, 20 nt, synthetic construct
  source 1..20: mol_type = other RNA
atgttagtggagtttccgat

SEQ ID NO: 16580 - RNA, 20 nt, synthetic construct
  source 1..20: mol_type = other RNA
catcggaaactccactaaca

SEQ ID NO: 16581 - RNA, 20 nt, synthetic construct
  source 1..20: mol_type = other RNA
gatgagaagcaatctgatat

SEQ ID NO: 16582 - RNA, 20 nt, synthetic construct
  source 1..20: mol_type = other RNA
tgtaaaacttagtggaaaag

SEQ ID NO: 16583 - RNA, 20 nt, synthetic construct
  source 1..20: mol_type = other RNA
tttccactaagttttacatg

SEQ ID NO: 16584 - RNA, 20 nt, synthetic construct
  source 1..20: mol_type = other RNA
actaagttttacatgaaata

SEQ ID NO: 16585 - RNA, 20 nt, synthetic construct
  source 1..20: mol_type = other RNA
tagaaatatttcatgtaaaa

SEQ ID NO: 16586 - RNA, 20 nt, synthetic construct
  source 1..20: mol_type = other RNA
agaactgtagtaagttctta

SEQ ID NO: 16587 - RNA, 20 nt, synthetic construct
  source 1..20: mol_type = other RNA
aagaacttactacagttcta

SEQ ID NO: 16588 - RNA, 20 nt, synthetic construct
  source 1..20: mol_type = other RNA
agaatggtaggcatctctta

SEQ ID NO: 16589 - RNA, 20 nt, synthetic construct
  source 1..20: mol_type = other RNA
tgtttgtttgtgtgttttct

SEQ ID NO: 16590 - RNA, 20 nt, synthetic construct
  source 1..20: mol_type = other RNA
catgtccatttgcctattaa

SEQ ID NO: 16591 - RNA, 20 nt, synthetic construct
  source 1..20: mol_type = other RNA
ttattaataggcaaatggac

SEQ ID NO: 16592 - RNA, 20 nt, synthetic construct
  source 1..20: mol_type = other RNA
ctattctttattaataggca

SEQ ID NO: 16593 - RNA, 20 nt, synthetic construct
  source 1..20: mol_type = other RNA
tagaacagaaaaatacagga

SEQ ID NO: 16594 - RNA, 20 nt, synthetic construct
  source 1..20: mol_type = other RNA
tgtatttttctgttctagga

SEQ ID NO: 16595 - RNA, 20 nt, synthetic construct
  source 1..20: mol_type = other RNA
gttctaggaaataataagct

SEQ ID NO: 16596 - RNA, 20 nt, synthetic construct
  source 1..20: mol_type = other RNA
aggaaataataagcttgatg

SEQ ID NO: 16597 - RNA, 20 nt, synthetic construct
  source 1..20: mol_type = other RNA
tcagtcagtgctgaaattaa

SEQ ID NO: 16598 - RNA, 20 nt, synthetic construct
  source 1..20: mol_type = other RNA
tgtgacagtggtggagtatg

SEQ ID NO: 16599 - RNA, 20 nt, synthetic construct
  source 1..20: mol_type = other RNA
tcctgtgacagtggtggagt

SEQ ID NO: 16600 - RNA, 20 nt, synthetic construct
  source 1..20: mol_type = other RNA
cttatggtaaagaacaaaga

SEQ ID NO: 16601 - RNA, 20 nt, synthetic construct
  source 1..20: mol_type = other RNA
ttcgcttatggtaaagaaca

SEQ ID NO: 16602 - RNA, 20 nt, synthetic construct
  source 1..20: mol_type = other RNA
ttaccataagcgaaggaagg

SEQ ID NO: 16603 - RNA, 20 nt, synthetic construct
  source 1..20: mol_type = other RNA
attggcccttccttcgctta

SEQ ID NO: 16604 - RNA, 20 nt, synthetic construct
  source 1..20: mol_type = other RNA
aacagaaacttccattggcc

SEQ ID NO: 16605 - RNA, 20 nt, synthetic construct
  source 1..20: mol_type = other RNA
gttagaagagtcatgcttca

SEQ ID NO: 16606 - RNA, 20 nt, synthetic construct
  source 1..20: mol_type = other RNA
aggtgactgctcaggactca

SEQ ID NO: 16607 - RNA, 20 nt, synthetic construct
  source 1..20: mol_type = other RNA
tctgcatctgagccaagttg

SEQ ID NO: 16608 - RNA, 20 nt, synthetic construct
  source 1..20: mol_type = other RNA
ctaagaacttttgctcacag

SEQ ID NO: 16609 - RNA, 20 nt, synthetic construct
  source 1..20: mol_type = other RNA
tgtgagcaaaagttcttaga

SEQ ID NO: 16610 - RNA, 20 nt, synthetic construct
  source 1..20: mol_type = other RNA
tagagaagactttgtttttt

SEQ ID NO: 16611 - RNA, 20 nt, synthetic construct
  source 1..20: mol_type = other RNA
caccattctcctgcttcagc

SEQ ID NO: 16612 - RNA, 20 nt, synthetic construct
  source 1..20: mol_type = other RNA
cctgcttcagcctctctagc

SEQ ID NO: 16613 - RNA, 20 nt, synthetic construct
  source 1..20: mol_type = other RNA
gcctctctagcagctgggac

SEQ ID NO: 16614 - RNA, 20 nt, synthetic construct
  source 1..20: mol_type = other RNA
ctgttctagccaggatggtc

SEQ ID NO: 16615 - RNA, 20 nt, synthetic construct
  source 1..20: mol_type = other RNA
agccaggatggtcttggtct

SEQ ID NO: 16616 - RNA, 20 nt, synthetic construct
  source 1..20: mol_type = other RNA
cagccaggcacggtggctca

SEQ ID NO: 16617 - RNA, 20 nt, synthetic construct
  source 1..20: mol_type = other RNA
ataaaactaggaggaaggag

SEQ ID NO: 16618 - RNA, 20 nt, synthetic construct
  source 1..20: mol_type = other RNA
gcttccataaaactaggagg

SEQ ID NO: 16619 - RNA, 20 nt, synthetic construct
  source 1..20: mol_type = other RNA
tcctagttttatggaagcag

SEQ ID NO: 16620 - RNA, 20 nt, synthetic construct
  source 1..20: mol_type = other RNA
caactccatatatccttctg

SEQ ID NO: 16621 - RNA, 20 nt, synthetic construct
  source 1..20: mol_type = other RNA
acaacatcggctgagggtta

SEQ ID NO: 16622 - RNA, 20 nt, synthetic construct
  source 1..20: mol_type = other RNA
aaggtgaaaaggttgtatta

SEQ ID NO: 16623 - RNA, 20 nt, synthetic construct
  source 1..20: mol_type = other RNA
ccttggaattctatcattct

SEQ ID NO: 16624 - RNA, 20 nt, synthetic construct
  source 1..20: mol_type = other RNA
atcattctaagctctagtcc

SEQ ID NO: 16625 - RNA, 20 nt, synthetic construct
  source 1..20: mol_type = other RNA
gggactagagcttagaatga

SEQ ID NO: 16626 - RNA, 20 nt, synthetic construct
  source 1..20: mol_type = other RNA
cttcagggactagagcttag

SEQ ID NO: 16627 - RNA, 20 nt, synthetic construct
  source 1..20: mol_type = other RNA
aagctctagtccctgaagtg

SEQ ID NO: 16628 - RNA, 20 nt, synthetic construct
  source 1..20: mol_type = other RNA
ctgtgacccaagatgcaaaa

SEQ ID NO: 16629 - RNA, 20 nt, synthetic construct
  source 1..20: mol_type = other RNA
atctacttctttttcaatgg

SEQ ID NO: 16630 - RNA, 20 nt, synthetic construct
  source 1..20: mol_type = other RNA
ttttcaatgggtacaaacac

SEQ ID NO: 16631 - RNA, 20 nt, synthetic construct
  source 1..20: mol_type = other RNA
atgggtacaaacacacttgg

SEQ ID NO: 16632 - RNA, 20 nt, synthetic construct
  source 1..20: mol_type = other RNA
gaccactggtgctcaggacc

SEQ ID NO: 16633 - RNA, 20 nt, synthetic construct
  source 1..20: mol_type = other RNA
cctctgggcagaccgtatct

SEQ ID NO: 16634 - RNA, 20 nt, synthetic construct
  source 1..20: mol_type = other RNA
tctcctctgggcagaccgta

SEQ ID NO: 16635 - RNA, 20 nt, synthetic construct
  source 1..20: mol_type = other RNA
tgcctttgttcttctcctct

SEQ ID NO: 16636 - RNA, 20 nt, synthetic construct
  source 1..20: mol_type = other RNA
gcatcgcccctttgctgact

SEQ ID NO: 16637 - RNA, 20 nt, synthetic construct
  source 1..20: mol_type = other RNA
gtccatctacccgccccttt

SEQ ID NO: 16638 - RNA, 20 nt, synthetic construct
  source 1..20: mol_type = other RNA
atggccagtctttcggccat

SEQ ID NO: 16639 - RNA, 20 nt, synthetic construct
  source 1..20: mol_type = other RNA
gccataagtgactaccaaag

SEQ ID NO: 16640 - RNA, 20 nt, synthetic construct
  source 1..20: mol_type = other RNA
acatgtggaaaccgttttgc

SEQ ID NO: 16641 - RNA, 20 nt, synthetic construct
  source 1..20: mol_type = other RNA
acatgttgaacaacagatgc

SEQ ID NO: 16642 - RNA, 20 nt, synthetic construct
  source 1..20: mol_type = other RNA
ccctcttgcaatactcttgg

SEQ ID NO: 16643 - RNA, 20 nt, synthetic construct
  source 1..20: mol_type = other RNA
tcaaggagacccttcctgca

SEQ ID NO: 16644 - RNA, 20 nt, synthetic construct
  source 1..20: mol_type = other RNA
gtgcaggaagggtctccttg

SEQ ID NO: 16645 - RNA, 20 nt, synthetic construct
  source 1..20: mol_type = other RNA
aggagacccttcctgcactg

SEQ ID NO: 16646 - RNA, 20 nt, synthetic construct
  source 1..20: mol_type = other RNA
tgcactgaagagcaaggaga

SEQ ID NO: 16647 - RNA, 20 nt, synthetic construct
  source 1..20: mol_type = other RNA
gcaacatggctacagtcagc

SEQ ID NO: 16648 - RNA, 20 nt, synthetic construct
  source 1..20: mol_type = other RNA
tactcttagcatggctagaa

SEQ ID NO: 16649 - RNA, 20 nt, synthetic construct
  source 1..20: mol_type = other RNA
agccatgctaagagtaagaa

SEQ ID NO: 16650 - RNA, 20 nt, synthetic construct
  source 1..20: mol_type = other RNA
atgcctggagctcctatcct

SEQ ID NO: 16651 - RNA, 20 nt, synthetic construct
  source 1..20: mol_type = other RNA
atgcaagtgctgctttatgt

SEQ ID NO: 16652 - RNA, 20 nt, synthetic construct
  source 1..20: mol_type = other RNA
tgtggaaaatcttctatgca

SEQ ID NO: 16653 - RNA, 20 nt, synthetic construct
  source 1..20: mol_type = other RNA
acaagaaaatatggcaaaaa

SEQ ID NO: 16654 - RNA, 20 nt, synthetic construct
  source 1..20: mol_type = other RNA
tcaatatatggtgttttttt

SEQ ID NO: 16655 - RNA, 20 nt, synthetic construct
  source 1..20: mol_type = other RNA
cttgtagttgttgttcctca

SEQ ID NO: 16656 - RNA, 20 nt, synthetic construct
  source 1..20: mol_type = other RNA
agagcactatgtgagctctg

SEQ ID NO: 16657 - RNA, 20 nt, synthetic construct
  source 1..20: mol_type = other RNA
ctctagctggtcaaaactcc

SEQ ID NO: 16658 - RNA, 20 nt, synthetic construct
  source 1..20: mol_type = other RNA
atgaggtctcttctctctag

SEQ ID NO: 16659 - RNA, 20 nt, synthetic construct
  source 1..20: mol_type = other RNA
gaggtctctactgaatgccc

SEQ ID NO: 16660 - RNA, 20 nt, synthetic construct
  source 1..20: mol_type = other RNA
gtagagacctcagaaaagtc

SEQ ID NO: 16661 - RNA, 20 nt, synthetic construct
  source 1..20: mol_type = other RNA
aggaatatacaaagtctact

SEQ ID NO: 16662 - RNA, 20 nt, synthetic construct
  source 1..20: mol_type = other RNA
ggagctgcctttattctagg

SEQ ID NO: 16663 - RNA, 20 nt, synthetic construct
  source 1..20: mol_type = other RNA
tagaataaaggcagctccag

SEQ ID NO: 16664 - RNA, 20 nt, synthetic construct
  source 1..20: mol_type = other RNA
gctttgctaggttttttctg

SEQ ID NO: 16665 - RNA, 20 nt, synthetic construct
  source 1..20: mol_type = other RNA
agaaggcagttaattgacta

SEQ ID NO: 16666 - RNA, 20 nt, synthetic construct
  source 1..20: mol_type = other RNA
tctagaaggcagttaattga

SEQ ID NO: 16667 - RNA, 20 nt, synthetic construct
  source 1..20: mol_type = other RNA
agaagaaaactcaacactct

SEQ ID NO: 16668 - RNA, 20 nt, synthetic construct
  source 1..20: mol_type = other RNA
cctgtaaagagtgttgagtt

SEQ ID NO: 16669 - RNA, 20 nt, synthetic construct
  source 1..20: mol_type = other RNA
cactaaatgcttttttatgt

SEQ ID NO: 16670 - RNA, 20 nt, synthetic construct
  source 1..20: mol_type = other RNA
tggttatggttcacactaaa

SEQ ID NO: 16671 - RNA, 20 nt, synthetic construct
  source 1..20: mol_type = other RNA
atttttattgactgattatt

SEQ ID NO: 16672 - RNA, 20 nt, synthetic construct
  source 1..20: mol_type = other RNA
tggttctatttttattgact

SEQ ID NO: 16673 - RNA, 20 nt, synthetic construct
  source 1..20: mol_type = other RNA
atcattcctggttctatttt

SEQ ID NO: 16674 - RNA, 20 nt, synthetic construct
  source 1..20: mol_type = other RNA
catgccatttaaatcatttc

SEQ ID NO: 16675 - RNA, 20 nt, synthetic construct
  source 1..20: mol_type = other RNA
taaatccagcaatgcagtta

SEQ ID NO: 16676 - RNA, 20 nt, synthetic construct
  source 1..20: mol_type = other RNA
atgtttatgttttcttaaat

SEQ ID NO: 16677 - RNA, 20 nt, synthetic construct
  source 1..20: mol_type = other RNA
cttgatatgatatctgttac

SEQ ID NO: 16678 - RNA, 20 nt, synthetic construct
  source 1..20: mol_type = other RNA
tttaagatataccttttaat

SEQ ID NO: 16679 - RNA, 20 nt, synthetic construct
  source 1..20: mol_type = other RNA
ctggatggtctcccaatcag

SEQ ID NO: 16680 - RNA, 20 nt, synthetic construct
  source 1..20: mol_type = other RNA
ctggaaacaactaacctgat

SEQ ID NO: 16681 - RNA, 20 nt, synthetic construct
  source 1..20: mol_type = other RNA
gttaattttttccctggaaa

SEQ ID NO: 16682 - RNA, 20 nt, synthetic construct
  source 1..20: mol_type = other RNA
agggaaaaaattaactgaaa

SEQ ID NO: 16683 - RNA, 20 nt, synthetic construct
  source 1..20: mol_type = other RNA
attgaattatttttcagtta

SEQ ID NO: 16684 - RNA, 20 nt, synthetic construct
  source 1..20: mol_type = other RNA
gtagattctattgaattatt

SEQ ID NO: 16685 - RNA, 20 nt, synthetic construct
  source 1..20: mol_type = other RNA
atagaatctacagaaatagc

SEQ ID NO: 16686 - RNA, 20 nt, synthetic construct
  source 1..20: mol_type = other RNA
cacctgtgtgggtgtgggtg

SEQ ID NO: 16687 - RNA, 20 nt, synthetic construct
  source 1..20: mol_type = other RNA
atgctcgtgtggctctagga

SEQ ID NO: 16688 - RNA, 20 nt, synthetic construct
  source 1..20: mol_type = other RNA
ctatgtttcaatgctcgtgt

SEQ ID NO: 16689 - RNA, 20 nt, synthetic construct
  source 1..20: mol_type = other RNA
tcaatgaacaatttttactt

SEQ ID NO: 16690 - RNA, 20 nt, synthetic construct
  source 1..20: mol_type = other RNA
ttgaggaatatgtagcaatg

SEQ ID NO: 16691 - RNA, 20 nt, synthetic construct
  source 1..20: mol_type = other RNA
atcatacatcacaaaagctc

SEQ ID NO: 16692 - RNA, 20 nt, synthetic construct
  source 1..20: mol_type = other RNA
gttgtgtcagtttttcaatc

SEQ ID NO: 16693 - RNA, 20 nt, synthetic construct
  source 1..20: mol_type = other RNA
ctcttcagttgtgtcagttt

SEQ ID NO: 16694 - RNA, 20 nt, synthetic construct
  source 1..20: mol_type = other RNA
ttgattctctcactatggtt

SEQ ID NO: 16695 - RNA, 20 nt, synthetic construct
  source 1..20: mol_type = other RNA
ctcactatggttataaatct

SEQ ID NO: 16696 - RNA, 20 nt, synthetic construct
  source 1..20: mol_type = other RNA
agcctgttgtgtttgggaaa

SEQ ID NO: 16697 - RNA, 20 nt, synthetic construct
  source 1..20: mol_type = other RNA
caaacacaacaggctagaac

SEQ ID NO: 16698 - RNA, 20 nt, synthetic construct
  source 1..20: mol_type = other RNA
gcatatttgttctagcctgt

SEQ ID NO: 16699 - RNA, 20 nt, synthetic construct
  source 1..20: mol_type = other RNA
caataaaaacgtcgacctat

SEQ ID NO: 16700 - RNA, 20 nt, synthetic construct
  source 1..20: mol_type = other RNA
gtataatgttaaataggtcg

SEQ ID NO: 16701 - RNA, 20 nt, synthetic construct
  source 1..20: mol_type = other RNA
ctgaggtgtactctacacat

SEQ ID NO: 16702 - RNA, 20 nt, synthetic construct
  source 1..20: mol_type = other RNA
agcaagtctccatagattta

SEQ ID NO: 16703 - RNA, 20 nt, synthetic construct
  source 1..20: mol_type = other RNA
tttaaatctatggagacttg

SEQ ID NO: 16704 - RNA, 20 nt, synthetic construct
  source 1..20: mol_type = other RNA
gggagaataaagtgacacac

SEQ ID NO: 16705 - RNA, 20 nt, synthetic construct
  source 1..20: mol_type = other RNA
tatctcactttattctggga

SEQ ID NO: 16706 - RNA, 20 nt, synthetic construct
  source 1..20: mol_type = other RNA
cccagaataaagtgagatat

SEQ ID NO: 16707 - RNA, 20 nt, synthetic construct
  source 1..20: mol_type = other RNA
cattattcatatctcacttt

SEQ ID NO: 16708 - RNA, 20 nt, synthetic construct
  source 1..20: mol_type = other RNA
caaatatttgggagtcatac

SEQ ID NO: 16709 - RNA, 20 nt, synthetic construct
  source 1..20: mol_type = other RNA
ttgtcccaaagagtattttg

SEQ ID NO: 16710 - RNA, 20 nt, synthetic construct
  source 1..20: mol_type = other RNA
aaatactctttgggacaaag

SEQ ID NO: 16711 - RNA, 20 nt, synthetic construct
  source 1..20: mol_type = other RNA
ttagtgatgttttctttgtc

SEQ ID NO: 16712 - RNA, 20 nt, synthetic construct
  source 1..20: mol_type = other RNA
aaattccttagtgatgtttt

SEQ ID NO: 16713 - RNA, 20 nt, synthetic construct
  source 1..20: mol_type = other RNA
aaacttttctaaattcctta

SEQ ID NO: 16714 - RNA, 20 nt, synthetic construct
  source 1..20: mol_type = other RNA
tactcagttcaaaacttttc

SEQ ID NO: 16715 - RNA, 20 nt, synthetic construct
  source 1..20: mol_type = other RNA
ctgcatctcctaagtttgga

SEQ ID NO: 16716 - RNA, 20 nt, synthetic construct
  source 1..20: mol_type = other RNA
ctaagagcatctaaaattat

SEQ ID NO: 16717 - RNA, 20 nt, synthetic construct
  source 1..20: mol_type = other RNA
gtttttccctaagagcatct

SEQ ID NO: 16718 - RNA, 20 nt, synthetic construct
  source 1..20: mol_type = other RNA
aactgcaattctcaaagtgt

SEQ ID NO: 16719 - RNA, 20 nt, synthetic construct
  source 1..20: mol_type = other RNA
ctagactacactttgagaat

SEQ ID NO: 16720 - RNA, 20 nt, synthetic construct
  source 1..20: mol_type = other RNA
caaagtgtagtctagagaaa

SEQ ID NO: 16721 - RNA, 20 nt, synthetic construct
  source 1..20: mol_type = other RNA
gagacagtccatgaggttaa

SEQ ID NO: 16722 - RNA, 20 nt, synthetic construct
  source 1..20: mol_type = other RNA
cgtagcaaagtcctttaacc

SEQ ID NO: 16723 - RNA, 20 nt, synthetic construct
  source 1..20: mol_type = other RNA
cttgttggaaaatgaaagta

SEQ ID NO: 16724 - RNA, 20 nt, synthetic construct
  source 1..20: mol_type = other RNA
ttttccaacaagagaagagg

SEQ ID NO: 16725 - RNA, 20 nt, synthetic construct
  source 1..20: mol_type = other RNA
aacaagagaagaggggagtt

SEQ ID NO: 16726 - RNA, 20 nt, synthetic construct
  source 1..20: mol_type = other RNA
agcagttacataatatgtaa

SEQ ID NO: 16727 - RNA, 20 nt, synthetic construct
  source 1..20: mol_type = other RNA
tagccatcagagacatgatg

SEQ ID NO: 16728 - RNA, 20 nt, synthetic construct
  source 1..20: mol_type = other RNA
cagtgttggtttcttatact

SEQ ID NO: 16729 - RNA, 20 nt, synthetic construct
  source 1..20: mol_type = other RNA
tatactataaatattcatct

SEQ ID NO: 16730 - RNA, 20 nt, synthetic construct
  source 1..20: mol_type = other RNA
aaacacaagatgaatattta

SEQ ID NO: 16731 - RNA, 20 nt, synthetic construct
  source 1..20: mol_type = other RNA
ttttcaaaacacaagatgaa

SEQ ID NO: 16732 - RNA, 20 nt, synthetic construct
  source 1..20: mol_type = other RNA
tcttgtgttttgaaaaagaa

SEQ ID NO: 16733 - RNA, 20 nt, synthetic construct
  source 1..20: mol_type = other RNA
aaagagcttttctttttcaa

SEQ ID NO: 16734 - RNA, 20 nt, synthetic construct
  source 1..20: mol_type = other RNA
taggggattccaaagagctt

SEQ ID NO: 16735 - RNA, 20 nt, synthetic construct
  source 1..20: mol_type = other RNA
tgtgtagatatttaagctgt

SEQ ID NO: 16736 - RNA, 20 nt, synthetic construct
  source 1..20: mol_type = other RNA
ttggctcttatttgcttttt

SEQ ID NO: 16737 - RNA, 20 nt, synthetic construct
  source 1..20: mol_type = other RNA
atctgctttccttggctctt

SEQ ID NO: 16738 - RNA, 20 nt, synthetic construct
  source 1..20: mol_type = other RNA
ttccatctgctttccttggc

SEQ ID NO: 16739 - RNA, 20 nt, synthetic construct
  source 1..20: mol_type = other RNA
ctgaatgtcactggtttgga

SEQ ID NO: 16740 - RNA, 20 nt, synthetic construct
  source 1..20: mol_type = other RNA
tgttcactgaatgtcactgg

SEQ ID NO: 16741 - RNA, 20 nt, synthetic construct
  source 1..20: mol_type = other RNA
gtgaacaagaaaagagacca

SEQ ID NO: 16742 - RNA, 20 nt, synthetic construct
  source 1..20: mol_type = other RNA
agagtttactcccttgttgg

SEQ ID NO: 16743 - RNA, 20 nt, synthetic construct
  source 1..20: mol_type = other RNA
gtttcaagagtttactccct

SEQ ID NO: 16744 - RNA, 20 nt, synthetic construct
  source 1..20: mol_type = other RNA
aagaatcaactttctgtttc

SEQ ID NO: 16745 - RNA, 20 nt, synthetic construct
  source 1..20: mol_type = other RNA
atcatatggatcttttcaaa

SEQ ID NO: 16746 - RNA, 20 nt, synthetic construct
  source 1..20: mol_type = other RNA
ttgaaaagatccatatgatt

SEQ ID NO: 16747 - RNA, 20 nt, synthetic construct
  source 1..20: mol_type = other RNA
gaactggaagatgctatagt

SEQ ID NO: 16748 - RNA, 20 nt, synthetic construct
  source 1..20: mol_type = other RNA
gctttcagaactggaagatg

SEQ ID NO: 16749 - RNA, 20 nt, synthetic construct
  source 1..20: mol_type = other RNA
tttcagctttcagaactgga

SEQ ID NO: 16750 - RNA, 20 nt, synthetic construct
  source 1..20: mol_type = other RNA
agttctgaaagctgaaaaga

SEQ ID NO: 16751 - RNA, 20 nt, synthetic construct
  source 1..20: mol_type = other RNA
gaaagctgaaaagaagattt

SEQ ID NO: 16752 - RNA, 20 nt, synthetic construct
  source 1..20: mol_type = other RNA
caaaatcttcttttcagctt

SEQ ID NO: 16753 - RNA, 20 nt, synthetic construct
  source 1..20: mol_type = other RNA
catacaattgttctcaaaat

SEQ ID NO: 16754 - RNA, 20 nt, synthetic construct
  source 1..20: mol_type = other RNA
tgaatttattcacatacaat

SEQ ID NO: 16755 - RNA, 20 nt, synthetic construct
  source 1..20: mol_type = other RNA
ggaatgttaatcatgtgggc

SEQ ID NO: 16756 - RNA, 20 nt, synthetic construct
  source 1..20: mol_type = other RNA
tcaggaattggcccacatga

SEQ ID NO: 16757 - RNA, 20 nt, synthetic construct
  source 1..20: mol_type = other RNA
tgaggaagacaacaaatcag

SEQ ID NO: 16758 - RNA, 20 nt, synthetic construct
  source 1..20: mol_type = other RNA
gcatctggtttgctgatttg

SEQ ID NO: 16759 - RNA, 20 nt, synthetic construct
  source 1..20: mol_type = other RNA
ctgtcagcctctctgtatgt

SEQ ID NO: 16760 - RNA, 20 nt, synthetic construct
  source 1..20: mol_type = other RNA
aaatcaatctcagttaatct

SEQ ID NO: 16761 - RNA, 20 nt, synthetic construct
  source 1..20: mol_type = other RNA
tccagattaactgagattga

SEQ ID NO: 16762 - RNA, 20 nt, synthetic construct
  source 1..20: mol_type = other RNA
gtgaaatatgttcctccaga

SEQ ID NO: 16763 - RNA, 20 nt, synthetic construct
  source 1..20: mol_type = other RNA
accttctgtgaaatatgttc

SEQ ID NO: 16764 - RNA, 20 nt, synthetic construct
  source 1..20: mol_type = other RNA
cagaaggtggaaggagggta

SEQ ID NO: 16765 - RNA, 20 nt, synthetic construct
  source 1..20: mol_type = other RNA
gatcctcttgtacattgtac

SEQ ID NO: 16766 - RNA, 20 nt, synthetic construct
  source 1..20: mol_type = other RNA
attgtacttgtacaattata

SEQ ID NO: 16767 - RNA, 20 nt, synthetic construct
  source 1..20: mol_type = other RNA
tatggagcacagatgacttt

SEQ ID NO: 16768 - RNA, 20 nt, synthetic construct
  source 1..20: mol_type = other RNA
tattgtaacacatccaaagt

SEQ ID NO: 16769 - RNA, 20 nt, synthetic construct
  source 1..20: mol_type = other RNA
aaacaactgcgaacatctca

SEQ ID NO: 16770 - RNA, 20 nt, synthetic construct
  source 1..20: mol_type = other RNA
cagttgtttagaagttgagg

SEQ ID NO: 16771 - RNA, 20 nt, synthetic construct
  source 1..20: mol_type = other RNA
ctaaaggtcccataatatgc

SEQ ID NO: 16772 - RNA, 20 nt, synthetic construct
  source 1..20: mol_type = other RNA
aagtctctttttacactttg

SEQ ID NO: 16773 - RNA, 20 nt, synthetic construct
  source 1..20: mol_type = other RNA
agggcacttagcgccctcta

SEQ ID NO: 16774 - RNA, 20 nt, synthetic construct
  source 1..20: mol_type = other RNA
cccatctctggtgacctgtg

SEQ ID NO: 16775 - RNA, 20 nt, synthetic construct
  source 1..20: mol_type = other RNA
aaacaacacaggtcaccaga

SEQ ID NO: 16776 - RNA, 20 nt, synthetic construct
  source 1..20: mol_type = other RNA
tggtcaggccactgcaaatt

SEQ ID NO: 16777 - RNA, 20 nt, synthetic construct
  source 1..20: mol_type = other RNA
tgcagtagttcctggtcagg

SEQ ID NO: 16778 - RNA, 20 nt, synthetic construct
  source 1..20: mol_type = other RNA
cccttggtgttacaccatgg

SEQ ID NO: 16779 - RNA, 20 nt, synthetic construct
  source 1..20: mol_type = other RNA
gaagaagcctctgtgcttgg

SEQ ID NO: 16780 - RNA, 20 nt, synthetic construct
  source 1..20: mol_type = other RNA
tctgaagaaggtaggaagtc

SEQ ID NO: 16781 - RNA, 20 nt, synthetic construct
  source 1..20: mol_type = other RNA
gaagaaggtaggaagtctat

SEQ ID NO: 16782 - RNA, 20 nt, synthetic construct
  source 1..20: mol_type = other RNA
tcccaacgtcctagggtgtg

SEQ ID NO: 16783 - RNA, 20 nt, synthetic construct
  source 1..20: mol_type = other RNA
atatcactaagattttgcaa

SEQ ID NO: 16784 - RNA, 20 nt, synthetic construct
  source 1..20: mol_type = other RNA
acttggaattgtgtgagcat

SEQ ID NO: 16785 - RNA, 20 nt, synthetic construct
  source 1..20: mol_type = other RNA
atgctcacacaattccaagt

SEQ ID NO: 16786 - RNA, 20 nt, synthetic construct
  source 1..20: mol_type = other RNA
aagtagaatgtggactcagg

SEQ ID NO: 16787 - RNA, 20 nt, synthetic construct
  source 1..20: mol_type = other RNA
cagtggctgaccctgagtcc

SEQ ID NO: 16788 - RNA, 20 nt, synthetic construct
  source 1..20: mol_type = other RNA
ttcccagtggctgaccctga

SEQ ID NO: 16789 - RNA, 20 nt, synthetic construct
  source 1..20: mol_type = other RNA
cccagagaaggcgctgagtg

SEQ ID NO: 16790 - RNA, 20 nt, synthetic construct
  source 1..20: mol_type = other RNA
ctgggagaaccagagctgtg

SEQ ID NO: 16791 - RNA, 20 nt, synthetic construct
  source 1..20: mol_type = other RNA
cagggtaccaaacatcacag

SEQ ID NO: 16792 - RNA, 20 nt, synthetic construct
  source 1..20: mol_type = other RNA
tatagataccaccctttcac

SEQ ID NO: 16793 - RNA, 20 nt, synthetic construct
  source 1..20: mol_type = other RNA
aaggatcattttagtgtctt

SEQ ID NO: 16794 - RNA, 20 nt, synthetic construct
  source 1..20: mol_type = other RNA
ggctaagacactaaaatgat

SEQ ID NO: 16795 - RNA, 20 nt, synthetic construct
  source 1..20: mol_type = other RNA
tctggctaagacactaaaat

SEQ ID NO: 16796 - RNA, 20 nt, synthetic construct
  source 1..20: mol_type = other RNA
caaatttggcaaaatgttag

SEQ ID NO: 16797 - RNA, 20 nt, synthetic construct
  source 1..20: mol_type = other RNA
aacattttgccaaatttgtg

SEQ ID NO: 16798 - RNA, 20 nt, synthetic construct
  source 1..20: mol_type = other RNA
tggtatttcttcaagtagtc

SEQ ID NO: 16799 - RNA, 20 nt, synthetic construct
  source 1..20: mol_type = other RNA
tcaagtagtcagtgttcatt

SEQ ID NO: 16800 - RNA, 20 nt, synthetic construct
  source 1..20: mol_type = other RNA
agtagtcagtgttcattgca

SEQ ID NO: 16801 - RNA, 20 nt, synthetic construct
  source 1..20: mol_type = other RNA
ttgcatctttggctttgcgg

SEQ ID NO: 16802 - RNA, 20 nt, synthetic construct
  source 1..20: mol_type = other RNA
tccgaaaccgcaaagccaaa

SEQ ID NO: 16803 - RNA, 20 nt, synthetic construct
  source 1..20: mol_type = other RNA
gaggaatgcggtttttgagt

SEQ ID NO: 16804 - RNA, 20 nt, synthetic construct
  source 1..20: mol_type = other RNA
caaggatgacagactcaaaa

SEQ ID NO: 16805 - RNA, 20 nt, synthetic construct
  source 1..20: mol_type = other RNA
tagttccatatacttctggg

SEQ ID NO: 16806 - RNA, 20 nt, synthetic construct
  source 1..20: mol_type = other RNA
atatacttctgggtccaggt

SEQ ID NO: 16807 - RNA, 20 nt, synthetic construct
  source 1..20: mol_type = other RNA
gggtccaggtagcagtacat

SEQ ID NO: 16808 - RNA, 20 nt, synthetic construct
  source 1..20: mol_type = other RNA
ggcctatctccatcttaagc

SEQ ID NO: 16809 - RNA, 20 nt, synthetic construct
  source 1..20: mol_type = other RNA
atgagaaggaggggcaagaa

SEQ ID NO: 16810 - RNA, 20 nt, synthetic construct
  source 1..20: mol_type = other RNA
tgcccctccttctcatggaa

SEQ ID NO: 16811 - RNA, 20 nt, synthetic construct
  source 1..20: mol_type = other RNA
catggaacatatatctgtgt

SEQ ID NO: 16812 - RNA, 20 nt, synthetic construct
  source 1..20: mol_type = other RNA
cagagaccaacacagatata

SEQ ID NO: 16813 - RNA, 20 nt, synthetic construct
  source 1..20: mol_type = other RNA
tctcagagaccaacacagat

SEQ ID NO: 16814 - RNA, 20 nt, synthetic construct
  source 1..20: mol_type = other RNA
gcattgcaacaaagtagata

SEQ ID NO: 16815 - RNA, 20 nt, synthetic construct
  source 1..20: mol_type = other RNA
cttggagggatggctggtat

SEQ ID NO: 16816 - RNA, 20 nt, synthetic construct
  source 1..20: mol_type = other RNA
tgaagatggggcaggaagcg

SEQ ID NO: 16817 - RNA, 20 nt, synthetic construct
  source 1..20: mol_type = other RNA
gcttcttgaagatggggcag

SEQ ID NO: 16818 - RNA, 20 nt, synthetic construct
  source 1..20: mol_type = other RNA
tgccccatcttcaagaagct

SEQ ID NO: 16819 - RNA, 20 nt, synthetic construct
  source 1..20: mol_type = other RNA
agaagctgaaggctttggct

SEQ ID NO: 16820 - RNA, 20 nt, synthetic construct
  source 1..20: mol_type = other RNA
ctagactgctgatcctccaa

SEQ ID NO: 16821 - RNA, 20 nt, synthetic construct
  source 1..20: mol_type = other RNA
tgtctgtccccactgacagt

SEQ ID NO: 16822 - RNA, 20 nt, synthetic construct
  source 1..20: mol_type = other RNA
tgagaataaggcaggaaact

SEQ ID NO: 16823 - RNA, 20 nt, synthetic construct
  source 1..20: mol_type = other RNA
tgccttattctcaggaacac

SEQ ID NO: 16824 - RNA, 20 nt, synthetic construct
  source 1..20: mol_type = other RNA
gggtgttcctgagaataagg

SEQ ID NO: 16825 - RNA, 20 nt, synthetic construct
  source 1..20: mol_type = other RNA
caggaacacccagaagatgt

SEQ ID NO: 16826 - RNA, 20 nt, synthetic construct
  source 1..20: mol_type = other RNA
tttaaaacacaggcaccaaa

SEQ ID NO: 16827 - RNA, 20 nt, synthetic construct
  source 1..20: mol_type = other RNA
tttggtgcctgtgttttaaa

SEQ ID NO: 16828 - RNA, 20 nt, synthetic construct
  source 1..20: mol_type = other RNA
tagaaagatttcctttaaaa

SEQ ID NO: 16829 - RNA, 20 nt, synthetic construct
  source 1..20: mol_type = other RNA
agaactttaacgagttctta

SEQ ID NO: 16830 - RNA, 20 nt, synthetic construct
  source 1..20: mol_type = other RNA
aagaactcgttaaagttcta

SEQ ID NO: 16831 - RNA, 20 nt, synthetic construct
  source 1..20: mol_type = other RNA
tagcattctagaactttaac

SEQ ID NO: 16832 - RNA, 20 nt, synthetic construct
  source 1..20: mol_type = other RNA
agaatgctatgaatctttgg

SEQ ID NO: 16833 - RNA, 20 nt, synthetic construct
  source 1..20: mol_type = other RNA
gtactagcaggcagatggac

SEQ ID NO: 16834 - RNA, 20 nt, synthetic construct
  source 1..20: mol_type = other RNA
cagagacaatgatcctgttt

SEQ ID NO: 16835 - RNA, 20 nt, synthetic construct
  source 1..20: mol_type = other RNA
gtcacagatttcttctgatg

SEQ ID NO: 16836 - RNA, 20 nt, synthetic construct
  source 1..20: mol_type = other RNA
agaacacagaagcatcagaa

SEQ ID NO: 16837 - RNA, 20 nt, synthetic construct
  source 1..20: mol_type = other RNA
tctgatgcttctgtgttcta

SEQ ID NO: 16838 - RNA, 20 nt, synthetic construct
  source 1..20: mol_type = other RNA
gatgcttctgtgttctagaa

SEQ ID NO: 16839 - RNA, 20 nt, synthetic construct
  source 1..20: mol_type = other RNA
gtgttctagaaattactcag

SEQ ID NO: 16840 - RNA, 20 nt, synthetic construct
  source 1..20: mol_type = other RNA
agaaattactcagcttgatt

SEQ ID NO: 16841 - RNA, 20 nt, synthetic construct
  source 1..20: mol_type = other RNA
aagaggagaaatcaagctga

SEQ ID NO: 16842 - RNA, 20 nt, synthetic construct
  source 1..20: mol_type = other RNA
cctctttgaatttcagcacc

SEQ ID NO: 16843 - RNA, 20 nt, synthetic construct
  source 1..20: mol_type = other RNA
gcaccaacggagcaaagccc

SEQ ID NO: 16844 - RNA, 20 nt, synthetic construct
  source 1..20: mol_type = other RNA
tgtgacagtggtagagaatg

SEQ ID NO: 16845 - RNA, 20 nt, synthetic construct
  source 1..20: mol_type = other RNA
ctaccactgtcacaggaagg

SEQ ID NO: 16846 - RNA, 20 nt, synthetic construct
  source 1..20: mol_type = other RNA
tcaaagacagacagcagccc

SEQ ID NO: 16847 - RNA, 20 nt, synthetic construct
  source 1..20: mol_type = other RNA
aagacagacagcagccccct

SEQ ID NO: 16848 - RNA, 20 nt, synthetic construct
  source 1..20: mol_type = other RNA
aagagaaatgtaagggggct

SEQ ID NO: 16849 - RNA, 20 nt, synthetic construct
  source 1..20: mol_type = other RNA
cttggaagggccatgcttcc

SEQ ID NO: 16850 - RNA, 20 nt, synthetic construct
  source 1..20: mol_type = other RNA
aactaacttcttatgacaaa

SEQ ID NO: 16851 - RNA, 20 nt, synthetic construct
  source 1..20: mol_type = other RNA
tatgacaaatttatctcaga

SEQ ID NO: 16852 - RNA, 20 nt, synthetic construct
  source 1..20: mol_type = other RNA
agatctgagataaatttgtc

SEQ ID NO: 16853 - RNA, 20 nt, synthetic construct
  source 1..20: mol_type = other RNA
acccaacattccagatctga

SEQ ID NO: 16854 - RNA, 20 nt, synthetic construct
  source 1..20: mol_type = other RNA
gacactgtgcctgaagaaag

SEQ ID NO: 16855 - RNA, 20 nt, synthetic construct
  source 1..20: mol_type = other RNA
ttcttcaggcacagtgtctg

SEQ ID NO: 16856 - RNA, 20 nt, synthetic construct
  source 1..20: mol_type = other RNA
tcaggcacagtgtctgaaag

SEQ ID NO: 16857 - RNA, 20 nt, synthetic construct
  source 1..20: mol_type = other RNA
ctcctttcagacactgtgcc

SEQ ID NO: 16858 - RNA, 20 nt, synthetic construct
  source 1..20: mol_type = other RNA
ggcacagtgtctgaaaggag

SEQ ID NO: 16859 - RNA, 20 nt, synthetic construct
  source 1..20: mol_type = other RNA
gtcaactatgagaaaagaga

SEQ ID NO: 16860 - RNA, 20 nt, synthetic construct
  source 1..20: mol_type = other RNA
catagttgacagaagcagga

SEQ ID NO: 16861 - RNA, 20 nt, synthetic construct
  source 1..20: mol_type = other RNA
aatatcctcctgcttctgtc

SEQ ID NO: 16862 - RNA, 20 nt, synthetic construct
  source 1..20: mol_type = other RNA
tgagaactcaccaccttcaa

SEQ ID NO: 16863 - RNA, 20 nt, synthetic construct
  source 1..20: mol_type = other RNA
attcatgagaactcaccacc

SEQ ID NO: 16864 - RNA, 20 nt, synthetic construct
  source 1..20: mol_type = other RNA
catgaatagaaagctcagga

SEQ ID NO: 16865 - RNA, 20 nt, synthetic construct
  source 1..20: mol_type = other RNA
aagcacgtggccatgtgtcc

SEQ ID NO: 16866 - RNA, 20 nt, synthetic construct
  source 1..20: mol_type = other RNA
acaatgcccactaaagacca

SEQ ID NO: 16867 - RNA, 20 nt, synthetic construct
  source 1..20: mol_type = other RNA
accagggatttctgtcattc

SEQ ID NO: 16868 - RNA, 20 nt, synthetic construct
  source 1..20: mol_type = other RNA
gtcattctaatctccaagtc

SEQ ID NO: 16869 - RNA, 20 nt, synthetic construct
  source 1..20: mol_type = other RNA
ggacttggagattagaatga

SEQ ID NO: 16870 - RNA, 20 nt, synthetic construct
  source 1..20: mol_type = other RNA
cttcaggacttggagattag

SEQ ID NO: 16871 - RNA, 20 nt, synthetic construct
  source 1..20: mol_type = other RNA
aatctccaagtcctgaagtg

SEQ ID NO: 16872 - RNA, 20 nt, synthetic construct
  source 1..20: mol_type = other RNA
tcttgggcaacaaataaagg

SEQ ID NO: 16873 - RNA, 20 nt, synthetic construct
  source 1..20: mol_type = other RNA
aatcactttctcctctaacc

SEQ ID NO: 16874 - RNA, 20 nt, synthetic construct
  source 1..20: mol_type = other RNA
cctctaacctgtacctgggt

SEQ ID NO: 16875 - RNA, 20 nt, synthetic construct
  source 1..20: mol_type = other RNA
cagaacccaggtacaggtta

SEQ ID NO: 16876 - RNA, 20 nt, synthetic construct
  source 1..20: mol_type = other RNA
gataccttgttctcagaacc

SEQ ID NO: 16877 - RNA, 20 nt, synthetic construct
  source 1..20: mol_type = other RNA
gagaacaaggtatctgaaga

SEQ ID NO: 16878 - RNA, 20 nt, synthetic construct
  source 1..20: mol_type = other RNA
tacttttgcccctcatgtgc

SEQ ID NO: 16879 - RNA, 20 nt, synthetic construct
  source 1..20: mol_type = other RNA
tgactctcagctgccttcct

SEQ ID NO: 16880 - RNA, 20 nt, synthetic construct
  source 1..20: mol_type = other RNA
gaatctttatacttcctgac

SEQ ID NO: 16881 - RNA, 20 nt, synthetic construct
  source 1..20: mol_type = other RNA
tgcatgtgtaactcttcaga

SEQ ID NO: 16882 - RNA, 20 nt, synthetic construct
  source 1..20: mol_type = other RNA
gaagagttacacatgcagga

SEQ ID NO: 16883 - RNA, 20 nt, synthetic construct
  source 1..20: mol_type = other RNA
gtccatcttcctgcatgtgt

SEQ ID NO: 16884 - RNA, 20 nt, synthetic construct
  source 1..20: mol_type = other RNA
gaccacgtcagcgtttctgc

SEQ ID NO: 16885 - RNA, 20 nt, synthetic construct
  source 1..20: mol_type = other RNA
tggcagaaacgctgacgtgg

SEQ ID NO: 16886 - RNA, 20 nt, synthetic construct
  source 1..20: mol_type = other RNA
gccatgaaggactatcaaat

SEQ ID NO: 16887 - RNA, 20 nt, synthetic construct
  source 1..20: mol_type = other RNA
tatgtatttgatagtccttc

SEQ ID NO: 16888 - RNA, 20 nt, synthetic construct
  source 1..20: mol_type = other RNA
taggttggacaacagacatg

SEQ ID NO: 16889 - RNA, 20 nt, synthetic construct
  source 1..20: mol_type = other RNA
caggcctgtcatgtctgttg

SEQ ID NO: 16890 - RNA, 20 nt, synthetic construct
  source 1..20: mol_type = other RNA
gaattttctcaggcctgtca

SEQ ID NO: 16891 - RNA, 20 nt, synthetic construct
  source 1..20: mol_type = other RNA
ctttctgaattttctcaggc

SEQ ID NO: 16892 - RNA, 20 nt, synthetic construct
  source 1..20: mol_type = other RNA
gaaagggaatcaaaggagat

SEQ ID NO: 16893 - RNA, 20 nt, synthetic construct
  source 1..20: mol_type = other RNA
agggtctcaaggaaggatgc

SEQ ID NO: 16894 - RNA, 20 nt, synthetic construct
  source 1..20: mol_type = other RNA
ttgagacccttgaagggcaa

SEQ ID NO: 16895 - RNA, 20 nt, synthetic construct
  source 1..20: mol_type = other RNA
tagccagcctagaatacgtc

SEQ ID NO: 16896 - RNA, 20 nt, synthetic construct
  source 1..20: mol_type = other RNA
aggctggctaagaatgagag

SEQ ID NO: 16897 - RNA, 20 nt, synthetic construct
  source 1..20: mol_type = other RNA
tccacaaatcccctctcatt

SEQ ID NO: 16898 - RNA, 20 nt, synthetic construct
  source 1..20: mol_type = other RNA
tggagctcctttcctccaca

SEQ ID NO: 16899 - RNA, 20 nt, synthetic construct
  source 1..20: mol_type = other RNA
gtgtgtattcttggagctcc

SEQ ID NO: 16900 - RNA, 20 nt, synthetic construct
  source 1..20: mol_type = other RNA
caaggctttggctaaataca

SEQ ID NO: 16901 - RNA, 20 nt, synthetic construct
  source 1..20: mol_type = other RNA
ttgtgaaaactctccttgtg

SEQ ID NO: 16902 - RNA, 20 nt, synthetic construct
  source 1..20: mol_type = other RNA
ttctttgtgaaaactctcct

SEQ ID NO: 16903 - RNA, 20 nt, synthetic construct
  source 1..20: mol_type = other RNA
ttattgttctttctttgtga

SEQ ID NO: 16904 - RNA, 20 nt, synthetic construct
  source 1..20: mol_type = other RNA
caaagaaagaacaataaaga

SEQ ID NO: 16905 - RNA, 20 nt, synthetic construct
  source 1..20: mol_type = other RNA
ccagtagcttttctttattg

SEQ ID NO: 16906 - RNA, 20 nt, synthetic construct
  source 1..20: mol_type = other RNA
ttccccagtagcttttcttt

SEQ ID NO: 16907 - RNA, 20 nt, synthetic construct
  source 1..20: mol_type = other RNA
cttgcagttgttctttcccc

SEQ ID NO: 16908 - RNA, 20 nt, synthetic construct
  source 1..20: mol_type = other RNA
gaccactcagaggagagaca

SEQ ID NO: 16909 - RNA, 20 nt, synthetic construct
  source 1..20: mol_type = other RNA
gtgaggtgtctctcctctga

SEQ ID NO: 16910 - RNA, 20 nt, synthetic construct
  source 1..20: mol_type = other RNA
ttgacctctactgaatgccc

SEQ ID NO: 16911 - RNA, 20 nt, synthetic construct
  source 1..20: mol_type = other RNA
gtagaggtcaaagaaagcca

SEQ ID NO: 16912 - RNA, 20 nt, synthetic construct
  source 1..20: mol_type = other RNA
aggaatccgaagatcctact

SEQ ID NO: 16913 - RNA, 20 nt, synthetic construct
  source 1..20: mol_type = other RNA
gattcctagaaataaggtga

SEQ ID NO: 16914 - RNA, 20 nt, synthetic construct
  source 1..20: mol_type = other RNA
ggagtcaccttatttctagg

SEQ ID NO: 16915 - RNA, 20 nt, synthetic construct
  source 1..20: mol_type = other RNA
tagaaataaggtgactccag

SEQ ID NO: 16916 - RNA, 20 nt, synthetic construct
  source 1..20: mol_type = other RNA
tccaagccagtctaaaagga

SEQ ID NO: 16917 - RNA, 20 nt, synthetic construct
  source 1..20: mol_type = other RNA
aagccagtctaaaaggatcc

SEQ ID NO: 16918 - RNA, 20 nt, synthetic construct
  source 1..20: mol_type = other RNA
ggaaggcagttaatttactt

SEQ ID NO: 16919 - RNA, 20 nt, synthetic construct
  source 1..20: mol_type = other RNA
aagtaaattaactgccttcc

SEQ ID NO: 16920 - RNA, 20 nt, synthetic construct
  source 1..20: mol_type = other RNA
agaaaaaagtaaactcaacc

SEQ ID NO: 16921 - RNA, 20 nt, synthetic construct
  source 1..20: mol_type = other RNA
ttacctctaaggagggttga

SEQ ID NO: 16922 - RNA, 20 nt, synthetic construct
  source 1..20: mol_type = other RNA
ttccttacctctaaggaggg

SEQ ID NO: 16923 - RNA, 20 nt, synthetic construct
  source 1..20: mol_type = other RNA
cagttatatgacatccccag

SEQ ID NO: 16924 - RNA, 20 nt, synthetic construct
  source 1..20: mol_type = other RNA
tttgtgtctagtaaattttt

SEQ ID NO: 16925 - RNA, 20 nt, synthetic construct
  source 1..20: mol_type = other RNA
cccagttatggatcacagtg

SEQ ID NO: 16926 - RNA, 20 nt, synthetic construct
  source 1..20: mol_type = other RNA
ctgtgatccataactgggag

SEQ ID NO: 16927 - RNA, 20 nt, synthetic construct
  source 1..20: mol_type = other RNA
gggcctatttgtgttgagtg

SEQ ID NO: 16928 - RNA, 20 nt, synthetic construct
  source 1..20: mol_type = other RNA
attatttctgggcctatttg

SEQ ID NO: 16929 - RNA, 20 nt, synthetic construct
  source 1..20: mol_type = other RNA
tgccaatgccataatttcta

SEQ ID NO: 16930 - RNA, 20 nt, synthetic construct
  source 1..20: mol_type = other RNA
cagaggtgcattttaaatgt

SEQ ID NO: 16931 - RNA, 20 nt, synthetic construct
  source 1..20: mol_type = other RNA
tgaaacacagttctcagagg

SEQ ID NO: 16932 - RNA, 20 nt, synthetic construct
  source 1..20: mol_type = other RNA
ggaaaatgtcagcaaaagct

SEQ ID NO: 16933 - RNA, 20 nt, synthetic construct
  source 1..20: mol_type = other RNA
ctcatggtcagcttttgctg

SEQ ID NO: 16934 - RNA, 20 nt, synthetic construct
  source 1..20: mol_type = other RNA
tttctctcatggtcagcttt

SEQ ID NO: 16935 - RNA, 20 nt, synthetic construct
  source 1..20: mol_type = other RNA
gatattatgcattcatttct

SEQ ID NO: 16936 - RNA, 20 nt, synthetic construct
  source 1..20: mol_type = other RNA
tttctgatattatgcattca

SEQ ID NO: 16937 - RNA, 20 nt, synthetic construct
  source 1..20: mol_type = other RNA
tttcttttctgatattatgc

SEQ ID NO: 16938 - RNA, 20 nt, synthetic construct
  source 1..20: mol_type = other RNA
attcttttcttttctgatat

SEQ ID NO: 16939 - RNA, 20 nt, synthetic construct
  source 1..20: mol_type = other RNA
atttggctcttcaattcttt

SEQ ID NO: 16940 - RNA, 20 nt, synthetic construct
  source 1..20: mol_type = other RNA
cagtttttaaatttccattt

SEQ ID NO: 16941 - RNA, 20 nt, synthetic construct
  source 1..20: mol_type = other RNA
tcattacagatataactttt

SEQ ID NO: 16942 - RNA, 20 nt, synthetic construct
  source 1..20: mol_type = other RNA
ctggatggccttataaccag

SEQ ID NO: 16943 - RNA, 20 nt, synthetic construct
  source 1..20: mol_type = other RNA
taccataatatctaaactgg

SEQ ID NO: 16944 - RNA, 20 nt, synthetic construct
  source 1..20: mol_type = other RNA
ccttttcctaccataatatc

SEQ ID NO: 16945 - RNA, 20 nt, synthetic construct
  source 1..20: mol_type = other RNA
cgttcaccttttcctaccat

SEQ ID NO: 16946 - RNA, 20 nt, synthetic construct
  source 1..20: mol_type = other RNA
attaaagctagacaaaccac

SEQ ID NO: 16947 - RNA, 20 nt, synthetic construct
  source 1..20: mol_type = other RNA
gtcattgtgtgtatgtgtat

SEQ ID NO: 16948 - RNA, 20 nt, synthetic construct
  source 1..20: mol_type = other RNA
tagatgtccttgaggctctg

SEQ ID NO: 16949 - RNA, 20 nt, synthetic construct
  source 1..20: mol_type = other RNA
gtgacttgcctaacacatat

SEQ ID NO: 16950 - RNA, 20 nt, synthetic construct
  source 1..20: mol_type = other RNA
tctctttctgtgacttgcct

SEQ ID NO: 16951 - RNA, 20 nt, synthetic construct
  source 1..20: mol_type = other RNA
gtcacattatctttttcctc

SEQ ID NO: 16952 - RNA, 20 nt, synthetic construct
  source 1..20: mol_type = other RNA
agtataacttctgtcacatt

SEQ ID NO: 16953 - RNA, 20 nt, synthetic construct
  source 1..20: mol_type = other RNA
gtatgtttggaaatttgtca

SEQ ID NO: 16954 - RNA, 20 nt, synthetic construct
  source 1..20: mol_type = other RNA
cattttctgtatgtttggaa

SEQ ID NO: 16955 - RNA, 20 nt, synthetic construct
  source 1..20: mol_type = other RNA
aaacatacagaaaatgagaa

SEQ ID NO: 16956 - RNA, 20 nt, synthetic construct
  source 1..20: mol_type = other RNA
tgactatgaatttctcattt

SEQ ID NO: 16957 - RNA, 20 nt, synthetic construct
  source 1..20: mol_type = other RNA
tagtcatgaagctcaatgac

SEQ ID NO: 16958 - RNA, 20 nt, synthetic construct
  source 1..20: mol_type = other RNA
tagctttgaaatcagacaat

SEQ ID NO: 16959 - RNA, 20 nt, synthetic construct
  source 1..20: mol_type = other RNA
tcttagctttgaaatcagac

SEQ ID NO: 16960 - RNA, 20 nt, synthetic construct
  source 1..20: mol_type = other RNA
aagctaagaagaaaaaaagg

SEQ ID NO: 16961 - RNA, 20 nt, synthetic construct
  source 1..20: mol_type = other RNA
taggaaccccctttttttct

SEQ ID NO: 16962 - RNA, 20 nt, synthetic construct
  source 1..20: mol_type = other RNA
tatgaacaaacattttgaca

SEQ ID NO: 16963 - RNA, 20 nt, synthetic construct
  source 1..20: mol_type = other RNA
ttgcctagatatttaagctg

SEQ ID NO: 16964 - RNA, 20 nt, synthetic construct
  source 1..20: mol_type = other RNA
ttgtgtcttatttgcttttc

SEQ ID NO: 16965 - RNA, 20 nt, synthetic construct
  source 1..20: mol_type = other RNA
atccatcccctttccttgtg

SEQ ID NO: 16966 - RNA, 20 nt, synthetic construct
  source 1..20: mol_type = other RNA
ctgaatgtcattggtttgga

SEQ ID NO: 16967 - RNA, 20 nt, synthetic construct
  source 1..20: mol_type = other RNA
tgttcactgaatgtcattgg

SEQ ID NO: 16968 - RNA, 20 nt, synthetic construct
  source 1..20: mol_type = other RNA
gtgaacaagaaaatagacca

SEQ ID NO: 16969 - RNA, 20 nt, synthetic construct
  source 1..20: mol_type = other RNA
tggatttactcctttgttgg

SEQ ID NO: 16970 - RNA, 20 nt, synthetic construct
  source 1..20: mol_type = other RNA
gtttcatggatttactcctt

SEQ ID NO: 16971 - RNA, 20 nt, synthetic construct
  source 1..20: mol_type = other RNA
aagaaccaactttctgtttc

SEQ ID NO: 16972 - RNA, 20 nt, synthetic construct
  source 1..20: mol_type = other RNA
ttgaaaagattcatgtgatt

SEQ ID NO: 16973 - RNA, 20 nt, synthetic construct
  source 1..20: mol_type = other RNA
tgtgattgaccacagtctgg

SEQ ID NO: 16974 - RNA, 20 nt, synthetic construct
  source 1..20: mol_type = other RNA
gccagactgtggtcaatcac

SEQ ID NO: 16975 - RNA, 20 nt, synthetic construct
  source 1..20: mol_type = other RNA
aatggtgatggttgtactcc

SEQ ID NO: 16976 - RNA, 20 nt, synthetic construct
  source 1..20: mol_type = other RNA
gacctggagtatggtatagc

SEQ ID NO: 16977 - RNA, 20 nt, synthetic construct
  source 1..20: mol_type = other RNA
tgtcagctttcagacctgga

SEQ ID NO: 16978 - RNA, 20 nt, synthetic construct
  source 1..20: mol_type = other RNA
tgatatcttcttgtcagctt

SEQ ID NO: 16979 - RNA, 20 nt, synthetic construct
  source 1..20: mol_type = other RNA
catacagtttttcttgatat

SEQ ID NO: 16980 - RNA, 20 nt, synthetic construct
  source 1..20: mol_type = other RNA
tgaatttattcacatacagt

SEQ ID NO: 16981 - RNA, 20 nt, synthetic construct
  source 1..20: mol_type = other RNA
tgaatgtagatcatgtggat

SEQ ID NO: 16982 - RNA, 20 nt, synthetic construct
  source 1..20: mol_type = other RNA
ttaggtaaacaacaaatcag

SEQ ID NO: 16983 - RNA, 20 nt, synthetic construct
  source 1..20: mol_type = other RNA
gtatctggtttgctgatttg

SEQ ID NO: 16984 - RNA, 20 nt, synthetic construct
  source 1..20: mol_type = other RNA
ataggagtacccaatctatt

SEQ ID NO: 16985 - RNA, 20 nt, synthetic construct
  source 1..20: mol_type = other RNA
ctgtctggctatctgtatgt

SEQ ID NO: 16986 - RNA, 20 nt, synthetic construct
  source 1..20: mol_type = other RNA
aaatctctcagttaatccaa

SEQ ID NO: 16987 - RNA, 20 nt, synthetic construct
  source 1..20: mol_type = other RNA
gccaaatatgttactttgga

SEQ ID NO: 16988 - RNA, 20 nt, synthetic construct
  source 1..20: mol_type = other RNA
accttctgccaaatatgtta

SEQ ID NO: 16989 - RNA, 20 nt, synthetic construct
  source 1..20: mol_type = other RNA
gatcctttcttgtacacatt

SEQ ID NO: 16990 - RNA, 20 nt, synthetic construct
  source 1..20: mol_type = other RNA
tgtacacattgatgttttct

SEQ ID NO: 16991 - RNA, 20 nt, synthetic construct
  source 1..20: mol_type = other RNA
ctcggttttcttatggagta

SEQ ID NO: 16992 - RNA, 20 nt, synthetic construct
  source 1..20: mol_type = other RNA
tatggagtatagacgagttt

SEQ ID NO: 16993 - RNA, 20 nt, synthetic construct
  source 1..20: mol_type = other RNA
tattgtaacacatccaaact

SEQ ID NO: 16994 - RNA, 20 nt, synthetic construct
  source 1..20: mol_type = other RNA
aagacagattatcattctta

SEQ ID NO: 16995 - RNA, 20 nt, synthetic construct
  source 1..20: mol_type = other RNA
aaacaactgtgaacatttca

SEQ ID NO: 16996 - RNA, 20 nt, synthetic construct
  source 1..20: mol_type = other RNA
cagttgtttagaagttgagg

SEQ ID NO: 16997 - RNA, 20 nt, synthetic construct
  source 1..20: mol_type = other RNA
cactaaaggtcctgtaacaa

SEQ ID NO: 16998 - RNA, 20 nt, synthetic construct
  source 1..20: mol_type = other RNA
aagtcactttttaccacttt

SEQ ID NO: 16999 - RNA, 20 nt, synthetic construct
  source 1..20: mol_type = other RNA
ccagagatgggagaagatac

SEQ ID NO: 17000 - RNA, 20 nt, synthetic construct
  source 1..20: mol_type = other RNA
cccatctctggtgaactgta

SEQ ID NO: 17001 - RNA, 20 nt, synthetic construct
  source 1..20: mol_type = other RNA
tggtcaggccactgcaaatt

SEQ ID NO: 17002 - RNA, 20 nt, synthetic construct
  source 1..20: mol_type = other RNA
tgcagtagttcctggtcagg

SEQ ID NO: 17003 - RNA, 20 nt, synthetic construct
  source 1..20: mol_type = other RNA
gtcactggacattgtgtcag

SEQ ID NO: 17004 - RNA, 20 nt, synthetic construct
  source 1..20: mol_type = other RNA
gaacaaggtaagaagtctct

SEQ ID NO: 17005 - RNA, 20 nt, synthetic construct
  source 1..20: mol_type = other RNA
gtatcactaagattttgcaa

SEQ ID NO: 17006 - RNA, 20 nt, synthetic construct
  source 1..20: mol_type = other RNA
cgtgcagcatggaaggcttc

SEQ ID NO: 17007 - RNA, 20 nt, synthetic construct
  source 1..20: mol_type = other RNA
gattcccgtgcagcatggaa

SEQ ID NO: 17008 - RNA, 20 nt, synthetic construct
  source 1..20: mol_type = other RNA
atgctgcacgggaatctgaa

SEQ ID NO: 17009 - RNA, 20 nt, synthetic construct
  source 1..20: mol_type = other RNA
cattggctgaccctgagtcc

SEQ ID NO: 17010 - RNA, 20 nt, synthetic construct
  source 1..20: mol_type = other RNA
ttcccattggctgaccctga

SEQ ID NO: 17011 - RNA, 20 nt, synthetic construct
  source 1..20: mol_type = other RNA
cccagagaaggcgctgaggc

SEQ ID NO: 17012 - RNA, 20 nt, synthetic construct
  source 1..20: mol_type = other RNA
ctgggggaaccagggctgag

SEQ ID NO: 17013 - RNA, 20 nt, synthetic construct
  source 1..20: mol_type = other RNA
taaagacaccaccctgtcac

SEQ ID NO: 17014 - RNA, 20 nt, synthetic construct
  source 1..20: mol_type = other RNA
agggcactggatttaccact

SEQ ID NO: 17015 - RNA, 20 nt, synthetic construct
  source 1..20: mol_type = other RNA
atagattatttcagtgtcct

SEQ ID NO: 17016 - RNA, 20 nt, synthetic construct
  source 1..20: mol_type = other RNA
ctaggacactgaaataatct

SEQ ID NO: 17017 - RNA, 20 nt, synthetic construct
  source 1..20: mol_type = other RNA
gtgtcctagtgaaaatggat

SEQ ID NO: 17018 - RNA, 20 nt, synthetic construct
  source 1..20: mol_type = other RNA
aacatcctgccaaatttgtg

SEQ ID NO: 17019 - RNA, 20 nt, synthetic construct
  source 1..20: mol_type = other RNA
tggtatttcttcaagtagac

SEQ ID NO: 17020 - RNA, 20 nt, synthetic construct
  source 1..20: mol_type = other RNA
tcaagtagacagtactcatt

SEQ ID NO: 17021 - RNA, 20 nt, synthetic construct
  source 1..20: mol_type = other RNA
agtagacagtactcattgca

SEQ ID NO: 17022 - RNA, 20 nt, synthetic construct
  source 1..20: mol_type = other RNA
tctgaaactgtaaagctgaa

SEQ ID NO: 17023 - RNA, 20 nt, synthetic construct
  source 1..20: mol_type = other RNA
gctttacagtttcagaggaa

SEQ ID NO: 17024 - RNA, 20 nt, synthetic construct
  source 1..20: mol_type = other RNA
gaggaatgtggtttttgagt

SEQ ID NO: 17025 - RNA, 20 nt, synthetic construct
  source 1..20: mol_type = other RNA
caaggatgacagactcaaaa

SEQ ID NO: 17026 - RNA, 20 nt, synthetic construct
  source 1..20: mol_type = other RNA
atatcctcctgggtctaggt

SEQ ID NO: 17027 - RNA, 20 nt, synthetic construct
  source 1..20: mol_type = other RNA
atcaaagcctaggtgtgcag

SEQ ID NO: 17028 - RNA, 20 nt, synthetic construct
  source 1..20: mol_type = other RNA
tagtgttcttgcccctcctt

SEQ ID NO: 17029 - RNA, 20 nt, synthetic construct
  source 1..20: mol_type = other RNA
atgagaaggaggggcaagaa

SEQ ID NO: 17030 - RNA, 20 nt, synthetic construct
  source 1..20: mol_type = other RNA
tgcccctccttctcatggaa

SEQ ID NO: 17031 - RNA, 20 nt, synthetic construct
  source 1..20: mol_type = other RNA
catggaacacgtatctgtgt

SEQ ID NO: 17032 - RNA, 20 nt, synthetic construct
  source 1..20: mol_type = other RNA
caaacagcaacacagatacg

SEQ ID NO: 17033 - RNA, 20 nt, synthetic construct
  source 1..20: mol_type = other RNA
tcacaaacagcaacacagat

SEQ ID NO: 17034 - RNA, 20 nt, synthetic construct
  source 1..20: mol_type = other RNA
cttggagggacggcgggaaa

SEQ ID NO: 17035 - RNA, 20 nt, synthetic construct
  source 1..20: mol_type = other RNA
cgccgtccctccaagggaat

SEQ ID NO: 17036 - RNA, 20 nt, synthetic construct
  source 1..20: mol_type = other RNA
aggcaaagacacattgtctc

SEQ ID NO: 17037 - RNA, 20 nt, synthetic construct
  source 1..20: mol_type = other RNA
ggaagatggggcaggaagtg

SEQ ID NO: 17038 - RNA, 20 nt, synthetic construct
  source 1..20: mol_type = other RNA
tgccccatcttccagaaact

SEQ ID NO: 17039 - RNA, 20 nt, synthetic construct
  source 1..20: mol_type = other RNA
agaaacttaaggctttggct

SEQ ID NO: 17040 - RNA, 20 nt, synthetic construct
  source 1..20: mol_type = other RNA
ccagagcactgatcctccaa

SEQ ID NO: 17041 - RNA, 20 nt, synthetic construct
  source 1..20: mol_type = other RNA
tgtctgcccccactgacaac

SEQ ID NO: 17042 - RNA, 20 nt, synthetic construct
  source 1..20: mol_type = other RNA
tgagaacaaggcaggagacc

SEQ ID NO: 17043 - RNA, 20 nt, synthetic construct
  source 1..20: mol_type = other RNA
caggaacacccaaaagagat

SEQ ID NO: 17044 - RNA, 20 nt, synthetic construct
  source 1..20: mol_type = other RNA
ttggcaaagatctcttttgg

SEQ ID NO: 17045 - RNA, 20 nt, synthetic construct
  source 1..20: mol_type = other RNA
ttaaaacctgggcaccaaag

SEQ ID NO: 17046 - RNA, 20 nt, synthetic construct
  source 1..20: mol_type = other RNA
atgagtttttagaaagattt

SEQ ID NO: 17047 - RNA, 20 nt, synthetic construct
  source 1..20: mol_type = other RNA
ggaacttcaatgagttttta

SEQ ID NO: 17048 - RNA, 20 nt, synthetic construct
  source 1..20: mol_type = other RNA
aaaaactcattgaagttcca

SEQ ID NO: 17049 - RNA, 20 nt, synthetic construct
  source 1..20: mol_type = other RNA
tagcattctggaacttcaat

SEQ ID NO: 17050 - RNA, 20 nt, synthetic construct
  source 1..20: mol_type = other RNA
agaatgctatgaatctttga

SEQ ID NO: 17051 - RNA, 20 nt, synthetic construct
  source 1..20: mol_type = other RNA
acattagtaggcagatggac

SEQ ID NO: 17052 - RNA, 20 nt, synthetic construct
  source 1..20: mol_type = other RNA
gagatgatgtcctgtttcta

SEQ ID NO: 17053 - RNA, 20 nt, synthetic construct
  source 1..20: mol_type = other RNA
atcatggattttttttctca

SEQ ID NO: 17054 - RNA, 20 nt, synthetic construct
  source 1..20: mol_type = other RNA
agaacacagaagcatgagaa

SEQ ID NO: 17055 - RNA, 20 nt, synthetic construct
  source 1..20: mol_type = other RNA
catgcttctgtgttctggaa

SEQ ID NO: 17056 - RNA, 20 nt, synthetic construct
  source 1..20: mol_type = other RNA
gtgttctggaaattactcag

SEQ ID NO: 17057 - RNA, 20 nt, synthetic construct
  source 1..20: mol_type = other RNA
ggaaattactcagtttgttt

SEQ ID NO: 17058 - RNA, 20 nt, synthetic construct
  source 1..20: mol_type = other RNA
aagaggagaaaacaaactga

SEQ ID NO: 17059 - RNA, 20 nt, synthetic construct
  source 1..20: mol_type = other RNA
cctctttgaatttcagcacc

SEQ ID NO: 17060 - RNA, 20 nt, synthetic construct
  source 1..20: mol_type = other RNA
gcaccaacggagcaaagccc

SEQ ID NO: 17061 - RNA, 20 nt, synthetic construct
  source 1..20: mol_type = other RNA
tgtaacagtggtggagaatg

SEQ ID NO: 17062 - RNA, 20 nt, synthetic construct
  source 1..20: mol_type = other RNA
ccaccactgttacaggaagg

SEQ ID NO: 17063 - RNA, 20 nt, synthetic construct
  source 1..20: mol_type = other RNA
cccaagagaaacagccaccc

SEQ ID NO: 17064 - RNA, 20 nt, synthetic construct
  source 1..20: mol_type = other RNA
aggagaaatttaagtgggtg

SEQ ID NO: 17065 - RNA, 20 nt, synthetic construct
  source 1..20: mol_type = other RNA
cctggaagagccatgcttcc

SEQ ID NO: 17066 - RNA, 20 nt, synthetic construct
  source 1..20: mol_type = other RNA
agctaacttcttatgaccca

SEQ ID NO: 17067 - RNA, 20 nt, synthetic construct
  source 1..20: mol_type = other RNA
tatgacccaatttctctcag

SEQ ID NO: 17068 - RNA, 20 nt, synthetic construct
  source 1..20: mol_type = other RNA
gggtctgagagaaattgggt

SEQ ID NO: 17069 - RNA, 20 nt, synthetic construct
  source 1..20: mol_type = other RNA
ctcagacccagaatgttgga

SEQ ID NO: 17070 - RNA, 20 nt, synthetic construct
  source 1..20: mol_type = other RNA
gtccaacattctgggtctga

SEQ ID NO: 17071 - RNA, 20 nt, synthetic construct
  source 1..20: mol_type = other RNA
tgctttgggcacagggtctg

SEQ ID NO: 17072 - RNA, 20 nt, synthetic construct
  source 1..20: mol_type = other RNA
ctcctctcagaccctgtgcc

SEQ ID NO: 17073 - RNA, 20 nt, synthetic construct
  source 1..20: mol_type = other RNA
atcaactatgagaaaagaga

SEQ ID NO: 17074 - RNA, 20 nt, synthetic construct
  source 1..20: mol_type = other RNA
catagttgatagaagtagga

SEQ ID NO: 17075 - RNA, 20 nt, synthetic construct
  source 1..20: mol_type = other RNA
tgagacctcaccacctccaa

SEQ ID NO: 17076 - RNA, 20 nt, synthetic construct
  source 1..20: mol_type = other RNA
attcatgagacctcaccacc

SEQ ID NO: 17077 - RNA, 20 nt, synthetic construct
  source 1..20: mol_type = other RNA
gagctttctattcatgagac

SEQ ID NO: 17078 - RNA, 20 nt, synthetic construct
  source 1..20: mol_type = other RNA
tctgagctttctattcatga

SEQ ID NO: 17079 - RNA, 20 nt, synthetic construct
  source 1..20: mol_type = other RNA
aagcacatggtcatatgttc

SEQ ID NO: 17080 - RNA, 20 nt, synthetic construct
  source 1..20: mol_type = other RNA
acaatgcccactaaagacca

SEQ ID NO: 17081 - RNA, 20 nt, synthetic construct
  source 1..20: mol_type = other RNA
ctggtctttagtgggcattg

SEQ ID NO: 17082 - RNA, 20 nt, synthetic construct
  source 1..20: mol_type = other RNA
ctggttgaactatttcactg

SEQ ID NO: 17083 - RNA, 20 nt, synthetic construct
  source 1..20: mol_type = other RNA
accagggaattctgtcattc

SEQ ID NO: 17084 - RNA, 20 nt, synthetic construct
  source 1..20: mol_type = other RNA
gtcattctaatctccaagcc

SEQ ID NO: 17085 - RNA, 20 nt, synthetic construct
  source 1..20: mol_type = other RNA
ctccagggcttggagattag

SEQ ID NO: 17086 - RNA, 20 nt, synthetic construct
  source 1..20: mol_type = other RNA
aatctccaagccctggagtg

SEQ ID NO: 17087 - RNA, 20 nt, synthetic construct
  source 1..20: mol_type = other RNA
cttgttacccaagacaaaca

SEQ ID NO: 17088 - RNA, 20 nt, synthetic construct
  source 1..20: mol_type = other RNA
agatcttccgatcactttct

SEQ ID NO: 17089 - RNA, 20 nt, synthetic construct
  source 1..20: mol_type = other RNA
gatcactttctcctctaacc

SEQ ID NO: 17090 - RNA, 20 nt, synthetic construct
  source 1..20: mol_type = other RNA
cctctaacctgtataaacac

SEQ ID NO: 17091 - RNA, 20 nt, synthetic construct
  source 1..20: mol_type = other RNA
cagaacccaatgtgtttata

SEQ ID NO: 17092 - RNA, 20 nt, synthetic construct
  source 1..20: mol_type = other RNA
gacaccttgttctcagaacc

SEQ ID NO: 17093 - RNA, 20 nt, synthetic construct
  source 1..20: mol_type = other RNA
gagaacaaggtgtctgaaaa

SEQ ID NO: 17094 - RNA, 20 nt, synthetic construct
  source 1..20: mol_type = other RNA
tccttttgcccctcatgggc

SEQ ID NO: 17095 - RNA, 20 nt, synthetic construct
  source 1..20: mol_type = other RNA
tgactctcagctgccttcct

SEQ ID NO: 17096 - RNA, 20 nt, synthetic construct
  source 1..20: mol_type = other RNA
gcatctctatacttcctgac

SEQ ID NO: 17097 - RNA, 20 nt, synthetic construct
  source 1..20: mol_type = other RNA
tgaatgtgtaactcttcagc

SEQ ID NO: 17098 - RNA, 20 nt, synthetic construct
  source 1..20: mol_type = other RNA
gtccatcttcctgaatgtgt

SEQ ID NO: 17099 - RNA, 20 nt, synthetic construct
  source 1..20: mol_type = other RNA
ggaagatggacagaaaccca

SEQ ID NO: 17100 - RNA, 20 nt, synthetic construct
  source 1..20: mol_type = other RNA
tggcagaaaggctggcatag

SEQ ID NO: 17101 - RNA, 20 nt, synthetic construct
  source 1..20: mol_type = other RNA
gccatgaaggactatcaaat

SEQ ID NO: 17102 - RNA, 20 nt, synthetic construct
  source 1..20: mol_type = other RNA
catgtatttgatagtccttc

SEQ ID NO: 17103 - RNA, 20 nt, synthetic construct
  source 1..20: mol_type = other RNA
caggttggacaacagatatg

SEQ ID NO: 17104 - RNA, 20 nt, synthetic construct
  source 1..20: mol_type = other RNA
ctcaagcctaccatatctgt

SEQ ID NO: 17105 - RNA, 20 nt, synthetic construct
  source 1..20: mol_type = other RNA
cagttctctcaagcctacca

SEQ ID NO: 17106 - RNA, 20 nt, synthetic construct
  source 1..20: mol_type = other RNA
ctttctcagttctctcaagc

SEQ ID NO: 17107 - RNA, 20 nt, synthetic construct
  source 1..20: mol_type = other RNA
tcattaacctgtcttccttc

SEQ ID NO: 17108 - RNA, 20 nt, synthetic construct
  source 1..20: mol_type = other RNA
ttcctggacacagtgttgga

SEQ ID NO: 17109 - RNA, 20 nt, synthetic construct
  source 1..20: mol_type = other RNA
atccaacactgtgtccagga

SEQ ID NO: 17110 - RNA, 20 nt, synthetic construct
  source 1..20: mol_type = other RNA
tggacacagtgttggattga

SEQ ID NO: 17111 - RNA, 20 nt, synthetic construct
  source 1..20: mol_type = other RNA
tagccagcctagaacacatc

SEQ ID NO: 17112 - RNA, 20 nt, synthetic construct
  source 1..20: mol_type = other RNA
cattcttagccagcctagaa

SEQ ID NO: 17113 - RNA, 20 nt, synthetic construct
  source 1..20: mol_type = other RNA
aggctggctaagaatgagaa

SEQ ID NO: 17114 - RNA, 20 nt, synthetic construct
  source 1..20: mol_type = other RNA
acaaatcccttctcattctt

SEQ ID NO: 17115 - RNA, 20 nt, synthetic construct
  source 1..20: mol_type = other RNA
tccacaaatcccttctcatt

SEQ ID NO: 17116 - RNA, 20 nt, synthetic construct
  source 1..20: mol_type = other RNA
tggagctcctttcttccaca

SEQ ID NO: 17117 - RNA, 20 nt, synthetic construct
  source 1..20: mol_type = other RNA
gtgtgtattcctggagctcc

SEQ ID NO: 17118 - RNA, 20 nt, synthetic construct
  source 1..20: mol_type = other RNA
ttatgaaaactctccctgtg

SEQ ID NO: 17119 - RNA, 20 nt, synthetic construct
  source 1..20: mol_type = other RNA
ttctttatgaaaactctccc

SEQ ID NO: 17120 - RNA, 20 nt, synthetic construct
  source 1..20: mol_type = other RNA
ttgttgttctttctttatga

SEQ ID NO: 17121 - RNA, 20 nt, synthetic construct
  source 1..20: mol_type = other RNA
taaagaaagaacaacaaaga

SEQ ID NO: 17122 - RNA, 20 nt, synthetic construct
  source 1..20: mol_type = other RNA
caagtagcttttctttgttg

SEQ ID NO: 17123 - RNA, 20 nt, synthetic construct
  source 1..20: mol_type = other RNA
ttcccaagtagcttttcttt

SEQ ID NO: 17124 - RNA, 20 nt, synthetic construct
  source 1..20: mol_type = other RNA
cctgcagttgttctttccca

SEQ ID NO: 17125 - RNA, 20 nt, synthetic construct
  source 1..20: mol_type = other RNA
aatatcccccagtgctatgt

SEQ ID NO: 17126 - RNA, 20 nt, synthetic construct
  source 1..20: mol_type = other RNA
cctctgagtggtcagaattc

SEQ ID NO: 17127 - RNA, 20 nt, synthetic construct
  source 1..20: mol_type = other RNA
gaccactcagaggagaaaca

SEQ ID NO: 17128 - RNA, 20 nt, synthetic construct
  source 1..20: mol_type = other RNA
ttggtctctactgaatgccc

SEQ ID NO: 17129 - RNA, 20 nt, synthetic construct
  source 1..20: mol_type = other RNA
gtagagaccaaagaaagctg

SEQ ID NO: 17130 - RNA, 20 nt, synthetic construct
  source 1..20: mol_type = other RNA
aggaataagatgatcccaat

SEQ ID NO: 17131 - RNA, 20 nt, synthetic construct
  source 1..20: mol_type = other RNA
ggagtcaccttgattctagg

SEQ ID NO: 17132 - RNA, 20 nt, synthetic construct
  source 1..20: mol_type = other RNA
tagaatcaaggtgactccag

SEQ ID NO: 17133 - RNA, 20 nt, synthetic construct
  source 1..20: mol_type = other RNA
tccaagccagtctaaaagga

SEQ ID NO: 17134 - RNA, 20 nt, synthetic construct
  source 1..20: mol_type = other RNA
aagccagtctaaaaggatcc

SEQ ID NO: 17135 - RNA, 20 nt, synthetic construct
  source 1..20: mol_type = other RNA
tgtggaatgcagttaattta

SEQ ID NO: 17136 - RNA, 20 nt, synthetic construct
  source 1..20: mol_type = other RNA
acaagaaaaaaaaaactcaa

SEQ ID NO: 17137 - RNA, 20 nt, synthetic construct
  source 1..20: mol_type = other RNA
tattgcgttacttctattta

SEQ ID NO: 17138 - RNA, 20 nt, synthetic construct
  source 1..20: mol_type = other RNA
atttaaaaatttaatagaga

SEQ ID NO: 17139 - RNA, 20 nt, synthetic construct
  source 1..20: mol_type = other RNA
tgtgtctctattaaattttt

SEQ ID NO: 17140 - RNA, 20 nt, synthetic construct
  source 1..20: mol_type = other RNA
cccagttatgtatcacagtg

SEQ ID NO: 17141 - RNA, 20 nt, synthetic construct
  source 1..20: mol_type = other RNA
ctgtgatacataactgggag

SEQ ID NO: 17142 - RNA, 20 nt, synthetic construct
  source 1..20: mol_type = other RNA
gggcctgtttgtgttgagtg

SEQ ID NO: 17143 - RNA, 20 nt, synthetic construct
  source 1..20: mol_type = other RNA
ataatttctgggcctgtttg

SEQ ID NO: 17144 - RNA, 20 nt, synthetic construct
  source 1..20: mol_type = other RNA
caccaatgtcatcaattcta

SEQ ID NO: 17145 - RNA, 20 nt, synthetic construct
  source 1..20: mol_type = other RNA
cagaggtgcattttaaatgt

SEQ ID NO: 17146 - RNA, 20 nt, synthetic construct
  source 1..20: mol_type = other RNA
tgaaacacagttctcagagg

SEQ ID NO: 17147 - RNA, 20 nt, synthetic construct
  source 1..20: mol_type = other RNA
ggaaaatgtcagcaaaagct

SEQ ID NO: 17148 - RNA, 20 nt, synthetic construct
  source 1..20: mol_type = other RNA
ctcatggtcagcttttgctg

SEQ ID NO: 17149 - RNA, 20 nt, synthetic construct
  source 1..20: mol_type = other RNA
gcttttgtttctctcatggt

SEQ ID NO: 17150 - RNA, 20 nt, synthetic construct
  source 1..20: mol_type = other RNA
cttgctattctgcttttgtt

SEQ ID NO: 17151 - RNA, 20 nt, synthetic construct
  source 1..20: mol_type = other RNA
tttctcttgctattctgctt

SEQ ID NO: 17152 - RNA, 20 nt, synthetic construct
  source 1..20: mol_type = other RNA
tttcttttctcttgctattc

SEQ ID NO: 17153 - RNA, 20 nt, synthetic construct
  source 1..20: mol_type = other RNA
tttggctctccggttctttt

SEQ ID NO: 17154 - RNA, 20 nt, synthetic construct
  source 1..20: mol_type = other RNA
ttaattttcatttggctctc

SEQ ID NO: 17155 - RNA, 20 nt, synthetic construct
  source 1..20: mol_type = other RNA
cagttctttaattttcattt

SEQ ID NO: 17156 - RNA, 20 nt, synthetic construct
  source 1..20: mol_type = other RNA
ttagagatgtaccttttctc

SEQ ID NO: 17157 - RNA, 20 nt, synthetic construct
  source 1..20: mol_type = other RNA
tcattagagatgtacctttt

SEQ ID NO: 17158 - RNA, 20 nt, synthetic construct
  source 1..20: mol_type = other RNA
taccgtaatgtctaaagtga

SEQ ID NO: 17159 - RNA, 20 nt, synthetic construct
  source 1..20: mol_type = other RNA
aggtcacctttcctaccgta

SEQ ID NO: 17160 - RNA, 20 nt, synthetic construct
  source 1..20: mol_type = other RNA
ataggagctacacaaatcac

SEQ ID NO: 17161 - RNA, 20 nt, synthetic construct
  source 1..20: mol_type = other RNA
gtctgttggtctgtctgtct

SEQ ID NO: 17162 - RNA, 20 nt, synthetic construct
  source 1..20: mol_type = other RNA
gtctttgtgtgtgtgtgtgt

SEQ ID NO: 17163 - RNA, 20 nt, synthetic construct
  source 1..20: mol_type = other RNA
tagatgcccttgaggctctg

SEQ ID NO: 17164 - RNA, 20 nt, synthetic construct
  source 1..20: mol_type = other RNA
gtgacttgcctaacacatat

SEQ ID NO: 17165 - RNA, 20 nt, synthetic construct
  source 1..20: mol_type = other RNA
ccttctgtgacttgcctaac

SEQ ID NO: 17166 - RNA, 20 nt, synthetic construct
  source 1..20: mol_type = other RNA
tctccttctgtgacttgcct

SEQ ID NO: 17167 - RNA, 20 nt, synthetic construct
  source 1..20: mol_type = other RNA
agtataatgtctgtcatgat

SEQ ID NO: 17168 - RNA, 20 nt, synthetic construct
  source 1..20: mol_type = other RNA
gtatatttggcgtgttgcga

SEQ ID NO: 17169 - RNA, 20 nt, synthetic construct
  source 1..20: mol_type = other RNA
tgttttctgtatatttggcg

SEQ ID NO: 17170 - RNA, 20 nt, synthetic construct
  source 1..20: mol_type = other RNA
tgactatgagtttcttgttt

SEQ ID NO: 17171 - RNA, 20 nt, synthetic construct
  source 1..20: mol_type = other RNA
atacctgagtcatttagctt

SEQ ID NO: 17172 - RNA, 20 nt, synthetic construct
  source 1..20: mol_type = other RNA
ttttagctttgaattgaggc

SEQ ID NO: 17173 - RNA, 20 nt, synthetic construct
  source 1..20: mol_type = other RNA
aagctaaaaagaaaaaaagg

SEQ ID NO: 17174 - RNA, 20 nt, synthetic construct
  source 1..20: mol_type = other RNA
taggaaccccctttttttct

SEQ ID NO: 17175 - RNA, 20 nt, synthetic construct
  source 1..20: mol_type = other RNA
tatgaacaacagctttgaca

SEQ ID NO: 17176 - RNA, 20 nt, synthetic construct
  source 1..20: mol_type = other RNA
ttgcctagatatttaagctg

SEQ ID NO: 17177 - RNA, 20 nt, synthetic construct
  source 1..20: mol_type = other RNA
ttgtgccttatttgcttttc

SEQ ID NO: 17178 - RNA, 20 nt, synthetic construct
  source 1..20: mol_type = other RNA
atcctctttccttgtgcctt

SEQ ID NO: 17179 - RNA, 20 nt, synthetic construct
  source 1..20: mol_type = other RNA
ttccatcctctttccttgtg

SEQ ID NO: 17180 - RNA, 20 nt, synthetic construct
  source 1..20: mol_type = other RNA
actgaatgtcattggtttgg

SEQ ID NO: 17181 - RNA, 20 nt, synthetic construct
  source 1..20: mol_type = other RNA
tttccactgaatgtcattgg

SEQ ID NO: 17182 - RNA, 20 nt, synthetic construct
  source 1..20: mol_type = other RNA
gtggaaaagaaaatagacca

SEQ ID NO: 17183 - RNA, 20 nt, synthetic construct
  source 1..20: mol_type = other RNA
tggatttactcctttgttgg

SEQ ID NO: 17184 - RNA, 20 nt, synthetic construct
  source 1..20: mol_type = other RNA
gtttcatggatttactcctt

SEQ ID NO: 17185 - RNA, 20 nt, synthetic construct
  source 1..20: mol_type = other RNA
aagaacctaactttctgttt

SEQ ID NO: 17186 - RNA, 20 nt, synthetic construct
  source 1..20: mol_type = other RNA
ttgaaaagtctatatgattg

SEQ ID NO: 17187 - RNA, 20 nt, synthetic construct
  source 1..20: mol_type = other RNA
cacctggaggatgctatagc

SEQ ID NO: 17188 - RNA, 20 nt, synthetic construct
  source 1..20: mol_type = other RNA
cagctttcacacctggagga

SEQ ID NO: 17189 - RNA, 20 nt, synthetic construct
  source 1..20: mol_type = other RNA
tgaatttatttacatacagt

SEQ ID NO: 17190 - RNA, 20 nt, synthetic construct
  source 1..20: mol_type = other RNA
tgaatgtagatcatgtggat

SEQ ID NO: 17191 - RNA, 20 nt, synthetic construct
  source 1..20: mol_type = other RNA
gtgtttgatttgctgatttg

SEQ ID NO: 17192 - RNA, 20 nt, synthetic construct
  source 1..20: mol_type = other RNA
cgtacatacaaatgtttatc

SEQ ID NO: 17193 - RNA, 20 nt, synthetic construct
  source 1..20: mol_type = other RNA
aaatccctctcggttaatcc

SEQ ID NO: 17194 - RNA, 20 nt, synthetic construct
  source 1..20: mol_type = other RNA
tttggattaaccgagaggga

SEQ ID NO: 17195 - RNA, 20 nt, synthetic construct
  source 1..20: mol_type = other RNA
gccaaatacattcctttgga

SEQ ID NO: 17196 - RNA, 20 nt, synthetic construct
  source 1..20: mol_type = other RNA
accttctgccaaatacattc

SEQ ID NO: 17197 - RNA, 20 nt, synthetic construct
  source 1..20: mol_type = other RNA
gatcctttctggtacacatt

SEQ ID NO: 17198 - RNA, 20 nt, synthetic construct
  source 1..20: mol_type = other RNA
ggtacacattgatgttttct

SEQ ID NO: 17199 - RNA, 20 nt, synthetic construct
  source 1..20: mol_type = other RNA
ctcagttttcttataaagca

SEQ ID NO: 17200 - RNA, 20 nt, synthetic construct
  source 1..20: mol_type = other RNA
aagtaatctatgctttataa

SEQ ID NO: 17201 - RNA, 20 nt, synthetic construct
  source 1..20: mol_type = other RNA
tataaagcatagattacttt

SEQ ID NO: 17202 - RNA, 20 nt, synthetic construct
  source 1..20: mol_type = other RNA
tattgtaacacattcaaagt

SEQ ID NO: 17203 - RNA, 20 nt, synthetic construct
  source 1..20: mol_type = other RNA
aagacagcttatgattctta

SEQ ID NO: 17204 - RNA, 20 nt, synthetic construct
  source 1..20: mol_type = other RNA
aaacaactgtcaacatttca

SEQ ID NO: 17205 - RNA, 20 nt, synthetic construct
  source 1..20: mol_type = other RNA
cactaaagtcccataacact

SEQ ID NO: 17206 - RNA, 20 nt, synthetic construct
  source 1..20: mol_type = other RNA
aatttgcttgtttacacttt

SEQ ID NO: 17207 - RNA, 20 nt, synthetic construct
  source 1..20: mol_type = other RNA
tgtaacaaagtgtaaacaag

SEQ ID NO: 17208 - RNA, 20 nt, synthetic construct
  source 1..20: mol_type = other RNA
ccaatctctggtgacctgta

SEQ ID NO: 17209 - RNA, 20 nt, synthetic construct
  source 1..20: mol_type = other RNA
aaaacaatacaggtcaccag

SEQ ID NO: 17210 - RNA, 20 nt, synthetic construct
  source 1..20: mol_type = other RNA
tggtcaggccactgcaaatt

SEQ ID NO: 17211 - RNA, 20 nt, synthetic construct
  source 1..20: mol_type = other RNA
tgcagtagttcctggtcagg

SEQ ID NO: 17212 - RNA, 20 nt, synthetic construct
  source 1..20: mol_type = other RNA
cccttggtgttataccatgg

SEQ ID NO: 17213 - RNA, 20 nt, synthetic construct
  source 1..20: mol_type = other RNA
ttctgaagaaggtaagaagc

SEQ ID NO: 17214 - RNA, 20 nt, synthetic construct
  source 1..20: mol_type = other RNA
gaagaaggtaagaagcctgc

SEQ ID NO: 17215 - RNA, 20 nt, synthetic construct
  source 1..20: mol_type = other RNA
gcatcacaaagattttgcaa

SEQ ID NO: 17216 - RNA, 20 nt, synthetic construct
  source 1..20: mol_type = other RNA
tgtgcagcatggaagttttc

SEQ ID NO: 17217 - RNA, 20 nt, synthetic construct
  source 1..20: mol_type = other RNA
acttcctgtgcagcatggaa

SEQ ID NO: 17218 - RNA, 20 nt, synthetic construct
  source 1..20: mol_type = other RNA
atgctgcacaggaagtcgaa

SEQ ID NO: 17219 - RNA, 20 nt, synthetic construct
  source 1..20: mol_type = other RNA
ccttcgacttcctgtgcagc

SEQ ID NO: 17220 - RNA, 20 nt, synthetic construct
  source 1..20: mol_type = other RNA
cattggctgtccatgacttc

SEQ ID NO: 17221 - RNA, 20 nt, synthetic construct
  source 1..20: mol_type = other RNA
ttcccattggctgtccatga

SEQ ID NO: 17222 - RNA, 20 nt, synthetic construct
  source 1..20: mol_type = other RNA
gtgccttctctggggggacc

SEQ ID NO: 17223 - RNA, 20 nt, synthetic construct
  source 1..20: mol_type = other RNA
ctggggggaccagagctggg

SEQ ID NO: 17224 - RNA, 20 nt, synthetic construct
  source 1..20: mol_type = other RNA
tttgataacagggaagtgat

SEQ ID NO: 17225 - RNA, 20 nt, synthetic construct
  source 1..20: mol_type = other RNA
ctgttatcaaacgaatcata

SEQ ID NO: 17226 - RNA, 20 nt, synthetic construct
  source 1..20: mol_type = other RNA
caagtttggcaggatgttag

SEQ ID NO: 17227 - RNA, 20 nt, synthetic construct
  source 1..20: mol_type = other RNA
aacatcctgccaaacttgtg

SEQ ID NO: 17228 - RNA, 20 nt, synthetic construct
  source 1..20: mol_type = other RNA
tcaagtaggcagtgtttatt

SEQ ID NO: 17229 - RNA, 20 nt, synthetic construct
  source 1..20: mol_type = other RNA
agtaggcagtgtttattgca

SEQ ID NO: 17230 - RNA, 20 nt, synthetic construct
  source 1..20: mol_type = other RNA
aaatggtaaagctgaagact

SEQ ID NO: 17231 - RNA, 20 nt, synthetic construct
  source 1..20: mol_type = other RNA
ttcaaaatggtaaagctgaa

SEQ ID NO: 17232 - RNA, 20 nt, synthetic construct
  source 1..20: mol_type = other RNA
gctttaccattttgaaggaa

SEQ ID NO: 17233 - RNA, 20 nt, synthetic construct
  source 1..20: mol_type = other RNA
caagaacaacagcctcaaaa

SEQ ID NO: 17234 - RNA, 20 nt, synthetic construct
  source 1..20: mol_type = other RNA
tgagaaacctaacatgtctt

SEQ ID NO: 17235 - RNA, 20 nt, synthetic construct
  source 1..20: mol_type = other RNA
ttagatccgtattgtcctga

SEQ ID NO: 17236 - RNA, 20 nt, synthetic construct
  source 1..20: mol_type = other RNA
aagtctcaggacaatacgga

SEQ ID NO: 17237 - RNA, 20 nt, synthetic construct
  source 1..20: mol_type = other RNA
tcttgggcatgccttccaca

SEQ ID NO: 17238 - RNA, 20 nt, synthetic construct
  source 1..20: mol_type = other RNA
ctcaaatcctaggtgtggaa

SEQ ID NO: 17239 - RNA, 20 nt, synthetic construct
  source 1..20: mol_type = other RNA
acacctaggatttgagggaa

SEQ ID NO: 17240 - RNA, 20 nt, synthetic construct
  source 1..20: mol_type = other RNA
cagtgttctcatccctgctt

SEQ ID NO: 17241 - RNA, 20 nt, synthetic construct
  source 1..20: mol_type = other RNA
atgagaagcagggatgagaa

SEQ ID NO: 17242 - RNA, 20 nt, synthetic construct
  source 1..20: mol_type = other RNA
catccctgcttctcatggaa

SEQ ID NO: 17243 - RNA, 20 nt, synthetic construct
  source 1..20: mol_type = other RNA
catggaacatttatctccgt

SEQ ID NO: 17244 - RNA, 20 nt, synthetic construct
  source 1..20: mol_type = other RNA
caaaaaacaacggagataaa

SEQ ID NO: 17245 - RNA, 20 nt, synthetic construct
  source 1..20: mol_type = other RNA
tctcaaaaaacaacggagat

SEQ ID NO: 17246 - RNA, 20 nt, synthetic construct
  source 1..20: mol_type = other RNA
tgtaatgagggatcctgggc

SEQ ID NO: 17247 - RNA, 20 nt, synthetic construct
  source 1..20: mol_type = other RNA
ctgtctcccctcctaggcta

SEQ ID NO: 17248 - RNA, 20 nt, synthetic construct
  source 1..20: mol_type = other RNA
ccctgagaggcaatgtgtct

SEQ ID NO: 17249 - RNA, 20 nt, synthetic construct
  source 1..20: mol_type = other RNA
ggggtgtggggcagaaaagg

SEQ ID NO: 17250 - RNA, 20 nt, synthetic construct
  source 1..20: mol_type = other RNA
gattctggggtgtggggcag

SEQ ID NO: 17251 - RNA, 20 nt, synthetic construct
  source 1..20: mol_type = other RNA
gccccacaccccagaatctg

SEQ ID NO: 17252 - RNA, 20 nt, synthetic construct
  source 1..20: mol_type = other RNA
tgtataccccccactaacag

SEQ ID NO: 17253 - RNA, 20 nt, synthetic construct
  source 1..20: mol_type = other RNA
ggctataggtggtgattggc

SEQ ID NO: 17254 - RNA, 20 nt, synthetic construct
  source 1..20: mol_type = other RNA
tgagaacaaggcaggagacc

SEQ ID NO: 17255 - RNA, 20 nt, synthetic construct
  source 1..20: mol_type = other RNA
gggtgttcatgagaacaagg

SEQ ID NO: 17256 - RNA, 20 nt, synthetic construct
  source 1..20: mol_type = other RNA
catgaacacccagaagaggt

SEQ ID NO: 17257 - RNA, 20 nt, synthetic construct
  source 1..20: mol_type = other RNA
aaattacactcatgtgaatg

SEQ ID NO: 17258 - RNA, 20 nt, synthetic construct
  source 1..20: mol_type = other RNA
catgagtgtaattttgaagt

SEQ ID NO: 17259 - RNA, 20 nt, synthetic construct
  source 1..20: mol_type = other RNA
ttgtttgtttgttttccagg

SEQ ID NO: 17260 - RNA, 20 nt, synthetic construct
  source 1..20: mol_type = other RNA
accctggaaaacaaacaaac

SEQ ID NO: 17261 - RNA, 20 nt, synthetic construct
  source 1..20: mol_type = other RNA
agggttgaattaaaatattt

SEQ ID NO: 17262 - RNA, 20 nt, synthetic construct
  source 1..20: mol_type = other RNA
agaaatttaataagtagtca

SEQ ID NO: 17263 - RNA, 20 nt, synthetic construct
  source 1..20: mol_type = other RNA
agaatcctataagtctattt

SEQ ID NO: 17264 - RNA, 20 nt, synthetic construct
  source 1..20: mol_type = other RNA
acatttcaatttgcatgcta

SEQ ID NO: 17265 - RNA, 20 nt, synthetic construct
  source 1..20: mol_type = other RNA
atattagcatgcaaattgaa

SEQ ID NO: 17266 - RNA, 20 nt, synthetic construct
  source 1..20: mol_type = other RNA
atttgcatgctaatatagaa

SEQ ID NO: 17267 - RNA, 20 nt, synthetic construct
  source 1..20: mol_type = other RNA
actttgtgtgtcataatttt

SEQ ID NO: 17268 - RNA, 20 nt, synthetic construct
  source 1..20: mol_type = other RNA
catttcccttttctaggcaa

SEQ ID NO: 17269 - RNA, 20 nt, synthetic construct
  source 1..20: mol_type = other RNA
cttttctaggcaatactgag

SEQ ID NO: 17270 - RNA, 20 nt, synthetic construct
  source 1..20: mol_type = other RNA
aggcaatactgagcttgatt

SEQ ID NO: 17271 - RNA, 20 nt, synthetic construct
  source 1..20: mol_type = other RNA
gttggtgctgaaattaaaag

SEQ ID NO: 17272 - RNA, 20 nt, synthetic construct
  source 1..20: mol_type = other RNA
cttttaatttcagcaccaac

SEQ ID NO: 17273 - RNA, 20 nt, synthetic construct
  source 1..20: mol_type = other RNA
cttagctggcccatgctaca

SEQ ID NO: 17274 - RNA, 20 nt, synthetic construct
  source 1..20: mol_type = other RNA
taggtccaaatttctcatag

SEQ ID NO: 17275 - RNA, 20 nt, synthetic construct
  source 1..20: mol_type = other RNA
catagactcagagtttgtag

SEQ ID NO: 17276 - RNA, 20 nt, synthetic construct
  source 1..20: mol_type = other RNA
tgagacattttgctacaaac

SEQ ID NO: 17277 - RNA, 20 nt, synthetic construct
  source 1..20: mol_type = other RNA
gaccttttgctcaaaagtaa

SEQ ID NO: 17278 - RNA, 20 nt, synthetic construct
  source 1..20: mol_type = other RNA
ttcagaccttttgctcaaaa

SEQ ID NO: 17279 - RNA, 20 nt, synthetic construct
  source 1..20: mol_type = other RNA
cttcattcagaccttttgct

SEQ ID NO: 17280 - RNA, 20 nt, synthetic construct
  source 1..20: mol_type = other RNA
atcaaattgttatgaaagat

SEQ ID NO: 17281 - RNA, 20 nt, synthetic construct
  source 1..20: mol_type = other RNA
taacaatttgatggaagcag

SEQ ID NO: 17282 - RNA, 20 nt, synthetic construct
  source 1..20: mol_type = other RNA
ccacctccatatatcctgct

SEQ ID NO: 17283 - RNA, 20 nt, synthetic construct
  source 1..20: mol_type = other RNA
acaatgcccactaaaggtcc

SEQ ID NO: 17284 - RNA, 20 nt, synthetic construct
  source 1..20: mol_type = other RNA
accatgcaattctatcattc

SEQ ID NO: 17285 - RNA, 20 nt, synthetic construct
  source 1..20: mol_type = other RNA
atcattctatcctccattcc

SEQ ID NO: 17286 - RNA, 20 nt, synthetic construct
  source 1..20: mol_type = other RNA
gggaatggaggatagaatga

SEQ ID NO: 17287 - RNA, 20 nt, synthetic construct
  source 1..20: mol_type = other RNA
cttcagggaatggaggatag

SEQ ID NO: 17288 - RNA, 20 nt, synthetic construct
  source 1..20: mol_type = other RNA
atcctccattccctgaagtg

SEQ ID NO: 17289 - RNA, 20 nt, synthetic construct
  source 1..20: mol_type = other RNA
ctgaagtgaaatttgtgttt

SEQ ID NO: 17290 - RNA, 20 nt, synthetic construct
  source 1..20: mol_type = other RNA
tgtcaaaaatggcaaacaca

SEQ ID NO: 17291 - RNA, 20 nt, synthetic construct
  source 1..20: mol_type = other RNA
gattcgtgtcaaaaatggca

SEQ ID NO: 17292 - RNA, 20 nt, synthetic construct
  source 1..20: mol_type = other RNA
ggctgggtgcagtggctcag

SEQ ID NO: 17293 - RNA, 20 nt, synthetic construct
  source 1..20: mol_type = other RNA
agaccagcctggctaacatg

SEQ ID NO: 17294 - RNA, 20 nt, synthetic construct
  source 1..20: mol_type = other RNA
tagagatggggttttgccat

SEQ ID NO: 17295 - RNA, 20 nt, synthetic construct
  source 1..20: mol_type = other RNA
aactacttgggaggctgagg

SEQ ID NO: 17296 - RNA, 20 nt, synthetic construct
  source 1..20: mol_type = other RNA
cctgcctcagcctcccaagt

SEQ ID NO: 17297 - RNA, 20 nt, synthetic construct
  source 1..20: mol_type = other RNA
cggctcacagcaaactctga

SEQ ID NO: 17298 - RNA, 20 nt, synthetic construct
  source 1..20: mol_type = other RNA
gagtttgctgtgagccgaga

SEQ ID NO: 17299 - RNA, 20 nt, synthetic construct
  source 1..20: mol_type = other RNA
ttttttttttttttgagatt

SEQ ID NO: 17300 - RNA, 20 nt, synthetic construct
  source 1..20: mol_type = other RNA
tctttttttttttttttgag

SEQ ID NO: 17301 - RNA, 20 nt, synthetic construct
  source 1..20: mol_type = other RNA
tcttcttttttttttttttt

SEQ ID NO: 17302 - RNA, 20 nt, synthetic construct
  source 1..20: mol_type = other RNA
tcttcttctttttttttttt

SEQ ID NO: 17303 - RNA, 20 nt, synthetic construct
  source 1..20: mol_type = other RNA
tcttcttcttcttttttttt

SEQ ID NO: 17304 - RNA, 20 nt, synthetic construct
  source 1..20: mol_type = other RNA
tttcttcttcttcttctttt

SEQ ID NO: 17305 - RNA, 20 nt, synthetic construct
  source 1..20: mol_type = other RNA
tcttttcttcttcttcttct

SEQ ID NO: 17306 - RNA, 20 nt, synthetic construct
  source 1..20: mol_type = other RNA
tcttcttcttttcttcttct

SEQ ID NO: 17307 - RNA, 20 nt, synthetic construct
  source 1..20: mol_type = other RNA
tcctcttcttcttttcttct

SEQ ID NO: 17308 - RNA, 20 nt, synthetic construct
  source 1..20: mol_type = other RNA
tcttcctcttcttcttttct

SEQ ID NO: 17309 - RNA, 20 nt, synthetic construct
  source 1..20: mol_type = other RNA
tcttcttcctcttcttcttt

SEQ ID NO: 17310 - RNA, 20 nt, synthetic construct
  source 1..20: mol_type = other RNA
tcttcttcttcttcctcttc

SEQ ID NO: 17311 - RNA, 20 nt, synthetic construct
  source 1..20: mol_type = other RNA
tcctcttcttcttcttcctc

SEQ ID NO: 17312 - RNA, 20 nt, synthetic construct
  source 1..20: mol_type = other RNA
tcttcctcttcttcttcttc

SEQ ID NO: 17313 - RNA, 20 nt, synthetic construct
  source 1..20: mol_type = other RNA
tcttcttcctcttcttcttc

SEQ ID NO: 17314 - RNA, 20 nt, synthetic construct
  source 1..20: mol_type = other RNA
tcttcttcttcctcttcttc

SEQ ID NO: 17315 - RNA, 20 nt, synthetic construct
  source 1..20: mol_type = other RNA
tcttcttcttcttcctcttc

SEQ ID NO: 17316 - RNA, 20 nt, synthetic construct
  source 1..20: mol_type = other RNA
tcttcttcttcttcttcctc

SEQ ID NO: 17317 - RNA, 20 nt, synthetic construct
  source 1..20: mol_type = other RNA
tcttcttcttcttcttcttc

SEQ ID NO: 17318 - RNA, 20 nt, synthetic construct
  source 1..20: mol_type = other RNA
tcttcctcttcttcttcttc

SEQ ID NO: 17319 - RNA, 20 nt, synthetic construct
  source 1..20: mol_type = other RNA
tcctcctcctcctcctcctc

SEQ ID NO: 17320 - RNA, 20 nt, synthetic construct
  source 1..20: mol_type = other RNA
tcctcctcctcctcctcctc

SEQ ID NO: 17321 - RNA, 20 nt, synthetic construct
  source 1..20: mol_type = other RNA
tcttcctcctcctcctcctc

SEQ ID NO: 17322 - RNA, 20 nt, synthetic construct
  source 1..20: mol_type = other RNA
tcttcttcctcctcctcctc

SEQ ID NO: 17323 - RNA, 20 nt, synthetic construct
  source 1..20: mol_type = other RNA
tcttcttcttcctcctcctc

SEQ ID NO: 17324 - RNA, 20 nt, synthetic construct
  source 1..20: mol_type = other RNA
tcttcttcttcttcctcctc

SEQ ID NO: 17325 - RNA, 20 nt, synthetic construct
  source 1..20: mol_type = other RNA
tcttcttcttcttcttcctc

SEQ ID NO: 17326 - RNA, 20 nt, synthetic construct
  source 1..20: mol_type = other RNA
tcttcttcttcttcttcttc

SEQ ID NO: 17327 - RNA, 20 nt, synthetic construct
  source 1..20: mol_type = other RNA
tcttcttcttcttcttcttc

SEQ ID NO: 17328 - RNA, 20 nt, synthetic construct
  source 1..20: mol_type = other RNA
tcttcttcttcttcttcttc

SEQ ID NO: 17329 - RNA, 20 nt, synthetic construct
  source 1..20: mol_type = other RNA
tcttcttcttcttcttcttc

SEQ ID NO: 17330 - RNA, 20 nt, synthetic construct
  source 1..20: mol_type = other RNA
tcttcttcttcttcttcttc

SEQ ID NO: 17331 - RNA, 20 nt, synthetic construct
  source 1..20: mol_type = other RNA
tcttcttcttcttcttcttc

SEQ ID NO: 17332 - RNA, 20 nt, synthetic construct
  source 1..20: mol_type = other RNA
tcttcttcttcttcttcttc

SEQ ID NO: 17333 - RNA, 20 nt, synthetic construct
  source 1..20: mol_type = other RNA
tcttcttcttcttcttcttc

SEQ ID NO: 17334 - RNA, 20 nt, synthetic construct
  source 1..20: mol_type = other RNA
tcttcttcttcttcttcttc

SEQ ID NO: 17335 - RNA, 20 nt, synthetic construct
  source 1..20: mol_type = other RNA
tcttcttcttcttcttcttc

SEQ ID NO: 17336 - RNA, 20 nt, synthetic construct
  source 1..20: mol_type = other RNA
tcttcttcttcttcttcttc

SEQ ID NO: 17337 - RNA, 20 nt, synthetic construct
  source 1..20: mol_type = other RNA
tcttcttcttcttcttcttc

SEQ ID NO: 17338 - RNA, 20 nt, synthetic construct
  source 1..20: mol_type = other RNA
tcttcttcttcttcttcttc

SEQ ID NO: 17339 - RNA, 20 nt, synthetic construct
  source 1..20: mol_type = other RNA
tcttcttcttcttcttcttc

SEQ ID NO: 17340 - RNA, 20 nt, synthetic construct
  source 1..20: mol_type = other RNA
tcttcttcttcttcttcttc

SEQ ID NO: 17341 - RNA, 20 nt, synthetic construct
  source 1..20: mol_type = other RNA
tcttcttcttcttcttcttc

SEQ ID NO: 17342 - RNA, 20 nt, synthetic construct
  source 1..20: mol_type = other RNA
attttcttcttcttcttctt

SEQ ID NO: 17343 - RNA, 20 nt, synthetic construct
  source 1..20: mol_type = other RNA
tacaggctagtactcatata

SEQ ID NO: 17344 - RNA, 20 nt, synthetic construct
  source 1..20: mol_type = other RNA
gaaaactggtgcttagaacc

SEQ ID NO: 17345 - RNA, 20 nt, synthetic construct
  source 1..20: mol_type = other RNA
aagcaccagttttctgaagg

SEQ ID NO: 17346 - RNA, 20 nt, synthetic construct
  source 1..20: mol_type = other RNA
gaagggatatgggttgtcag

SEQ ID NO: 17347 - RNA, 20 nt, synthetic construct
  source 1..20: mol_type = other RNA
tgcttttactctgcctgaca

SEQ ID NO: 17348 - RNA, 20 nt, synthetic construct
  source 1..20: mol_type = other RNA
tgactctcatctgcattcct

SEQ ID NO: 17349 - RNA, 20 nt, synthetic construct
  source 1..20: mol_type = other RNA
tactcacttatggcaagagg

SEQ ID NO: 17350 - RNA, 20 nt, synthetic construct
  source 1..20: mol_type = other RNA
atattattcatactcactta

SEQ ID NO: 17351 - RNA, 20 nt, synthetic construct
  source 1..20: mol_type = other RNA
acatgtgcaaacagtttttc

SEQ ID NO: 17352 - RNA, 20 nt, synthetic construct
  source 1..20: mol_type = other RNA
aaactatctcaggttgtact

SEQ ID NO: 17353 - RNA, 20 nt, synthetic construct
  source 1..20: mol_type = other RNA
ctttctaaactatctcaggt

SEQ ID NO: 17354 - RNA, 20 nt, synthetic construct
  source 1..20: mol_type = other RNA
tagacttaagggcaaagagt

SEQ ID NO: 17355 - RNA, 20 nt, synthetic construct
  source 1..20: mol_type = other RNA
acagcagtcttgctaaactg

SEQ ID NO: 17356 - RNA, 20 nt, synthetic construct
  source 1..20: mol_type = other RNA
cattattacctaacctagaa

SEQ ID NO: 17357 - RNA, 20 nt, synthetic construct
  source 1..20: mol_type = other RNA
aggttaggtaataatgagaa

SEQ ID NO: 17358 - RNA, 20 nt, synthetic construct
  source 1..20: mol_type = other RNA
ccacaaatactttctcatta

SEQ ID NO: 17359 - RNA, 20 nt, synthetic construct
  source 1..20: mol_type = other RNA
tggagctccttttctccaca

SEQ ID NO: 17360 - RNA, 20 nt, synthetic construct
  source 1..20: mol_type = other RNA
gtgtgtattcctggagctcc

SEQ ID NO: 17361 - RNA, 20 nt, synthetic construct
  source 1..20: mol_type = other RNA
gccagagacttgaagagact

SEQ ID NO: 17362 - RNA, 20 nt, synthetic construct
  source 1..20: mol_type = other RNA
gttcagccagagacttgaag

SEQ ID NO: 17363 - RNA, 20 nt, synthetic construct
  source 1..20: mol_type = other RNA
agtctctggctgaacagaaa

SEQ ID NO: 17364 - RNA, 20 nt, synthetic construct
  source 1..20: mol_type = other RNA
gtgcatacacagctttctgt

SEQ ID NO: 17365 - RNA, 20 nt, synthetic construct
  source 1..20: mol_type = other RNA
ctctggaaactctttctgtg

SEQ ID NO: 17366 - RNA, 20 nt, synthetic construct
  source 1..20: mol_type = other RNA
cctttctctctggaaactct

SEQ ID NO: 17367 - RNA, 20 nt, synthetic construct
  source 1..20: mol_type = other RNA
ttgttctcctttctctctgg

SEQ ID NO: 17368 - RNA, 20 nt, synthetic construct
  source 1..20: mol_type = other RNA
agagagaaaggagaacaaag

SEQ ID NO: 17369 - RNA, 20 nt, synthetic construct
  source 1..20: mol_type = other RNA
ccagtagctgttctttgttc

SEQ ID NO: 17370 - RNA, 20 nt, synthetic construct
  source 1..20: mol_type = other RNA
ttccccagtagctgttcttt

SEQ ID NO: 17371 - RNA, 20 nt, synthetic construct
  source 1..20: mol_type = other RNA
ccagcagttgttctttcccc

SEQ ID NO: 17372 - RNA, 20 nt, synthetic construct
  source 1..20: mol_type = other RNA
ttgagctcactgttccccag

SEQ ID NO: 17373 - RNA, 20 nt, synthetic construct
  source 1..20: mol_type = other RNA
atgaagtgtctctcctcagg

SEQ ID NO: 17374 - RNA, 20 nt, synthetic construct
  source 1..20: mol_type = other RNA
ttgaacatcttgggcattca

SEQ ID NO: 17375 - RNA, 20 nt, synthetic construct
  source 1..20: mol_type = other RNA
gcaaagaccccaaaaaacca

SEQ ID NO: 17376 - RNA, 20 nt, synthetic construct
  source 1..20: mol_type = other RNA
actcctgaagtatggttttt

SEQ ID NO: 17377 - RNA, 20 nt, synthetic construct
  source 1..20: mol_type = other RNA
ggagtagaattaatgcattc

SEQ ID NO: 17378 - RNA, 20 nt, synthetic construct
  source 1..20: mol_type = other RNA
aggaatgcattaattctact

SEQ ID NO: 17379 - RNA, 20 nt, synthetic construct
  source 1..20: mol_type = other RNA
ggagtagactttattctagg

SEQ ID NO: 17380 - RNA, 20 nt, synthetic construct
  source 1..20: mol_type = other RNA
tagaataaagtctactccag

SEQ ID NO: 17381 - RNA, 20 nt, synthetic construct
  source 1..20: mol_type = other RNA
agggtgtttctggagtagac

SEQ ID NO: 17382 - RNA, 20 nt, synthetic construct
  source 1..20: mol_type = other RNA
aagcttttctagggtgtttc

SEQ ID NO: 17383 - RNA, 20 nt, synthetic construct
  source 1..20: mol_type = other RNA
gacaggcaattaatttactt

SEQ ID NO: 17384 - RNA, 20 nt, synthetic construct
  source 1..20: mol_type = other RNA
tctgacaggcaattaattta

SEQ ID NO: 17385 - RNA, 20 nt, synthetic construct
  source 1..20: mol_type = other RNA
gaggtaaacaacaaaattaa

SEQ ID NO: 17386 - RNA, 20 nt, synthetic construct
  source 1..20: mol_type = other RNA
cctggttatgggtcacacta

SEQ ID NO: 17387 - RNA, 20 nt, synthetic construct
  source 1..20: mol_type = other RNA
gttatttttatcatttttgg

SEQ ID NO: 17388 - RNA, 20 nt, synthetic construct
  source 1..20: mol_type = other RNA
ttaaatccttgaacacaatt

SEQ ID NO: 17389 - RNA, 20 nt, synthetic construct
  source 1..20: mol_type = other RNA
aggatttaaagaaagcgtgg

SEQ ID NO: 17390 - RNA, 20 nt, synthetic construct
  source 1..20: mol_type = other RNA
tgtccacgctttctttaaat

SEQ ID NO: 17391 - RNA, 20 nt, synthetic construct
  source 1..20: mol_type = other RNA
gttgatattatccatttatt

SEQ ID NO: 17392 - RNA, 20 nt, synthetic construct
  source 1..20: mol_type = other RNA
ttctgttgatattatccatt

SEQ ID NO: 17393 - RNA, 20 nt, synthetic construct
  source 1..20: mol_type = other RNA
tgactctccatttggtcctt

SEQ ID NO: 17394 - RNA, 20 nt, synthetic construct
  source 1..20: mol_type = other RNA
gttcttgactctccatttgg

SEQ ID NO: 17395 - RNA, 20 nt, synthetic construct
  source 1..20: mol_type = other RNA
cattaaagagatgtcttttt

SEQ ID NO: 17396 - RNA, 20 nt, synthetic construct
  source 1..20: mol_type = other RNA
agttagctttatcatctgta

SEQ ID NO: 17397 - RNA, 20 nt, synthetic construct
  source 1..20: mol_type = other RNA
caggctttgtataagcgtgc

SEQ ID NO: 17398 - RNA, 20 nt, synthetic construct
  source 1..20: mol_type = other RNA
tagatgtccttgaggctctg

SEQ ID NO: 17399 - RNA, 20 nt, synthetic construct
  source 1..20: mol_type = other RNA
tctgtgacttgctttaaaca

SEQ ID NO: 17400 - RNA, 20 nt, synthetic construct
  source 1..20: mol_type = other RNA
cttcctctgtgacttgcttt

SEQ ID NO: 17401 - RNA, 20 nt, synthetic construct
  source 1..20: mol_type = other RNA
aatatctctttcccttcctc

SEQ ID NO: 17402 - RNA, 20 nt, synthetic construct
  source 1..20: mol_type = other RNA
gttccaatatctctttccct

SEQ ID NO: 17403 - RNA, 20 nt, synthetic construct
  source 1..20: mol_type = other RNA
agtattttttctgttccaat

SEQ ID NO: 17404 - RNA, 20 nt, synthetic construct
  source 1..20: mol_type = other RNA
atatttagaaagtcatcagc

SEQ ID NO: 17405 - RNA, 20 nt, synthetic construct
  source 1..20: mol_type = other RNA
aaatatggaaaaaatgataa

SEQ ID NO: 17406 - RNA, 20 nt, synthetic construct
  source 1..20: mol_type = other RNA
tgactatgtgagtttatcat

SEQ ID NO: 17407 - RNA, 20 nt, synthetic construct
  source 1..20: mol_type = other RNA
atctttgattatggacaatt

SEQ ID NO: 17408 - RNA, 20 nt, synthetic construct
  source 1..20: mol_type = other RNA
aataagattttactttctat

SEQ ID NO: 17409 - RNA, 20 nt, synthetic construct
  source 1..20: mol_type = other RNA
cttgggcttcaaataagatt

SEQ ID NO: 17410 - RNA, 20 nt, synthetic construct
  source 1..20: mol_type = other RNA
gatgagaaggcatcagtcat

SEQ ID NO: 17411 - RNA, 20 nt, synthetic construct
  source 1..20: mol_type = other RNA
gatttgtgttgtttctgatg

SEQ ID NO: 17412 - RNA, 20 nt, synthetic construct
  source 1..20: mol_type = other RNA
catcagaaacaacacaaatc

SEQ ID NO: 17413 - RNA, 20 nt, synthetic construct
  source 1..20: mol_type = other RNA
attgtttctgatttgtgttg

SEQ ID NO: 17414 - RNA, 20 nt, synthetic construct
  source 1..20: mol_type = other RNA
taccactctaaaggtgttat

SEQ ID NO: 17415 - RNA, 20 nt, synthetic construct
  source 1..20: mol_type = other RNA
tcttaccactctaaaggtgt

SEQ ID NO: 17416 - RNA, 20 nt, synthetic construct
  source 1..20: mol_type = other RNA
gatttgatctttttttcttc

SEQ ID NO: 17417 - RNA, 20 nt, synthetic construct
  source 1..20: mol_type = other RNA
tccttaccactctaaacgtg

SEQ ID NO: 17418 - RNA, 20 nt, synthetic construct
  source 1..20: mol_type = other RNA
gatttgatcttgttttcctc

SEQ ID NO: 17419 - RNA, 20 nt, synthetic construct
  source 1..20: mol_type = other RNA
attgtttctgatttgatctt

SEQ ID NO: 17420 - RNA, 20 nt, synthetic construct
  source 1..20: mol_type = other RNA
tacactctaaaggtgttatt

SEQ ID NO: 17421 - RNA, 20 nt, synthetic construct
  source 1..20: mol_type = other RNA
ttcttacactctaaaggtgt

SEQ ID NO: 17422 - RNA, 20 nt, synthetic construct
  source 1..20: mol_type = other RNA
tgatttgatctttttttctt

SEQ ID NO: 17423 - RNA, 20 nt, synthetic construct
  source 1..20: mol_type = other RNA
gttgttcctgatttgatctt

SEQ ID NO: 17424 - RNA, 20 nt, synthetic construct
  source 1..20: mol_type = other RNA
taccactctgaaggcgttat

SEQ ID NO: 17425 - RNA, 20 nt, synthetic construct
  source 1..20: mol_type = other RNA
ttcttaccactctgaaggcg

SEQ ID NO: 17426 - RNA, 20 nt, synthetic construct
  source 1..20: mol_type = other RNA
gagtggtaagaaggaaaaca

SEQ ID NO: 17427 - RNA, 20 nt, synthetic construct
  source 1..20: mol_type = other RNA
gattttatcttgttttcctt

SEQ ID NO: 17428 - RNA, 20 nt, synthetic construct
  source 1..20: mol_type = other RNA
ttgtttctgattttatcttg

SEQ ID NO: 17429 - RNA, 20 nt, synthetic construct
  source 1..20: mol_type = other RNA
tactactctaaaggtgttat

SEQ ID NO: 17430 - RNA, 20 nt, synthetic construct
  source 1..20: mol_type = other RNA
tcttactactctaaaggtgt

SEQ ID NO: 17431 - RNA, 20 nt, synthetic construct
  source 1..20: mol_type = other RNA
tcttcttactactctaaagg

SEQ ID NO: 17432 - RNA, 20 nt, synthetic construct
  source 1..20: mol_type = other RNA
gacctgatcttttcttcttc

SEQ ID NO: 17433 - RNA, 20 nt, synthetic construct
  source 1..20: mol_type = other RNA
attttttctgacctgatctt

SEQ ID NO: 17434 - RNA, 20 nt, synthetic construct
  source 1..20: mol_type = other RNA
tagcatattattccattttt

SEQ ID NO: 17435 - RNA, 20 nt, synthetic construct
  source 1..20: mol_type = other RNA
tcttagcatattattccatt

SEQ ID NO: 17436 - RNA, 20 nt, synthetic construct
  source 1..20: mol_type = other RNA
gacttgatctttttttttct

SEQ ID NO: 17437 - RNA, 20 nt, synthetic construct
  source 1..20: mol_type = other RNA
attgtttctgacttgatctt

SEQ ID NO: 17438 - RNA, 20 nt, synthetic construct
  source 1..20: mol_type = other RNA
ctctaaaggtgttattccat

SEQ ID NO: 17439 - RNA, 20 nt, synthetic construct
  source 1..20: mol_type = other RNA
tttcactctaaaggtgttat

SEQ ID NO: 17440 - RNA, 20 nt, synthetic construct
  source 1..20: mol_type = other RNA
ttcttttcactctaaaggtg

SEQ ID NO: 17441 - RNA, 20 nt, synthetic construct
  source 1..20: mol_type = other RNA
gtggaattgtttgctgtgca

SEQ ID NO: 17442 - RNA, 20 nt, synthetic construct
  source 1..20: mol_type = other RNA
ttttcagtggaattgtttgc

SEQ ID NO: 17443 - RNA, 20 nt, synthetic construct
  source 1..20: mol_type = other RNA
actgaaaatgaatgttacgt

SEQ ID NO: 17444 - RNA, 20 nt, synthetic construct
  source 1..20: mol_type = other RNA
ttgtttttaggaggacagaa

SEQ ID NO: 17445 - RNA, 20 nt, synthetic construct
  source 1..20: mol_type = other RNA
gtcctcctaaaaacaaagaa

SEQ ID NO: 17446 - RNA, 20 nt, synthetic construct
  source 1..20: mol_type = other RNA
tttatttgttctttgttttt

SEQ ID NO: 17447 - RNA, 20 nt, synthetic construct
  source 1..20: mol_type = other RNA
tcagcaggattatgtaataa

SEQ ID NO: 17448 - RNA, 20 nt, synthetic construct
  source 1..20: mol_type = other RNA
catcttttattacataatcc

SEQ ID NO: 17449 - RNA, 20 nt, synthetic construct
  source 1..20: mol_type = other RNA
ttcacatcttttattacata

SEQ ID NO: 17450 - RNA, 20 nt, synthetic construct
  source 1..20: mol_type = other RNA
acttacatagcattctttca

SEQ ID NO: 17451 - RNA, 20 nt, synthetic construct
  source 1..20: mol_type = other RNA
tctacttacatagcattctt

SEQ ID NO: 17452 - RNA, 20 nt, synthetic construct
  source 1..20: mol_type = other RNA
catatggtattatttttctt

SEQ ID NO: 17453 - RNA, 20 nt, synthetic construct
  source 1..20: mol_type = other RNA
tttgcatattgtgttaaatt

SEQ ID NO: 17454 - RNA, 20 nt, synthetic construct
  source 1..20: mol_type = other RNA
caccaatgttatgtagtata

SEQ ID NO: 17455 - RNA, 20 nt, synthetic construct
  source 1..20: mol_type = other RNA
tctcaccaatgttatgtagt

SEQ ID NO: 17456 - RNA, 20 nt, synthetic construct
  source 1..20: mol_type = other RNA
aattttcttctcaccaatgt

SEQ ID NO: 17457 - RNA, 20 nt, synthetic construct
  source 1..20: mol_type = other RNA
caaaactgatctttagtttc

SEQ ID NO: 17458 - RNA, 20 nt, synthetic construct
  source 1..20: mol_type = other RNA
gcttgggtgtgggttgaaac

SEQ ID NO: 17459 - RNA, 20 nt, synthetic construct
  source 1..20: mol_type = other RNA
acccacacccaagcagaatt

SEQ ID NO: 17460 - RNA, 20 nt, synthetic construct
  source 1..20: mol_type = other RNA
agaaaagactgcaggaattc

SEQ ID NO: 17461 - RNA, 20 nt, synthetic construct
  source 1..20: mol_type = other RNA
tgcagtcttttcttgaaaac

SEQ ID NO: 17462 - RNA, 20 nt, synthetic construct
  source 1..20: mol_type = other RNA
gttaggttttcaagaaaaga

SEQ ID NO: 17463 - RNA, 20 nt, synthetic construct
  source 1..20: mol_type = other RNA
tgaaaacctaacagaatgta

SEQ ID NO: 17464 - RNA, 20 nt, synthetic construct
  source 1..20: mol_type = other RNA
agcatatacattctgttagg

SEQ ID NO: 17465 - RNA, 20 nt, synthetic construct
  source 1..20: mol_type = other RNA
ttttaaagattgtcttggtg

SEQ ID NO: 17466 - RNA, 20 nt, synthetic construct
  source 1..20: mol_type = other RNA
aagttttttattctttttaa

SEQ ID NO: 17467 - RNA, 20 nt, synthetic construct
  source 1..20: mol_type = other RNA
atattaccatatgcatctat

SEQ ID NO: 17468 - RNA, 20 nt, synthetic construct
  source 1..20: mol_type = other RNA
cataaagacacagtaatcaa

SEQ ID NO: 17469 - RNA, 20 nt, synthetic construct
  source 1..20: mol_type = other RNA
tgaatagctgggactacagg

SEQ ID NO: 17470 - RNA, 20 nt, synthetic construct
  source 1..20: mol_type = other RNA
ggaagctgaggtgggaggat

SEQ ID NO: 17471 - RNA, 20 nt, synthetic construct
  source 1..20: mol_type = other RNA
gcctccacctcatgggctcc

SEQ ID NO: 17472 - RNA, 20 nt, synthetic construct
  source 1..20: mol_type = other RNA
gtagcacaatcatggctcat

SEQ ID NO: 17473 - RNA, 20 nt, synthetic construct
  source 1..20: mol_type = other RNA
ctctctctctcaaacaaaca

SEQ ID NO: 17474 - RNA, 20 nt, synthetic construct
  source 1..20: mol_type = other RNA
gtttttgtttgcatatgttt

SEQ ID NO: 17475 - RNA, 20 nt, synthetic construct
  source 1..20: mol_type = other RNA
atacaggtagcaaagcaatt

SEQ ID NO: 17476 - RNA, 20 nt, synthetic construct
  source 1..20: mol_type = other RNA
tcattaaattgctttgctac

SEQ ID NO: 17477 - RNA, 20 nt, synthetic construct
  source 1..20: mol_type = other RNA
gaccaattttggaaaaaaat

SEQ ID NO: 17478 - RNA, 20 nt, synthetic construct
  source 1..20: mol_type = other RNA
aaaattggtctgaaacaact

SEQ ID NO: 17479 - RNA, 20 nt, synthetic construct
  source 1..20: mol_type = other RNA
atggctatccagttgtttca

SEQ ID NO: 17480 - RNA, 20 nt, synthetic construct
  source 1..20: mol_type = other RNA
agcgtcacatttgttatagt

SEQ ID NO: 17481 - RNA, 20 nt, synthetic construct
  source 1..20: mol_type = other RNA
gcctcagaattagctgttac

SEQ ID NO: 17482 - RNA, 20 nt, synthetic construct
  source 1..20: mol_type = other RNA
gaggctgaaatataagactg

SEQ ID NO: 17483 - RNA, 20 nt, synthetic construct
  source 1..20: mol_type = other RNA
tagcagtcttatatttcagc

SEQ ID NO: 17484 - RNA, 20 nt, synthetic construct
  source 1..20: mol_type = other RNA
ccaaggttataagatactat

SEQ ID NO: 17485 - RNA, 20 nt, synthetic construct
  source 1..20: mol_type = other RNA
ttctccaaggttataagata

SEQ ID NO: 17486 - RNA, 20 nt, synthetic construct
  source 1..20: mol_type = other RNA
ctcaaaaaatttttccttct

SEQ ID NO: 17487 - RNA, 20 nt, synthetic construct
  source 1..20: mol_type = other RNA
tccctcaaaaaatttttcct

SEQ ID NO: 17488 - RNA, 20 nt, synthetic construct
  source 1..20: mol_type = other RNA
ggttcttccctcaaaaaatt

SEQ ID NO: 17489 - RNA, 20 nt, synthetic construct
  source 1..20: mol_type = other RNA
tttacagttagtgttttctg

SEQ ID NO: 17490 - RNA, 20 nt, synthetic construct
  source 1..20: mol_type = other RNA
atgaatgtccacattatcat

SEQ ID NO: 17491 - RNA, 20 nt, synthetic construct
  source 1..20: mol_type = other RNA
ttgaataaaaacttatgctc

SEQ ID NO: 17492 - RNA, 20 nt, synthetic construct
  source 1..20: mol_type = other RNA
taacagtcatatttggtgag

SEQ ID NO: 17493 - RNA, 20 nt, synthetic construct
  source 1..20: mol_type = other RNA
agtgtgttacttacttattt

SEQ ID NO: 17494 - RNA, 20 nt, synthetic construct
  source 1..20: mol_type = other RNA
tccagtgtgttacttactta

SEQ ID NO: 17495 - RNA, 20 nt, synthetic construct
  source 1..20: mol_type = other RNA
atactctggatacaggccat

SEQ ID NO: 17496 - RNA, 20 nt, synthetic construct
  source 1..20: mol_type = other RNA
cccactcactaatcagagga

SEQ ID NO: 17497 - RNA, 20 nt, synthetic construct
  source 1..20: mol_type = other RNA
agcctgttgcccattttgat

SEQ ID NO: 17498 - RNA, 20 nt, synthetic construct
  source 1..20: mol_type = other RNA
cctaagaaatgactattcaa

SEQ ID NO: 17499 - RNA, 20 nt, synthetic construct
  source 1..20: mol_type = other RNA
taggagaagatgcacacaga

SEQ ID NO: 17500 - RNA, 20 nt, synthetic construct
  source 1..20: mol_type = other RNA
ggtgattgttggctctgtgt

SEQ ID NO: 17501 - RNA, 20 nt, synthetic construct
  source 1..20: mol_type = other RNA
gtgtcatcttatgagggtta

SEQ ID NO: 17502 - RNA, 20 nt, synthetic construct
  source 1..20: mol_type = other RNA
taatgatatccatgtacact

SEQ ID NO: 17503 - RNA, 20 nt, synthetic construct
  source 1..20: mol_type = other RNA
agctccaaatcggtgacacc

SEQ ID NO: 17504 - RNA, 20 nt, synthetic construct
  source 1..20: mol_type = other RNA
accagcatatgagagagtgg

SEQ ID NO: 17505 - RNA, 20 nt, synthetic construct
  source 1..20: mol_type = other RNA
aaatcatacaacaaattaaa

SEQ ID NO: 17506 - RNA, 20 nt, synthetic construct
  source 1..20: mol_type = other RNA
tataaagttcgataaatatg

SEQ ID NO: 17507 - RNA, 20 nt, synthetic construct
  source 1..20: mol_type = other RNA
ataaatatgcatctatccta

SEQ ID NO: 17508 - RNA, 20 nt, synthetic construct
  source 1..20: mol_type = other RNA
agaatagaattacaggtttg

SEQ ID NO: 17509 - RNA, 20 nt, synthetic construct
  source 1..20: mol_type = other RNA
attcttgaatatttaccccc

SEQ ID NO: 17510 - RNA, 20 nt, synthetic construct
  source 1..20: mol_type = other RNA
ttttggggggtaaatattca

SEQ ID NO: 17511 - RNA, 20 nt, synthetic construct
  source 1..20: mol_type = other RNA
tgaatatttaccccccaaaa

SEQ ID NO: 17512 - RNA, 20 nt, synthetic construct
  source 1..20: mol_type = other RNA
tagcagctttatgttttata

SEQ ID NO: 17513 - RNA, 20 nt, synthetic construct
  source 1..20: mol_type = other RNA
tttgatgaaaacattgaaat

SEQ ID NO: 17514 - RNA, 20 nt, synthetic construct
  source 1..20: mol_type = other RNA
ttttcttttgatgaaaacat

SEQ ID NO: 17515 - RNA, 20 nt, synthetic construct
  source 1..20: mol_type = other RNA
atgttttcatcaaaagaaaa

SEQ ID NO: 17516 - RNA, 20 nt, synthetic construct
  source 1..20: mol_type = other RNA
tcaaaagaaaatgaaaacta

SEQ ID NO: 17517 - RNA, 20 nt, synthetic construct
  source 1..20: mol_type = other RNA
tttgatgaaaccatttaaat

SEQ ID NO: 17518 - RNA, 20 nt, synthetic construct
  source 1..20: mol_type = other RNA
ttttcttttgatgaaaccat

SEQ ID NO: 17519 - RNA, 20 nt, synthetic construct
  source 1..20: mol_type = other RNA
tttttcattttcttttgatg

SEQ ID NO: 17520 - RNA, 20 nt, synthetic construct
  source 1..20: mol_type = other RNA
tcaaaagaaaatgaaaaaag

SEQ ID NO: 17521 - RNA, 20 nt, synthetic construct
  source 1..20: mol_type = other RNA
tttgtataaatatactggaa

SEQ ID NO: 17522 - RNA, 20 nt, synthetic construct
  source 1..20: mol_type = other RNA
agtatatttatacaaaggaa

SEQ ID NO: 17523 - RNA, 20 nt, synthetic construct
  source 1..20: mol_type = other RNA
ttgttgatgaatagtattcc

SEQ ID NO: 17524 - RNA, 20 nt, synthetic construct
  source 1..20: mol_type = other RNA
tcaacaaggaacaagttact

SEQ ID NO: 17525 - RNA, 20 nt, synthetic construct
  source 1..20: mol_type = other RNA
gagactatcagtaacttgtt

SEQ ID NO: 17526 - RNA, 20 nt, synthetic construct
  source 1..20: mol_type = other RNA
tgcttctgagactatcagta

SEQ ID NO: 17527 - RNA, 20 nt, synthetic construct
  source 1..20: mol_type = other RNA
ttaatatatttttgaggttt

SEQ ID NO: 17528 - RNA, 20 nt, synthetic construct
  source 1..20: mol_type = other RNA
ttccttaatatatttttgag

SEQ ID NO: 17529 - RNA, 20 nt, synthetic construct
  source 1..20: mol_type = other RNA
ataaactcacatgaatggac

SEQ ID NO: 17530 - RNA, 20 nt, synthetic construct
  source 1..20: mol_type = other RNA
tgtgagtttatagaaaacac

SEQ ID NO: 17531 - RNA, 20 nt, synthetic construct
  source 1..20: mol_type = other RNA
ccataaattgtgttttctat

SEQ ID NO: 17532 - RNA, 20 nt, synthetic construct
  source 1..20: mol_type = other RNA
ttcaccataaattgtgtttt

SEQ ID NO: 17533 - RNA, 20 nt, synthetic construct
  source 1..20: mol_type = other RNA
cacggccagtgtcaaatgct

SEQ ID NO: 17534 - RNA, 20 nt, synthetic construct
  source 1..20: mol_type = other RNA
ccaccccagaaactcccttg

SEQ ID NO: 17535 - RNA, 20 nt, synthetic construct
  source 1..20: mol_type = other RNA
ggggtggtgaaaatgttctg

SEQ ID NO: 17536 - RNA, 20 nt, synthetic construct
  source 1..20: mol_type = other RNA
gcattgtgagggcagtgtgg

SEQ ID NO: 17537 - RNA, 20 nt, synthetic construct
  source 1..20: mol_type = other RNA
catagagtgagatgcacaga

SEQ ID NO: 17538 - RNA, 20 nt, synthetic construct
  source 1..20: mol_type = other RNA
gttgagtatattttcacata

SEQ ID NO: 17539 - RNA, 20 nt, synthetic construct
  source 1..20: mol_type = other RNA
ggtgctacatcacttgatac

SEQ ID NO: 17540 - RNA, 20 nt, synthetic construct
  source 1..20: mol_type = other RNA
catgctccataatacgttcc

SEQ ID NO: 17541 - RNA, 20 nt, synthetic construct
  source 1..20: mol_type = other RNA
aagttttctcagacagccac

SEQ ID NO: 17542 - RNA, 20 nt, synthetic construct
  source 1..20: mol_type = other RNA
tgacctgtggctgtctgaga

SEQ ID NO: 17543 - RNA, 20 nt, synthetic construct
  source 1..20: mol_type = other RNA
cagacagccacaggtcatga

SEQ ID NO: 17544 - RNA, 20 nt, synthetic construct
  source 1..20: mol_type = other RNA
gagaggttggagcaacgttc

SEQ ID NO: 17545 - RNA, 20 nt, synthetic construct
  source 1..20: mol_type = other RNA
ccattatgcctcccaagaac

SEQ ID NO: 17546 - RNA, 20 nt, synthetic construct
  source 1..20: mol_type = other RNA
tgggaggcataatggggaag

SEQ ID NO: 17547 - RNA, 20 nt, synthetic construct
  source 1..20: mol_type = other RNA
ccaagattcctccagcctgg

SEQ ID NO: 17548 - RNA, 20 nt, synthetic construct
  source 1..20: mol_type = other RNA
tccagcctggggtcttcacc

SEQ ID NO: 17549 - RNA, 20 nt, synthetic construct
  source 1..20: mol_type = other RNA
cctgctgtgcctcttactgc

SEQ ID NO: 17550 - RNA, 20 nt, synthetic construct
  source 1..20: mol_type = other RNA
gactcatccatagccacttg

SEQ ID NO: 17551 - RNA, 20 nt, synthetic construct
  source 1..20: mol_type = other RNA
gatcccatagtctacctagc

SEQ ID NO: 17552 - RNA, 20 nt, synthetic construct
  source 1..20: mol_type = other RNA
ttcaactcatcacccattcc

SEQ ID NO: 17553 - RNA, 20 nt, synthetic construct
  source 1..20: mol_type = other RNA
actcatcacccattccttca

SEQ ID NO: 17554 - RNA, 20 nt, synthetic construct
  source 1..20: mol_type = other RNA
ttcagtcccagagtggctgc

SEQ ID NO: 17555 - RNA, 20 nt, synthetic construct
  source 1..20: mol_type = other RNA
gtcccagagtggctgcagcc

SEQ ID NO: 17556 - RNA, 20 nt, synthetic construct
  source 1..20: mol_type = other RNA
tgggcacgacctcctctcct

SEQ ID NO: 17557 - RNA, 20 nt, synthetic construct
  source 1..20: mol_type = other RNA
ctaggatgggttcatgggca

SEQ ID NO: 17558 - RNA, 20 nt, synthetic construct
  source 1..20: mol_type = other RNA
ctggaaaactagctcccagg

SEQ ID NO: 17559 - RNA, 20 nt, synthetic construct
  source 1..20: mol_type = other RNA
agggaagcttttataagtcc

SEQ ID NO: 17560 - RNA, 20 nt, synthetic construct
  source 1..20: mol_type = other RNA
tgattattttatattgcaaa

SEQ ID NO: 17561 - RNA, 20 nt, synthetic construct
  source 1..20: mol_type = other RNA
catgccagcccccttactct

SEQ ID NO: 17562 - RNA, 20 nt, synthetic construct
  source 1..20: mol_type = other RNA
ccaaggaagaagtggcatcc

SEQ ID NO: 17563 - RNA, 20 nt, synthetic construct
  source 1..20: mol_type = other RNA
tccttggggaaatgtatttg

SEQ ID NO: 17564 - RNA, 20 nt, synthetic construct
  source 1..20: mol_type = other RNA
ttggggaaatgtatttgagt

SEQ ID NO: 17565 - RNA, 20 nt, synthetic construct
  source 1..20: mol_type = other RNA
aacttacatattactatata

SEQ ID NO: 17566 - RNA, 20 nt, synthetic construct
  source 1..20: mol_type = other RNA
aaatctgtgtcatttattct

SEQ ID NO: 17567 - RNA, 20 nt, synthetic construct
  source 1..20: mol_type = other RNA
tccagaataaatgacacaga

SEQ ID NO: 17568 - RNA, 20 nt, synthetic construct
  source 1..20: mol_type = other RNA
gccaaatactttcctccaga

SEQ ID NO: 17569 - RNA, 20 nt, synthetic construct
  source 1..20: mol_type = other RNA
ggaggaaagtatttggcaga

SEQ ID NO: 17570 - RNA, 20 nt, synthetic construct
  source 1..20: mol_type = other RNA
ccttctgccaaatactttcc

SEQ ID NO: 17571 - RNA, 20 nt, synthetic construct
  source 1..20: mol_type = other RNA
tttcaccttctgccaaatac

SEQ ID NO: 17572 - RNA, 20 nt, synthetic construct
  source 1..20: mol_type = other RNA
gatcctttcttgtacagaca

SEQ ID NO: 17573 - RNA, 20 nt, synthetic construct
  source 1..20: mol_type = other RNA
tgtacagacatgtattatct

SEQ ID NO: 17574 - RNA, 20 nt, synthetic construct
  source 1..20: mol_type = other RNA
tagagagcatatactacttt

SEQ ID NO: 17575 - RNA, 20 nt, synthetic construct
  source 1..20: mol_type = other RNA
acttttaaacaactgtggac

SEQ ID NO: 17576 - RNA, 20 nt, synthetic construct
  source 1..20: mol_type = other RNA
gcttcaacttttaaacaact

SEQ ID NO: 17577 - RNA, 20 nt, synthetic construct
  source 1..20: mol_type = other RNA
cattataccacaataatatt

SEQ ID NO: 17578 - RNA, 20 nt, synthetic construct
  source 1..20: mol_type = other RNA
aaggcacttgttaacacttt

SEQ ID NO: 17579 - RNA, 20 nt, synthetic construct
  source 1..20: mol_type = other RNA
agggcacttagcgccctcta

SEQ ID NO: 17580 - RNA, 20 nt, synthetic construct
  source 1..20: mol_type = other RNA
cccatctctggtgacctgtg

SEQ ID NO: 17581 - RNA, 20 nt, synthetic construct
  source 1..20: mol_type = other RNA
aaacaacacaggtcaccaga

SEQ ID NO: 17582 - RNA, 20 nt, synthetic construct
  source 1..20: mol_type = other RNA
tggtcaggccactgcaaatt

SEQ ID NO: 17583 - RNA, 20 nt, synthetic construct
  source 1..20: mol_type = other RNA
tgcagtagttcctggtcagg

SEQ ID NO: 17584 - RNA, 20 nt, synthetic construct
  source 1..20: mol_type = other RNA
cccttggtgttacaccatgg

SEQ ID NO: 17585 - RNA, 20 nt, synthetic construct
  source 1..20: mol_type = other RNA
gtcactggacatcgtgtcag

SEQ ID NO: 17586 - RNA, 20 nt, synthetic construct
  source 1..20: mol_type = other RNA
gaaggagcctctgtgcttgg

SEQ ID NO: 17587 - RNA, 20 nt, synthetic construct
  source 1..20: mol_type = other RNA
taccttgttcagaaggagcc

SEQ ID NO: 17588 - RNA, 20 nt, synthetic construct
  source 1..20: mol_type = other RNA
gaacaaggtaagaaatttgt

SEQ ID NO: 17589 - RNA, 20 nt, synthetic construct
  source 1..20: mol_type = other RNA
tcccagtatatagatgtcta

SEQ ID NO: 17590 - RNA, 20 nt, synthetic construct
  source 1..20: mol_type = other RNA
atggtttttcatcccagtat

SEQ ID NO: 17591 - RNA, 20 nt, synthetic construct
  source 1..20: mol_type = other RNA
gcatcagtaagattttccat

SEQ ID NO: 17592 - RNA, 20 nt, synthetic construct
  source 1..20: mol_type = other RNA
gtggtacactggagggttgg

SEQ ID NO: 17593 - RNA, 20 nt, synthetic construct
  source 1..20: mol_type = other RNA
tccacattgcagaccctcaa

SEQ ID NO: 17594 - RNA, 20 nt, synthetic construct
  source 1..20: mol_type = other RNA
ggatcccccagagagggcgc

SEQ ID NO: 17595 - RNA, 20 nt, synthetic construct
  source 1..20: mol_type = other RNA
taaagacactgcctcctcac

SEQ ID NO: 17596 - RNA, 20 nt, synthetic construct
  source 1..20: mol_type = other RNA
taaagacaccgtgcccttcc

SEQ ID NO: 17597 - RNA, 20 nt, synthetic construct
  source 1..20: mol_type = other RNA
gtgtcctagccaaaatggat

SEQ ID NO: 17598 - RNA, 20 nt, synthetic construct
  source 1..20: mol_type = other RNA
catatttggcaggctgttag

SEQ ID NO: 17599 - RNA, 20 nt, synthetic construct
  source 1..20: mol_type = other RNA
aacagcctgccaaatatgtg

SEQ ID NO: 17600 - RNA, 20 nt, synthetic construct
  source 1..20: mol_type = other RNA
aagccaataagcctttccag

SEQ ID NO: 17601 - RNA, 20 nt, synthetic construct
  source 1..20: mol_type = other RNA
agtgatttaaagtagacttt

SEQ ID NO: 17602 - RNA, 20 nt, synthetic construct
  source 1..20: mol_type = other RNA
ttgcaatctacagtttgcag

SEQ ID NO: 17603 - RNA, 20 nt, synthetic construct
  source 1..20: mol_type = other RNA
taagaaactgcaaactgtag

SEQ ID NO: 17604 - RNA, 20 nt, synthetic construct
  source 1..20: mol_type = other RNA
taagaacatggcctttgagt

SEQ ID NO: 17605 - RNA, 20 nt, synthetic construct
  source 1..20: mol_type = other RNA
ctaggatatcatactcaaag

SEQ ID NO: 17606 - RNA, 20 nt, synthetic construct
  source 1..20: mol_type = other RNA
attgtcctggggctgcatag

SEQ ID NO: 17607 - RNA, 20 nt, synthetic construct
  source 1..20: mol_type = other RNA
ttggttacctcctgctatgc

SEQ ID NO: 17608 - RNA, 20 nt, synthetic construct
  source 1..20: mol_type = other RNA
caggctctgttcacctcagc

SEQ ID NO: 17609 - RNA, 20 nt, synthetic construct
  source 1..20: mol_type = other RNA
aagctgaggtgaacagagcc

SEQ ID NO: 17610 - RNA, 20 nt, synthetic construct
  source 1..20: mol_type = other RNA
aacttcaaagctgaggtgaa

SEQ ID NO: 17611 - RNA, 20 nt, synthetic construct
  source 1..20: mol_type = other RNA
cctcagctttgaagttagaa

SEQ ID NO: 17612 - RNA, 20 nt, synthetic construct
  source 1..20: mol_type = other RNA
aggtgttcttgcctcttctt

SEQ ID NO: 17613 - RNA, 20 nt, synthetic construct
  source 1..20: mol_type = other RNA
tgagaagaagaggcaagaac

SEQ ID NO: 17614 - RNA, 20 nt, synthetic construct
  source 1..20: mol_type = other RNA
tgcctcttcttctcatgaaa

SEQ ID NO: 17615 - RNA, 20 nt, synthetic construct
  source 1..20: mol_type = other RNA
tctcatgaaacctgcattgg

SEQ ID NO: 17616 - RNA, 20 nt, synthetic construct
  source 1..20: mol_type = other RNA
catgaaacctgcattggcag

SEQ ID NO: 17617 - RNA, 20 nt, synthetic construct
  source 1..20: mol_type = other RNA
gtagactcactgccaatgca

SEQ ID NO: 17618 - RNA, 20 nt, synthetic construct
  source 1..20: mol_type = other RNA
tctgtagactcactgccaat

SEQ ID NO: 17619 - RNA, 20 nt, synthetic construct
  source 1..20: mol_type = other RNA
tcttcttctgtagactcact

SEQ ID NO: 17620 - RNA, 20 nt, synthetic construct
  source 1..20: mol_type = other RNA
cttcctcttcttctgtagac

SEQ ID NO: 17621 - RNA, 20 nt, synthetic construct
  source 1..20: mol_type = other RNA
gctttgttacaattcaggac

SEQ ID NO: 17622 - RNA, 20 nt, synthetic construct
  source 1..20: mol_type = other RNA
agtgcccagagtcctgaatt

SEQ ID NO: 17623 - RNA, 20 nt, synthetic construct
  source 1..20: mol_type = other RNA
ggactctgggcactagaaga

SEQ ID NO: 17624 - RNA, 20 nt, synthetic construct
  source 1..20: mol_type = other RNA
cttggaggagagatagggaa

SEQ ID NO: 17625 - RNA, 20 nt, synthetic construct
  source 1..20: mol_type = other RNA
ctatctctcctccaagggaa

SEQ ID NO: 17626 - RNA, 20 nt, synthetic construct
  source 1..20: mol_type = other RNA
caaggagggttagagacaaa

SEQ ID NO: 17627 - RNA, 20 nt, synthetic construct
  source 1..20: mol_type = other RNA
tgcccaaattttcaaaagat

SEQ ID NO: 17628 - RNA, 20 nt, synthetic construct
  source 1..20: mol_type = other RNA
aaagattaagccttttgcct

SEQ ID NO: 17629 - RNA, 20 nt, synthetic construct
  source 1..20: mol_type = other RNA
ctagaccattgctcatacca

SEQ ID NO: 17630 - RNA, 20 nt, synthetic construct
  source 1..20: mol_type = other RNA
ttggtgcaggctgtaggagg

SEQ ID NO: 17631 - RNA, 20 nt, synthetic construct
  source 1..20: mol_type = other RNA
ggtcttctgccctgtggttc

SEQ ID NO: 17632 - RNA, 20 nt, synthetic construct
  source 1..20: mol_type = other RNA
tgagaaccacagggcagaag

SEQ ID NO: 17633 - RNA, 20 nt, synthetic construct
  source 1..20: mol_type = other RNA
gccctgtggttctcatgaaa

SEQ ID NO: 17634 - RNA, 20 nt, synthetic construct
  source 1..20: mol_type = other RNA
catgaaaaccagcagagatt

SEQ ID NO: 17635 - RNA, 20 nt, synthetic construct
  source 1..20: mol_type = other RNA
tgtgcagctccatcatatga

SEQ ID NO: 17636 - RNA, 20 nt, synthetic construct
  source 1..20: mol_type = other RNA
tatgatggagctgcacatga

SEQ ID NO: 17637 - RNA, 20 nt, synthetic construct
  source 1..20: mol_type = other RNA
aatgtccagcattctcctct

SEQ ID NO: 17638 - RNA, 20 nt, synthetic construct
  source 1..20: mol_type = other RNA
cctctgttctttatctttag

SEQ ID NO: 17639 - RNA, 20 nt, synthetic construct
  source 1..20: mol_type = other RNA
ttatctttagatttaaaaat

SEQ ID NO: 17640 - RNA, 20 nt, synthetic construct
  source 1..20: mol_type = other RNA
tagaaacattatttttaaat

SEQ ID NO: 17641 - RNA, 20 nt, synthetic construct
  source 1..20: mol_type = other RNA
agaattttaataagttcata

SEQ ID NO: 17642 - RNA, 20 nt, synthetic construct
  source 1..20: mol_type = other RNA
atgaacttattaaaattcta

SEQ ID NO: 17643 - RNA, 20 nt, synthetic construct
  source 1..20: mol_type = other RNA
tagtattctagaattttaat

SEQ ID NO: 17644 - RNA, 20 nt, synthetic construct
  source 1..20: mol_type = other RNA
agaatactatgaatctactg

SEQ ID NO: 17645 - RNA, 20 nt, synthetic construct
  source 1..20: mol_type = other RNA
actagtagcaaaaggatgtg

SEQ ID NO: 17646 - RNA, 20 nt, synthetic construct
  source 1..20: mol_type = other RNA
catccttttgctactagtag

SEQ ID NO: 17647 - RNA, 20 nt, synthetic construct
  source 1..20: mol_type = other RNA
tttttctactagtagcaaaa

SEQ ID NO: 17648 - RNA, 20 nt, synthetic construct
  source 1..20: mol_type = other RNA
gaggctactgtccagtatgt

SEQ ID NO: 17649 - RNA, 20 nt, synthetic construct
  source 1..20: mol_type = other RNA
ctgctcatgcaattactgag

SEQ ID NO: 17650 - RNA, 20 nt, synthetic construct
  source 1..20: mol_type = other RNA
caggtggtgctgaaattaaa

SEQ ID NO: 17651 - RNA, 20 nt, synthetic construct
  source 1..20: mol_type = other RNA
ggggtcctctgatgccagtg

SEQ ID NO: 17652 - RNA, 20 nt, synthetic construct
  source 1..20: mol_type = other RNA
aaccaatatttgagttggct

SEQ ID NO: 17653 - RNA, 20 nt, synthetic construct
  source 1..20: mol_type = other RNA
tagggacaaatttctcttag

SEQ ID NO: 17654 - RNA, 20 nt, synthetic construct
  source 1..20: mol_type = other RNA
cttagactcacattttggca

SEQ ID NO: 17655 - RNA, 20 nt, synthetic construct
  source 1..20: mol_type = other RNA
cttagactctttgctcaaaa

SEQ ID NO: 17656 - RNA, 20 nt, synthetic construct
  source 1..20: mol_type = other RNA
cttctcttagactctttgct

SEQ ID NO: 17657 - RNA, 20 nt, synthetic construct
  source 1..20: mol_type = other RNA
ataaaactattaggaaaaat

SEQ ID NO: 17658 - RNA, 20 nt, synthetic construct
  source 1..20: mol_type = other RNA
taatagttttatggaaggag

SEQ ID NO: 17659 - RNA, 20 nt, synthetic construct
  source 1..20: mol_type = other RNA
actccttccataaaactatt

SEQ ID NO: 17660 - RNA, 20 nt, synthetic construct
  source 1..20: mol_type = other RNA
gtatattctactccttccat

SEQ ID NO: 17661 - RNA, 20 nt, synthetic construct
  source 1..20: mol_type = other RNA
ccacttccgtatattctact

SEQ ID NO: 17662 - RNA, 20 nt, synthetic construct
  source 1..20: mol_type = other RNA
gagctttacattaatatgac

SEQ ID NO: 17663 - RNA, 20 nt, synthetic construct
  source 1..20: mol_type = other RNA
acaatgcccactaaaaatca

SEQ ID NO: 17664 - RNA, 20 nt, synthetic construct
  source 1..20: mol_type = other RNA
ctcgtgcaattctgtcattc

SEQ ID NO: 17665 - RNA, 20 nt, synthetic construct
  source 1..20: mol_type = other RNA
gtcattctaaatttcaattc

SEQ ID NO: 17666 - RNA, 20 nt, synthetic construct
  source 1..20: mol_type = other RNA
ggaattgaaatttagaatga

SEQ ID NO: 17667 - RNA, 20 nt, synthetic construct
  source 1..20: mol_type = other RNA
aaatttcaattcccgaaggt

SEQ ID NO: 17668 - RNA, 20 nt, synthetic construct
  source 1..20: mol_type = other RNA
attcccgaaggtttgtttgc

SEQ ID NO: 17669 - RNA, 20 nt, synthetic construct
  source 1..20: mol_type = other RNA
cgaaggtttgtttgccattt

SEQ ID NO: 17670 - RNA, 20 nt, synthetic construct
  source 1..20: mol_type = other RNA
gatgtttgtgtgtgtgtgtg

SEQ ID NO: 17671 - RNA, 20 nt, synthetic construct
  source 1..20: mol_type = other RNA
gacatatatataaatattca

SEQ ID NO: 17672 - RNA, 20 nt, synthetic construct
  source 1..20: mol_type = other RNA
ttaaaaattatattgtttca

SEQ ID NO: 17673 - RNA, 20 nt, synthetic construct
  source 1..20: mol_type = other RNA
ctatgtatgtctgagtattt

SEQ ID NO: 17674 - RNA, 20 nt, synthetic construct
  source 1..20: mol_type = other RNA
gttacatacctgaatattta

SEQ ID NO: 17675 - RNA, 20 nt, synthetic construct
  source 1..20: mol_type = other RNA
ggtatgtaactgaatattca

SEQ ID NO: 17676 - RNA, 20 nt, synthetic construct
  source 1..20: mol_type = other RNA
tttacacacacaaatatatg

SEQ ID NO: 17677 - RNA, 20 nt, synthetic construct
  source 1..20: mol_type = other RNA
ggcccagtgtgtttatacct

SEQ ID NO: 17678 - RNA, 20 nt, synthetic construct
  source 1..20: mol_type = other RNA
gaccactggtgcttcaggcc

SEQ ID NO: 17679 - RNA, 20 nt, synthetic construct
  source 1..20: mol_type = other RNA
agtcctggcaacacatgtcc

SEQ ID NO: 17680 - RNA, 20 nt, synthetic construct
  source 1..20: mol_type = other RNA
tgcttttgctcttcaagtcc

SEQ ID NO: 17681 - RNA, 20 nt, synthetic construct
  source 1..20: mol_type = other RNA
gcgtttgtgtacctcctgac

SEQ ID NO: 17682 - RNA, 20 nt, synthetic construct
  source 1..20: mol_type = other RNA
aaaaggctgttatgcttata

SEQ ID NO: 17683 - RNA, 20 nt, synthetic construct
  source 1..20: mol_type = other RNA
tatattttatagtcatttac

SEQ ID NO: 17684 - RNA, 20 nt, synthetic construct
  source 1..20: mol_type = other RNA
caagttgcacaacagatagt

SEQ ID NO: 17685 - RNA, 20 nt, synthetic construct
  source 1..20: mol_type = other RNA
aaattatctcaatacactac

SEQ ID NO: 17686 - RNA, 20 nt, synthetic construct
  source 1..20: mol_type = other RNA
gttctaaattatctcaatac

SEQ ID NO: 17687 - RNA, 20 nt, synthetic construct
  source 1..20: mol_type = other RNA
atccatgatgaaatacagca

SEQ ID NO: 17688 - RNA, 20 nt, synthetic construct
  source 1..20: mol_type = other RNA
ttcaatccatgatgaaatac

SEQ ID NO: 17689 - RNA, 20 nt, synthetic construct
  source 1..20: mol_type = other RNA
tcatggattgaaggaaaaag

SEQ ID NO: 17690 - RNA, 20 nt, synthetic construct
  source 1..20: mol_type = other RNA
tgggctccatctctttttcc

SEQ ID NO: 17691 - RNA, 20 nt, synthetic construct
  source 1..20: mol_type = other RNA
tcaagactgctgtggtcttc

SEQ ID NO: 17692 - RNA, 20 nt, synthetic construct
  source 1..20: mol_type = other RNA
cattattaccaagtgtagaa

SEQ ID NO: 17693 - RNA, 20 nt, synthetic construct
  source 1..20: mol_type = other RNA
ttctcattattaccaagtgt

SEQ ID NO: 17694 - RNA, 20 nt, synthetic construct
  source 1..20: mol_type = other RNA
acacttggtaataatgagaa

SEQ ID NO: 17695 - RNA, 20 nt, synthetic construct
  source 1..20: mol_type = other RNA
aggtacatgactgtagctct

SEQ ID NO: 17696 - RNA, 20 nt, synthetic construct
  source 1..20: mol_type = other RNA
ttgtggaatcactccctgtg

SEQ ID NO: 17697 - RNA, 20 nt, synthetic construct
  source 1..20: mol_type = other RNA
ttgtcctactttcattgtgg

SEQ ID NO: 17698 - RNA, 20 nt, synthetic construct
  source 1..20: mol_type = other RNA
acaatgaaagtaggacaaag

SEQ ID NO: 17699 - RNA, 20 nt, synthetic construct
  source 1..20: mol_type = other RNA
ccagtagctgttctttgtcc

SEQ ID NO: 17700 - RNA, 20 nt, synthetic construct
  source 1..20: mol_type = other RNA
ttccccagtagctgttcttt

SEQ ID NO: 17701 - RNA, 20 nt, synthetic construct
  source 1..20: mol_type = other RNA
cttgtagttattctttcccc

SEQ ID NO: 17702 - RNA, 20 nt, synthetic construct
  source 1..20: mol_type = other RNA
atggagatggcagagctcac

SEQ ID NO: 17703 - RNA, 20 nt, synthetic construct
  source 1..20: mol_type = other RNA
agctggtaagaactcaaata

SEQ ID NO: 17704 - RNA, 20 nt, synthetic construct
  source 1..20: mol_type = other RNA
taccagctagaaaagagacc

SEQ ID NO: 17705 - RNA, 20 nt, synthetic construct
  source 1..20: mol_type = other RNA
ggggtctctactgaatgccc

SEQ ID NO: 17706 - RNA, 20 nt, synthetic construct
  source 1..20: mol_type = other RNA
gtagagaccccagaaaagcc

SEQ ID NO: 17707 - RNA, 20 nt, synthetic construct
  source 1..20: mol_type = other RNA
aaagagtggcttttctgggg

SEQ ID NO: 17708 - RNA, 20 nt, synthetic construct
  source 1..20: mol_type = other RNA
attttgctaggatttttgtg

SEQ ID NO: 17709 - RNA, 20 nt, synthetic construct
  source 1..20: mol_type = other RNA
gacttgcttttcaattttgc

SEQ ID NO: 17710 - RNA, 20 nt, synthetic construct
  source 1..20: mol_type = other RNA
gatgggcaactaatttatgt

SEQ ID NO: 17711 - RNA, 20 nt, synthetic construct
  source 1..20: mol_type = other RNA
tctgatgggcaactaattta

SEQ ID NO: 17712 - RNA, 20 nt, synthetic construct
  source 1..20: mol_type = other RNA
taggtaaacaataaaatcaa

SEQ ID NO: 17713 - RNA, 20 nt, synthetic construct
  source 1..20: mol_type = other RNA
tgtatgtctagtaaattttt

SEQ ID NO: 17714 - RNA, 20 nt, synthetic construct
  source 1..20: mol_type = other RNA
cctggttatggatcacacta

SEQ ID NO: 17715 - RNA, 20 nt, synthetic construct
  source 1..20: mol_type = other RNA
gggtctatttgtattgaatg

SEQ ID NO: 17716 - RNA, 20 nt, synthetic construct
  source 1..20: mol_type = other RNA
atacaaatagacccagaaat

SEQ ID NO: 17717 - RNA, 20 nt, synthetic construct
  source 1..20: mol_type = other RNA
gtcatttctgggtctatttg

SEQ ID NO: 17718 - RNA, 20 nt, synthetic construct
  source 1..20: mol_type = other RNA
atcatttctgtcatttctgg

SEQ ID NO: 17719 - RNA, 20 nt, synthetic construct
  source 1..20: mol_type = other RNA
cttgtgatatctgatcacaa

SEQ ID NO: 17720 - RNA, 20 nt, synthetic construct
  source 1..20: mol_type = other RNA
tctcttgtgatatctgatca

SEQ ID NO: 17721 - RNA, 20 nt, synthetic construct
  source 1..20: mol_type = other RNA
agtatctctttcttctcttg

SEQ ID NO: 17722 - RNA, 20 nt, synthetic construct
  source 1..20: mol_type = other RNA
gttcaagtatctctttcttc

SEQ ID NO: 17723 - RNA, 20 nt, synthetic construct
  source 1..20: mol_type = other RNA
ggcattttttctgttcaagt

SEQ ID NO: 17724 - RNA, 20 nt, synthetic construct
  source 1..20: mol_type = other RNA
gccatcattgcttcaggcat

SEQ ID NO: 17725 - RNA, 20 nt, synthetic construct
  source 1..20: mol_type = other RNA
tatttggaaagttttcagcc

SEQ ID NO: 17726 - RNA, 20 nt, synthetic construct
  source 1..20: mol_type = other RNA
tcatatttggaaagttttca

SEQ ID NO: 17727 - RNA, 20 nt, synthetic construct
  source 1..20: mol_type = other RNA
aaatatgaagaaaaaaaagc

SEQ ID NO: 17728 - RNA, 20 nt, synthetic construct
  source 1..20: mol_type = other RNA
tgaatctgtgagcttttttt

SEQ ID NO: 17729 - RNA, 20 nt, synthetic construct
  source 1..20: mol_type = other RNA
gattgattagttttcttgaa

SEQ ID NO: 17730 - RNA, 20 nt, synthetic construct
  source 1..20: mol_type = other RNA
agaaaactaatcaatcagaa

SEQ ID NO: 17731 - RNA, 20 nt, synthetic construct
  source 1..20: mol_type = other RNA
aaatcatatttctgattgat

SEQ ID NO: 17732 - RNA, 20 nt, synthetic construct
  source 1..20: mol_type = other RNA
tggttaaattgtctaaaatc

SEQ ID NO: 17733 - RNA, 20 nt, synthetic construct
  source 1..20: mol_type = other RNA
ttgattttagacaatttaac

SEQ ID NO: 17734 - RNA, 20 nt, synthetic construct
  source 1..20: mol_type = other RNA
tagctttctttgattttaga

SEQ ID NO: 17735 - RNA, 20 nt, synthetic construct
  source 1..20: mol_type = other RNA
tctggcttataaaattttcc

SEQ ID NO: 17736 - RNA, 20 nt, synthetic construct
  source 1..20: mol_type = other RNA
tttatataaacaatcttttt

SEQ ID NO: 17737 - RNA, 20 nt, synthetic construct
  source 1..20: mol_type = other RNA
gatgagaaggcatcagtcat

SEQ ID NO: 17738 - RNA, 20 nt, synthetic construct
  source 1..20: mol_type = other RNA
ttgtttctgatgagaaggca

SEQ ID NO: 17739 - RNA, 20 nt, synthetic construct
  source 1..20: mol_type = other RNA
gactttcattgtttctgatg

SEQ ID NO: 17740 - RNA, 20 nt, synthetic construct
  source 1..20: mol_type = other RNA
catcagaaacaatgaaagtc

SEQ ID NO: 17741 - RNA, 20 nt, synthetic construct
  source 1..20: mol_type = other RNA
attactttaaagatgttact

SEQ ID NO: 17742 - RNA, 20 nt, synthetic construct
  source 1..20: mol_type = other RNA
tctattactttaaagatgtt

SEQ ID NO: 17743 - RNA, 20 nt, synthetic construct
  source 1..20: mol_type = other RNA
caatatgagcctctgcatgc

SEQ ID NO: 17744 - RNA, 20 nt, synthetic construct
  source 1..20: mol_type = other RNA
tgcagtcaatatggggctaa

SEQ ID NO: 17745 - RNA, 20 nt, synthetic construct
  source 1..20: mol_type = other RNA
cacggtctgtgggtcctctc

SEQ ID NO: 17746 - RNA, 20 nt, synthetic construct
  source 1..20: mol_type = other RNA
ttcacacggtctgtgggtcc

SEQ ID NO: 17747 - RNA, 20 nt, synthetic construct
  source 1..20: mol_type = other RNA
gcagttggggaactcacagt

SEQ ID NO: 17748 - RNA, 20 nt, synthetic construct
  source 1..20: mol_type = other RNA
acttctgcagttggggaact

SEQ ID NO: 17749 - RNA, 20 nt, synthetic construct
  source 1..20: mol_type = other RNA
ccaactgcagaagtggaaaa

SEQ ID NO: 17750 - RNA, 20 nt, synthetic construct
  source 1..20: mol_type = other RNA
ccagttgtggggtgtgtttg

SEQ ID NO: 17751 - RNA, 20 nt, synthetic construct
  source 1..20: mol_type = other RNA
gcttctccagttgtggggtg

SEQ ID NO: 17752 - RNA, 20 nt, synthetic construct
  source 1..20: mol_type = other RNA
cctgcaaacagactttcagc

SEQ ID NO: 17753 - RNA, 20 nt, synthetic construct
  source 1..20: mol_type = other RNA
caactttacctgggcctcag

SEQ ID NO: 17754 - RNA, 20 nt, synthetic construct
  source 1..20: mol_type = other RNA
tctacccctatattttgctt

SEQ ID NO: 17755 - RNA, 20 nt, synthetic construct
  source 1..20: mol_type = other RNA
ctgctgcttcctctacccct

SEQ ID NO: 17756 - RNA, 20 nt, synthetic construct
  source 1..20: mol_type = other RNA
tgcctggcaccacagagatc

SEQ ID NO: 17757 - RNA, 20 nt, synthetic construct
  source 1..20: mol_type = other RNA
gatggatctctgtggtgcca

SEQ ID NO: 17758 - RNA, 20 nt, synthetic construct
  source 1..20: mol_type = other RNA
tttggccacacttctgatgg

SEQ ID NO: 17759 - RNA, 20 nt, synthetic construct
  source 1..20: mol_type = other RNA
ggtagagcagtcctccatgt

SEQ ID NO: 17760 - RNA, 20 nt, synthetic construct
  source 1..20: mol_type = other RNA
aattgttagaaagttcaggt

SEQ ID NO: 17761 - RNA, 20 nt, synthetic construct
  source 1..20: mol_type = other RNA
ccccctgttcaaattgttag

SEQ ID NO: 17762 - RNA, 20 nt, synthetic construct
  source 1..20: mol_type = other RNA
aacaatttgaacagggggag

SEQ ID NO: 17763 - RNA, 20 nt, synthetic construct
  source 1..20: mol_type = other RNA
ggccaggaggcttctccccc

SEQ ID NO: 17764 - RNA, 20 nt, synthetic construct
  source 1..20: mol_type = other RNA
tgccctcccccaagttctgg

SEQ ID NO: 17765 - RNA, 20 nt, synthetic construct
  source 1..20: mol_type = other RNA
cccacctgtgaagtctgcaa

SEQ ID NO: 17766 - RNA, 20 nt, synthetic construct
  source 1..20: mol_type = other RNA
caggtgggggaaggactaaa

SEQ ID NO: 17767 - RNA, 20 nt, synthetic construct
  source 1..20: mol_type = other RNA
acctcccagctgtgaaagaa

SEQ ID NO: 17768 - RNA, 20 nt, synthetic construct
  source 1..20: mol_type = other RNA
ttcacagctgggaggtggaa

SEQ ID NO: 17769 - RNA, 20 nt, synthetic construct
  source 1..20: mol_type = other RNA
cagctgggaggtggaaagcc

SEQ ID NO: 17770 - RNA, 20 nt, synthetic construct
  source 1..20: mol_type = other RNA
agcctgactttccccccacc

SEQ ID NO: 17771 - RNA, 20 nt, synthetic construct
  source 1..20: mol_type = other RNA
aggtggggggaaagtcaggc

SEQ ID NO: 17772 - RNA, 20 nt, synthetic construct
  source 1..20: mol_type = other RNA
gtttgcatgggtgctgggtg

SEQ ID NO: 17773 - RNA, 20 nt, synthetic construct
  source 1..20: mol_type = other RNA
caggtcactggagttgtgta

SEQ ID NO: 17774 - RNA, 20 nt, synthetic construct
  source 1..20: mol_type = other RNA
ttgggcacgtcttactgaag

SEQ ID NO: 17775 - RNA, 20 nt, synthetic construct
  source 1..20: mol_type = other RNA
gtaagacgtgcccaaggaaa

SEQ ID NO: 17776 - RNA, 20 nt, synthetic construct
  source 1..20: mol_type = other RNA
gctaccagggtgggtaggga

SEQ ID NO: 17777 - RNA, 20 nt, synthetic construct
  source 1..20: mol_type = other RNA
ctacccaccctggtagcaga

SEQ ID NO: 17778 - RNA, 20 nt, synthetic construct
  source 1..20: mol_type = other RNA
agggcccacccacctctagt

SEQ ID NO: 17779 - RNA, 20 nt, synthetic construct
  source 1..20: mol_type = other RNA
tagctttggtggtttaatgc

SEQ ID NO: 17780 - RNA, 20 nt, synthetic construct
  source 1..20: mol_type = other RNA
ggtggaggtggaggagggtg

SEQ ID NO: 17781 - RNA, 20 nt, synthetic construct
  source 1..20: mol_type = other RNA
catcacaggactctgtacag

SEQ ID NO: 17782 - RNA, 20 nt, synthetic construct
  source 1..20: mol_type = other RNA
gggtcttgccacctagcaag

SEQ ID NO: 17783 - RNA, 20 nt, synthetic construct
  source 1..20: mol_type = other RNA
tgtgagctgaactgcagtga

SEQ ID NO: 17784 - RNA, 20 nt, synthetic construct
  source 1..20: mol_type = other RNA
gctcacaggaagccacatcc

SEQ ID NO: 17785 - RNA, 20 nt, synthetic construct
  source 1..20: mol_type = other RNA
tatggatgtggcttcctgtg

SEQ ID NO: 17786 - RNA, 20 nt, synthetic construct
  source 1..20: mol_type = other RNA
cttgatgtagtactctccct

SEQ ID NO: 17787 - RNA, 20 nt, synthetic construct
  source 1..20: mol_type = other RNA
gatgtttttatcccatgggg

SEQ ID NO: 17788 - RNA, 20 nt, synthetic construct
  source 1..20: mol_type = other RNA
gccctaccttccctctgaca

SEQ ID NO: 17789 - RNA, 20 nt, synthetic construct
  source 1..20: mol_type = other RNA
ctctgacacagtctacccaa

SEQ ID NO: 17790 - RNA, 20 nt, synthetic construct
  source 1..20: mol_type = other RNA
catttgggtagactgtgtca

SEQ ID NO: 17791 - RNA, 20 nt, synthetic construct
  source 1..20: mol_type = other RNA
ttctcatttgggtagactgt

SEQ ID NO: 17792 - RNA, 20 nt, synthetic construct
  source 1..20: mol_type = other RNA
ggttccttctcatttgggta

SEQ ID NO: 17793 - RNA, 20 nt, synthetic construct
  source 1..20: mol_type = other RNA
tggtttggatccattgctgg

SEQ ID NO: 17794 - RNA, 20 nt, synthetic construct
  source 1..20: mol_type = other RNA
ccagcaatggatccaaacca

SEQ ID NO: 17795 - RNA, 20 nt, synthetic construct
  source 1..20: mol_type = other RNA
tcttggtttggatccattgc

SEQ ID NO: 17796 - RNA, 20 nt, synthetic construct
  source 1..20: mol_type = other RNA
ggtaaatcagggatttcttc

SEQ ID NO: 17797 - RNA, 20 nt, synthetic construct
  source 1..20: mol_type = other RNA
ctttcaggtaaatcagggat

SEQ ID NO: 17798 - RNA, 20 nt, synthetic construct
  source 1..20: mol_type = other RNA
ggaggttagttattaagcta

SEQ ID NO: 17799 - RNA, 20 nt, synthetic construct
  source 1..20: mol_type = other RNA
ctggtccctccctgattagc

SEQ ID NO: 17800 - RNA, 20 nt, synthetic construct
  source 1..20: mol_type = other RNA
ttgcattgggctttgccttt

SEQ ID NO: 17801 - RNA, 20 nt, synthetic construct
  source 1..20: mol_type = other RNA
tatacctttttttttttgga

SEQ ID NO: 17802 - RNA, 20 nt, synthetic construct
  source 1..20: mol_type = other RNA
ccttttacttcttatacctt

SEQ ID NO: 17803 - RNA, 20 nt, synthetic construct
  source 1..20: mol_type = other RNA
acaaaatagatagcttaata

SEQ ID NO: 17804 - RNA, 20 nt, synthetic construct
  source 1..20: mol_type = other RNA
gtagactttggacacacctt

SEQ ID NO: 17805 - RNA, 20 nt, synthetic construct
  source 1..20: mol_type = other RNA
aaaggtgtgtccaaagtcta

SEQ ID NO: 17806 - RNA, 20 nt, synthetic construct
  source 1..20: mol_type = other RNA
agagcatgtcacatttccaa

SEQ ID NO: 17807 - RNA, 20 nt, synthetic construct
  source 1..20: mol_type = other RNA
attgctgagactttccagag

SEQ ID NO: 17808 - RNA, 20 nt, synthetic construct
  source 1..20: mol_type = other RNA
gttctattgctgagactttc

SEQ ID NO: 17809 - RNA, 20 nt, synthetic construct
  source 1..20: mol_type = other RNA
acttgttcagttctattgct

SEQ ID NO: 17810 - RNA, 20 nt, synthetic construct
  source 1..20: mol_type = other RNA
gagctcaaagacaaggactt

SEQ ID NO: 17811 - RNA, 20 nt, synthetic construct
  source 1..20: mol_type = other RNA
aattaacccaatccaacaaa

SEQ ID NO: 17812 - RNA, 20 nt, synthetic construct
  source 1..20: mol_type = other RNA
ttgtctttgttggattgggt

SEQ ID NO: 17813 - RNA, 20 nt, synthetic construct
  source 1..20: mol_type = other RNA
tatcctttattctttgtctt

SEQ ID NO: 17814 - RNA, 20 nt, synthetic construct
  source 1..20: mol_type = other RNA
tattttcttatcctttattc

SEQ ID NO: 17815 - RNA, 20 nt, synthetic construct
  source 1..20: mol_type = other RNA
agatgtctgggattatgtta

SEQ ID NO: 17816 - RNA, 20 nt, synthetic construct
  source 1..20: mol_type = other RNA
tatatttggtcatttaacat

SEQ ID NO: 17817 - RNA, 20 nt, synthetic construct
  source 1..20: mol_type = other RNA
tcaggagccacgattattct

SEQ ID NO: 17818 - RNA, 20 nt, synthetic construct
  source 1..20: mol_type = other RNA
aagcttttagtattgtcttt

SEQ ID NO: 17819 - RNA, 20 nt, synthetic construct
  source 1..20: mol_type = other RNA
cccaaatatgttttccaagc

SEQ ID NO: 17820 - RNA, 20 nt, synthetic construct
  source 1..20: mol_type = other RNA
ccagttattcccccaaatat

SEQ ID NO: 17821 - RNA, 20 nt, synthetic construct
  source 1..20: mol_type = other RNA
tgtatttgcatgtctaggtg

SEQ ID NO: 17822 - RNA, 20 nt, synthetic construct
  source 1..20: mol_type = other RNA
ttgtgtttcttgtatttgca

SEQ ID NO: 17823 - RNA, 20 nt, synthetic construct
  source 1..20: mol_type = other RNA
ttgtgctgcttgtatttaca

SEQ ID NO: 17824 - RNA, 20 nt, synthetic construct
  source 1..20: mol_type = other RNA
caggtgttctttgtgctgct

SEQ ID NO: 17825 - RNA, 20 nt, synthetic construct
  source 1..20: mol_type = other RNA
tcacaaaaagatcttagcct

SEQ ID NO: 17826 - RNA, 20 nt, synthetic construct
  source 1..20: mol_type = other RNA
catcaggttatgcaaagtta

SEQ ID NO: 17827 - RNA, 20 nt, synthetic construct
  source 1..20: mol_type = other RNA
tcttaactttgcataacctg

SEQ ID NO: 17828 - RNA, 20 nt, synthetic construct
  source 1..20: mol_type = other RNA
tgccttcgtcttaactttgc

SEQ ID NO: 17829 - RNA, 20 nt, synthetic construct
  source 1..20: mol_type = other RNA
gtctcacagctcttaagatt

SEQ ID NO: 17830 - RNA, 20 nt, synthetic construct
  source 1..20: mol_type = other RNA
tttatacattacctggtgct

SEQ ID NO: 17831 - RNA, 20 nt, synthetic construct
  source 1..20: mol_type = other RNA
tgctgaaaaactggctgtta

SEQ ID NO: 17832 - RNA, 20 nt, synthetic construct
  source 1..20: mol_type = other RNA
gcaggaactgtacaagctat

SEQ ID NO: 17833 - RNA, 20 nt, synthetic construct
  source 1..20: mol_type = other RNA
tgactgataattgttttgtt

SEQ ID NO: 17834 - RNA, 20 nt, synthetic construct
  source 1..20: mol_type = other RNA
ctggatacaaaattcttgac

SEQ ID NO: 17835 - RNA, 20 nt, synthetic construct
  source 1..20: mol_type = other RNA
tatatgatgcttactttcgc

SEQ ID NO: 17836 - RNA, 20 nt, synthetic construct
  source 1..20: mol_type = other RNA
ttcatatatgatgcttactt

SEQ ID NO: 17837 - RNA, 20 nt, synthetic construct
  source 1..20: mol_type = other RNA
cttagcatttgtttgtccaa

SEQ ID NO: 17838 - RNA, 20 nt, synthetic construct
  source 1..20: mol_type = other RNA
agtggtgacttggtaatggt

SEQ ID NO: 17839 - RNA, 20 nt, synthetic construct
  source 1..20: mol_type = other RNA
ccattaccaagtcaccacta

SEQ ID NO: 17840 - RNA, 20 nt, synthetic construct
  source 1..20: mol_type = other RNA
tctagtggtgacttggtaat

SEQ ID NO: 17841 - RNA, 20 nt, synthetic construct
  source 1..20: mol_type = other RNA
agatttagagctccttttag

SEQ ID NO: 17842 - RNA, 20 nt, synthetic construct
  source 1..20: mol_type = other RNA
aggatttgtttcaagattta

SEQ ID NO: 17843 - RNA, 20 nt, synthetic construct
  source 1..20: mol_type = other RNA
tgtgtttctaggatttgttt

SEQ ID NO: 17844 - RNA, 20 nt, synthetic construct
  source 1..20: mol_type = other RNA
gttttcatgtgtttctagga

SEQ ID NO: 17845 - RNA, 20 nt, synthetic construct
  source 1..20: mol_type = other RNA
ttattgcctccgtactttgg

SEQ ID NO: 17846 - RNA, 20 nt, synthetic construct
  source 1..20: mol_type = other RNA
tcatattctttattgcctcc

SEQ ID NO: 17847 - RNA, 20 nt, synthetic construct
  source 1..20: mol_type = other RNA
attttagcattgaaatgtga

SEQ ID NO: 17848 - RNA, 20 nt, synthetic construct
  source 1..20: mol_type = other RNA
atgctaaaattgaatctaaa

SEQ ID NO: 17849 - RNA, 20 nt, synthetic construct
  source 1..20: mol_type = other RNA
gccatcttgccagccaccaa

SEQ ID NO: 17850 - RNA, 20 nt, synthetic construct
  source 1..20: mol_type = other RNA
tattcagccatcttgccagc

SEQ ID NO: 17851 - RNA, 20 nt, synthetic construct
  source 1..20: mol_type = other RNA
gcatttccaaccaaggtacc

SEQ ID NO: 17852 - RNA, 20 nt, synthetic construct
  source 1..20: mol_type = other RNA
aaccaaggtacccggctcat

SEQ ID NO: 17853 - RNA, 20 nt, synthetic construct
  source 1..20: mol_type = other RNA
ggtcaccctctgtgggctgc

SEQ ID NO: 17854 - RNA, 20 nt, synthetic construct
  source 1..20: mol_type = other RNA
caggtgaggtgacaccccac

SEQ ID NO: 17855 - RNA, 20 nt, synthetic construct
  source 1..20: mol_type = other RNA
acttcccaggtgaggtgaca

SEQ ID NO: 17856 - RNA, 20 nt, synthetic construct
  source 1..20: mol_type = other RNA
ctgaccccttccacttccca

SEQ ID NO: 17857 - RNA, 20 nt, synthetic construct
  source 1..20: mol_type = other RNA
tttggctaggggagggagtt

SEQ ID NO: 17858 - RNA, 20 nt, synthetic construct
  source 1..20: mol_type = other RNA
cggcacagtccctcacggct

SEQ ID NO: 17859 - RNA, 20 nt, synthetic construct
  source 1..20: mol_type = other RNA
ggcacaaatactatgctttt

SEQ ID NO: 17860 - RNA, 20 nt, synthetic construct
  source 1..20: mol_type = other RNA
ggttgcaaagaccgtgggaa

SEQ ID NO: 17861 - RNA, 20 nt, synthetic construct
  source 1..20: mol_type = other RNA
cacggtctttgcaacctgaa

SEQ ID NO: 17862 - RNA, 20 nt, synthetic construct
  source 1..20: mol_type = other RNA
cttgggtgcctacaccacca

SEQ ID NO: 17863 - RNA, 20 nt, synthetic construct
  source 1..20: mol_type = other RNA
agcccaaaactgggctggca

SEQ ID NO: 17864 - RNA, 20 nt, synthetic construct
  source 1..20: mol_type = other RNA
agggaccactggggtatgaa

SEQ ID NO: 17865 - RNA, 20 nt, synthetic construct
  source 1..20: mol_type = other RNA
taccccagtggtccctggaa

SEQ ID NO: 17866 - RNA, 20 nt, synthetic construct
  source 1..20: mol_type = other RNA
gtcttgctggcattccaggg

SEQ ID NO: 17867 - RNA, 20 nt, synthetic construct
  source 1..20: mol_type = other RNA
cgggggtgaatggttctgtc

SEQ ID NO: 17868 - RNA, 20 nt, synthetic construct
  source 1..20: mol_type = other RNA
tcacgggggtgaatggttct

SEQ ID NO: 17869 - RNA, 20 nt, synthetic construct
  source 1..20: mol_type = other RNA
gccctttcttcacgggggtg

SEQ ID NO: 17870 - RNA, 20 nt, synthetic construct
  source 1..20: mol_type = other RNA
cccccgtgaagaaagggctg

SEQ ID NO: 17871 - RNA, 20 nt, synthetic construct
  source 1..20: mol_type = other RNA
cagtggatcccacccccatg

SEQ ID NO: 17872 - RNA, 20 nt, synthetic construct
  source 1..20: mol_type = other RNA
agccagtggagcttagcttg

SEQ ID NO: 17873 - RNA, 20 nt, synthetic construct
  source 1..20: mol_type = other RNA
gactgctgtgctggcagcaa

SEQ ID NO: 17874 - RNA, 20 nt, synthetic construct
  source 1..20: mol_type = other RNA
tgctgccagcacagcagtct

SEQ ID NO: 17875 - RNA, 20 nt, synthetic construct
  source 1..20: mol_type = other RNA
cctcacagtgtaagcaaaac

SEQ ID NO: 17876 - RNA, 20 nt, synthetic construct
  source 1..20: mol_type = other RNA
tagcggttttgcttacactg

SEQ ID NO: 17877 - RNA, 20 nt, synthetic construct
  source 1..20: mol_type = other RNA
aacttcctagcggttttgct

SEQ ID NO: 17878 - RNA, 20 nt, synthetic construct
  source 1..20: mol_type = other RNA
tcctctctgggcagggcatc

SEQ ID NO: 17879 - RNA, 20 nt, synthetic construct
  source 1..20: mol_type = other RNA
gagatgccctgcccagagag

SEQ ID NO: 17880 - RNA, 20 nt, synthetic construct
  source 1..20: mol_type = other RNA
ttcagagatgccctgcccag

SEQ ID NO: 17881 - RNA, 20 nt, synthetic construct
  source 1..20: mol_type = other RNA
gactggggctgctgcctttc

SEQ ID NO: 17882 - RNA, 20 nt, synthetic construct
  source 1..20: mol_type = other RNA
tccagttgctctgtcccagg

SEQ ID NO: 17883 - RNA, 20 nt, synthetic construct
  source 1..20: mol_type = other RNA
gagctggcaggcaggaaact

SEQ ID NO: 17884 - RNA, 20 nt, synthetic construct
  source 1..20: mol_type = other RNA
tgcctgccagctctgaaaag

SEQ ID NO: 17885 - RNA, 20 nt, synthetic construct
  source 1..20: mol_type = other RNA
gaagataataagaaactcct

SEQ ID NO: 17886 - RNA, 20 nt, synthetic construct
  source 1..20: mol_type = other RNA
ttgcattgtgttagaacatg

SEQ ID NO: 17887 - RNA, 20 nt, synthetic construct
  source 1..20: mol_type = other RNA
tagcttccttgcattgtgtt

SEQ ID NO: 17888 - RNA, 20 nt, synthetic construct
  source 1..20: mol_type = other RNA
aacacaatgcaaggaagcta

SEQ ID NO: 17889 - RNA, 20 nt, synthetic construct
  source 1..20: mol_type = other RNA
aggttcttagcttccttgca

SEQ ID NO: 17890 - RNA, 20 nt, synthetic construct
  source 1..20: mol_type = other RNA
tctgacctttttcaaggttc

SEQ ID NO: 17891 - RNA, 20 nt, synthetic construct
  source 1..20: mol_type = other RNA
ctaaactgcttactgtagtt

SEQ ID NO: 17892 - RNA, 20 nt, synthetic construct
  source 1..20: mol_type = other RNA
tctctaaactgcttactgta

SEQ ID NO: 17893 - RNA, 20 nt, synthetic construct
  source 1..20: mol_type = other RNA
gctccctaaggtcatttatg

SEQ ID NO: 17894 - RNA, 20 nt, synthetic construct
  source 1..20: mol_type = other RNA
cgtgctgtgtttttcagctc

SEQ ID NO: 17895 - RNA, 20 nt, synthetic construct
  source 1..20: mol_type = other RNA
tgacacatacacaagtatca

SEQ ID NO: 17896 - RNA, 20 nt, synthetic construct
  source 1..20: mol_type = other RNA
acttgatcgattttgctatt

SEQ ID NO: 17897 - RNA, 20 nt, synthetic construct
  source 1..20: mol_type = other RNA
tccacttgatcgattttgct

SEQ ID NO: 17898 - RNA, 20 nt, synthetic construct
  source 1..20: mol_type = other RNA
atctctgatatcctttcttc

SEQ ID NO: 17899 - RNA, 20 nt, synthetic construct
  source 1..20: mol_type = other RNA
ttaagttgattttcaatctc

SEQ ID NO: 17900 - RNA, 20 nt, synthetic construct
  source 1..20: mol_type = other RNA
cgctttacttcattaagttg

SEQ ID NO: 17901 - RNA, 20 nt, synthetic construct
  source 1..20: mol_type = other RNA
ttaatcttgttttcacgctt

SEQ ID NO: 17902 - RNA, 20 nt, synthetic construct
  source 1..20: mol_type = other RNA
ttattccttaatcttgtttt

SEQ ID NO: 17903 - RNA, 20 nt, synthetic construct
  source 1..20: mol_type = other RNA
ttctttattccttaatcttg

SEQ ID NO: 17904 - RNA, 20 nt, synthetic construct
  source 1..20: mol_type = other RNA
ttttcattctttattcctta

SEQ ID NO: 17905 - RNA, 20 nt, synthetic construct
  source 1..20: mol_type = other RNA
ttccttttcattctttattc

SEQ ID NO: 17906 - RNA, 20 nt, synthetic construct
  source 1..20: mol_type = other RNA
catagtcccatacttggagg

SEQ ID NO: 17907 - RNA, 20 nt, synthetic construct
  source 1..20: mol_type = other RNA
atcttttcacatagtcccat

SEQ ID NO: 17908 - RNA, 20 nt, synthetic construct
  source 1..20: mol_type = other RNA
ggtacaccaatcaaacgtag

SEQ ID NO: 17909 - RNA, 20 nt, synthetic construct
  source 1..20: mol_type = other RNA
cccatcactttcaggtacac

SEQ ID NO: 17910 - RNA, 20 nt, synthetic construct
  source 1..20: mol_type = other RNA
attctcccatcactttcagg

SEQ ID NO: 17911 - RNA, 20 nt, synthetic construct
  source 1..20: mol_type = other RNA
aacttggttccattctccca

SEQ ID NO: 17912 - RNA, 20 nt, synthetic construct
  source 1..20: mol_type = other RNA
cctggataatatcctgaaga

SEQ ID NO: 17913 - RNA, 20 nt, synthetic construct
  source 1..20: mol_type = other RNA
ggatattatccaggagaact

SEQ ID NO: 17914 - RNA, 20 nt, synthetic construct
  source 1..20: mol_type = other RNA
ccaacctagcaagacaggcc

SEQ ID NO: 17915 - RNA, 20 nt, synthetic construct
  source 1..20: mol_type = other RNA
ttaatttgaatgttggcctg

SEQ ID NO: 17916 - RNA, 20 nt, synthetic construct
  source 1..20: mol_type = other RNA
ctgtatttccttaatttgaa

SEQ ID NO: 17917 - RNA, 20 nt, synthetic construct
  source 1..20: mol_type = other RNA
aattaaggaaatacagagaa

SEQ ID NO: 17918 - RNA, 20 nt, synthetic construct
  source 1..20: mol_type = other RNA
tgaatttgaatgtggtattc

SEQ ID NO: 17919 - RNA, 20 nt, synthetic construct
  source 1..20: mol_type = other RNA
ctgtatttcctgaatttgaa

SEQ ID NO: 17920 - RNA, 20 nt, synthetic construct
  source 1..20: mol_type = other RNA
aattcaggaaatacagagaa

SEQ ID NO: 17921 - RNA, 20 nt, synthetic construct
  source 1..20: mol_type = other RNA
ggaaatacagagaacaccac

SEQ ID NO: 17922 - RNA, 20 nt, synthetic construct
  source 1..20: mol_type = other RNA
tgaggagtatctttgtggtg

SEQ ID NO: 17923 - RNA, 20 nt, synthetic construct
  source 1..20: mol_type = other RNA
ggttgctcttcttgaggagt

SEQ ID NO: 17924 - RNA, 20 nt, synthetic construct
  source 1..20: mol_type = other RNA
accttggtgaatctgacgat

SEQ ID NO: 17925 - RNA, 20 nt, synthetic construct
  source 1..20: mol_type = other RNA
tttcaaccttggtgaatctg

SEQ ID NO: 17926 - RNA, 20 nt, synthetic construct
  source 1..20: mol_type = other RNA
ttcatttcaaccttggtgaa

SEQ ID NO: 17927 - RNA, 20 nt, synthetic construct
  source 1..20: mol_type = other RNA
ccaaggttgaaatgaaggaa

SEQ ID NO: 17928 - RNA, 20 nt, synthetic construct
  source 1..20: mol_type = other RNA
ctctggctgccctcaacatt

SEQ ID NO: 17929 - RNA, 20 nt, synthetic construct
  source 1..20: mol_type = other RNA
ctttgtgggtaacccaaact

SEQ ID NO: 17930 - RNA, 20 nt, synthetic construct
  source 1..20: mol_type = other RNA
gcaggaagatccactgttag

SEQ ID NO: 17931 - RNA, 20 nt, synthetic construct
  source 1..20: mol_type = other RNA
ggcttgtagagtttctgcag

SEQ ID NO: 17932 - RNA, 20 nt, synthetic construct
  source 1..20: mol_type = other RNA
tgcagaaactctacaagcca

SEQ ID NO: 17933 - RNA, 20 nt, synthetic construct
  source 1..20: mol_type = other RNA
acattcttttttactattat

SEQ ID NO: 17934 - RNA, 20 nt, synthetic construct
  source 1..20: mol_type = other RNA
tttttactattattatactt

SEQ ID NO: 17935 - RNA, 20 nt, synthetic construct
  source 1..20: mol_type = other RNA
agggtacatgtgcacaaggt

SEQ ID NO: 17936 - RNA, 20 nt, synthetic construct
  source 1..20: mol_type = other RNA
tttacattaggtatatctcc

SEQ ID NO: 17937 - RNA, 20 nt, synthetic construct
  source 1..20: mol_type = other RNA
ccactctgtgtccatgtact

SEQ ID NO: 17938 - RNA, 20 nt, synthetic construct
  source 1..20: mol_type = other RNA
cactcataggtgggaattga

SEQ ID NO: 17939 - RNA, 20 nt, synthetic construct
  source 1..20: mol_type = other RNA
attcccacctatgagtgaga

SEQ ID NO: 17940 - RNA, 20 nt, synthetic construct
  source 1..20: mol_type = other RNA
cacctatgagtgagaacatt

SEQ ID NO: 17941 - RNA, 20 nt, synthetic construct
  source 1..20: mol_type = other RNA
gtgtttggatttctgtcctt

SEQ ID NO: 17942 - RNA, 20 nt, synthetic construct
  source 1..20: mol_type = other RNA
cagcaaactatcacaaggac

SEQ ID NO: 17943 - RNA, 20 nt, synthetic construct
  source 1..20: mol_type = other RNA
gtccttgtgatagtttgctg

SEQ ID NO: 17944 - RNA, 20 nt, synthetic construct
  source 1..20: mol_type = other RNA
agcttcatccacatccctac

SEQ ID NO: 17945 - RNA, 20 nt, synthetic construct
  source 1..20: mol_type = other RNA
tccacatccctacaaaggac

SEQ ID NO: 17946 - RNA, 20 nt, synthetic construct
  source 1..20: mol_type = other RNA
tgtcctttgtagggatgtgg

SEQ ID NO: 17947 - RNA, 20 nt, synthetic construct
  source 1..20: mol_type = other RNA
ttatggctgcatagtattcc

SEQ ID NO: 17948 - RNA, 20 nt, synthetic construct
  source 1..20: mol_type = other RNA
atggtgtatatgtgccacat

SEQ ID NO: 17949 - RNA, 20 nt, synthetic construct
  source 1..20: mol_type = other RNA
taatccagtctaccattgat

SEQ ID NO: 17950 - RNA, 20 nt, synthetic construct
  source 1..20: mol_type = other RNA
caatagcaaagacttggaac

SEQ ID NO: 17951 - RNA, 20 nt, synthetic construct
  source 1..20: mol_type = other RNA
aagtctttgctattgtgaat

SEQ ID NO: 17952 - RNA, 20 nt, synthetic construct
  source 1..20: mol_type = other RNA
tcaaggatttagaactagaa

SEQ ID NO: 17953 - RNA, 20 nt, synthetic construct
  source 1..20: mol_type = other RNA
agttctaaatccttgaggaa

SEQ ID NO: 17954 - RNA, 20 nt, synthetic construct
  source 1..20: mol_type = other RNA
aaatccttgaggaatcaccg

SEQ ID NO: 17955 - RNA, 20 nt, synthetic construct
  source 1..20: mol_type = other RNA
accattgtggaagacagtgc

SEQ ID NO: 17956 - RNA, 20 nt, synthetic construct
  source 1..20: mol_type = other RNA
acaatggttgaactagttta

SEQ ID NO: 17957 - RNA, 20 nt, synthetic construct
  source 1..20: mol_type = other RNA
tatttctccacatcctctct

SEQ ID NO: 17958 - RNA, 20 nt, synthetic construct
  source 1..20: mol_type = other RNA
ccacatcctctctagcatct

SEQ ID NO: 17959 - RNA, 20 nt, synthetic construct
  source 1..20: mol_type = other RNA
tgactttttaatgatcacca

SEQ ID NO: 17960 - RNA, 20 nt, synthetic construct
  source 1..20: mol_type = other RNA
aactggtatgagatggtatc

SEQ ID NO: 17961 - RNA, 20 nt, synthetic construct
  source 1..20: mol_type = other RNA
ctgatggccagtgatggtga

SEQ ID NO: 17962 - RNA, 20 nt, synthetic construct
  source 1..20: mol_type = other RNA
tgtgtctcttgactgcataa

SEQ ID NO: 17963 - RNA, 20 nt, synthetic construct
  source 1..20: mol_type = other RNA
caaaagaaaacttttatgca

SEQ ID NO: 17964 - RNA, 20 nt, synthetic construct
  source 1..20: mol_type = other RNA
tttgagaattgtctgttaat

SEQ ID NO: 17965 - RNA, 20 nt, synthetic construct
  source 1..20: mol_type = other RNA
tgtaaatttgtttatgttct

SEQ ID NO: 17966 - RNA, 20 nt, synthetic construct
  source 1..20: mol_type = other RNA
ttgtagattctggatattag

SEQ ID NO: 17967 - RNA, 20 nt, synthetic construct
  source 1..20: mol_type = other RNA
ggatattagccctttgtcag

SEQ ID NO: 17968 - RNA, 20 nt, synthetic construct
  source 1..20: mol_type = other RNA
cccattctgtagcttgcctg

SEQ ID NO: 17969 - RNA, 20 nt, synthetic construct
  source 1..20: mol_type = other RNA
gtagcttgcctgttcattct

SEQ ID NO: 17970 - RNA, 20 nt, synthetic construct
  source 1..20: mol_type = other RNA
ttctgagggtagtttctttt

SEQ ID NO: 17971 - RNA, 20 nt, synthetic construct
  source 1..20: mol_type = other RNA
gagggtagtttcttttgctg

SEQ ID NO: 17972 - RNA, 20 nt, synthetic construct
  source 1..20: mol_type = other RNA
gcacagcaaaagaaactacc

SEQ ID NO: 17973 - RNA, 20 nt, synthetic construct
  source 1..20: mol_type = other RNA
tttgctgtgcagaagctctt

SEQ ID NO: 17974 - RNA, 20 nt, synthetic construct
  source 1..20: mol_type = other RNA
tgactaaatcaccaaaagca

SEQ ID NO: 17975 - RNA, 20 nt, synthetic construct
  source 1..20: mol_type = other RNA
ggacataggcatgggcaagg

SEQ ID NO: 17976 - RNA, 20 nt, synthetic construct
  source 1..20: mol_type = other RNA
tctagggtttatatggtttt

SEQ ID NO: 17977 - RNA, 20 nt, synthetic construct
  source 1..20: mol_type = other RNA
agggtttatatggttttagg

SEQ ID NO: 17978 - RNA, 20 nt, synthetic construct
  source 1..20: mol_type = other RNA
agatggattaaagacttaaa

SEQ ID NO: 17979 - RNA, 20 nt, synthetic construct
  source 1..20: mol_type = other RNA
ttacaccttatataaaaatt

SEQ ID NO: 17980 - RNA, 20 nt, synthetic construct
  source 1..20: mol_type = other RNA
gctttctacatatggctagg

SEQ ID NO: 17981 - RNA, 20 nt, synthetic construct
  source 1..20: mol_type = other RNA
acatatggctaggcagtttt

SEQ ID NO: 17982 - RNA, 20 nt, synthetic construct
  source 1..20: mol_type = other RNA
ctatttaatacatggtgctg

SEQ ID NO: 17983 - RNA, 20 nt, synthetic construct
  source 1..20: mol_type = other RNA
cagcaccatgtattaaatag

SEQ ID NO: 17984 - RNA, 20 nt, synthetic construct
  source 1..20: mol_type = other RNA
ctatttcttgtttttgtcag

SEQ ID NO: 17985 - RNA, 20 nt, synthetic construct
  source 1..20: mol_type = other RNA
tgtttttgtcaggtttgtca

SEQ ID NO: 17986 - RNA, 20 nt, synthetic construct
  source 1..20: mol_type = other RNA
gagggctctgttctgttcca

SEQ ID NO: 17987 - RNA, 20 nt, synthetic construct
  source 1..20: mol_type = other RNA
gttccattggtctatatctc

SEQ ID NO: 17988 - RNA, 20 nt, synthetic construct
  source 1..20: mol_type = other RNA
attggtctatatctctgttt

SEQ ID NO: 17989 - RNA, 20 nt, synthetic construct
  source 1..20: mol_type = other RNA
aactacattacaaggctaca

SEQ ID NO: 17990 - RNA, 20 nt, synthetic construct
  source 1..20: mol_type = other RNA
tatggaacaaaaaagagcat

SEQ ID NO: 17991 - RNA, 20 nt, synthetic construct
  source 1..20: mol_type = other RNA
atatgaactttaaagtagtt

SEQ ID NO: 17992 - RNA, 20 nt, synthetic construct
  source 1..20: mol_type = other RNA
cagaattggaaaaaactact

SEQ ID NO: 17993 - RNA, 20 nt, synthetic construct
  source 1..20: mol_type = other RNA
tcacagaattggaaaaaact

SEQ ID NO: 17994 - RNA, 20 nt, synthetic construct
  source 1..20: mol_type = other RNA
aattctgtgaagaaagtcat

SEQ ID NO: 17995 - RNA, 20 nt, synthetic construct
  source 1..20: mol_type = other RNA
gtgaagaaagtcattggtag

SEQ ID NO: 17996 - RNA, 20 nt, synthetic construct
  source 1..20: mol_type = other RNA
atgccatccccatcaagcta

SEQ ID NO: 17997 - RNA, 20 nt, synthetic construct
  source 1..20: mol_type = other RNA
caatattgattcttcctatc

SEQ ID NO: 17998 - RNA, 20 nt, synthetic construct
  source 1..20: mol_type = other RNA
atgctcatggataggaagaa

SEQ ID NO: 17999 - RNA, 20 nt, synthetic construct
  source 1..20: mol_type = other RNA
tcctatccatgagcatggaa

SEQ ID NO: 18000 - RNA, 20 nt, synthetic construct
  source 1..20: mol_type = other RNA
tatccatgagcatggaatgt

SEQ ID NO: 18001 - RNA, 20 nt, synthetic construct
  source 1..20: mol_type = other RNA
tccatttgtttgtgtcctct

SEQ ID NO: 18002 - RNA, 20 nt, synthetic construct
  source 1..20: mol_type = other RNA
atttgtttgtgtcctctttt

SEQ ID NO: 18003 - RNA, 20 nt, synthetic construct
  source 1..20: mol_type = other RNA
ttaagcagtggtttgtagtt

SEQ ID NO: 18004 - RNA, 20 nt, synthetic construct
  source 1..20: mol_type = other RNA
aggagaactacaaaccactg

SEQ ID NO: 18005 - RNA, 20 nt, synthetic construct
  source 1..20: mol_type = other RNA
ccttgaagaggtccttccca

SEQ ID NO: 18006 - RNA, 20 nt, synthetic construct
  source 1..20: mol_type = other RNA
catcccttgtaagttggatt

SEQ ID NO: 18007 - RNA, 20 nt, synthetic construct
  source 1..20: mol_type = other RNA
aagagaataaaatacctagg

SEQ ID NO: 18008 - RNA, 20 nt, synthetic construct
  source 1..20: mol_type = other RNA
taggtattttattctctttg

SEQ ID NO: 18009 - RNA, 20 nt, synthetic construct
  source 1..20: mol_type = other RNA
caattgcttcaaagagaata

SEQ ID NO: 18010 - RNA, 20 nt, synthetic construct
  source 1..20: mol_type = other RNA
ctttgaagcaattgtgaatg

SEQ ID NO: 18011 - RNA, 20 nt, synthetic construct
  source 1..20: mol_type = other RNA
tccatgtccctacaaaggac

SEQ ID NO: 18012 - RNA, 20 nt, synthetic construct
  source 1..20: mol_type = other RNA
tgtcctttgtagggacatgg

SEQ ID NO: 18013 - RNA, 20 nt, synthetic construct
  source 1..20: mol_type = other RNA
catacatgacttcatgtcct

SEQ ID NO: 18014 - RNA, 20 nt, synthetic construct
  source 1..20: mol_type = other RNA
gcaaagtctcaagatacaaa

SEQ ID NO: 18015 - RNA, 20 nt, synthetic construct
  source 1..20: mol_type = other RNA
cagaccaaaatctccttaag

SEQ ID NO: 18016 - RNA, 20 nt, synthetic construct
  source 1..20: mol_type = other RNA
aaatatacaatcatgtcatc

SEQ ID NO: 18017 - RNA, 20 nt, synthetic construct
  source 1..20: mol_type = other RNA
gttaggaaaagaggaagtta

SEQ ID NO: 18018 - RNA, 20 nt, synthetic construct
  source 1..20: mol_type = other RNA
tcttttcctaactgaatacc

SEQ ID NO: 18019 - RNA, 20 nt, synthetic construct
  source 1..20: mol_type = other RNA
taactgaataccctttattt

SEQ ID NO: 18020 - RNA, 20 nt, synthetic construct
  source 1..20: mol_type = other RNA
ttctcctgcctaattgccct

SEQ ID NO: 18021 - RNA, 20 nt, synthetic construct
  source 1..20: mol_type = other RNA
ggccagggcaattaggcagg

SEQ ID NO: 18022 - RNA, 20 nt, synthetic construct
  source 1..20: mol_type = other RNA
cctgcctaattgccctggcc

SEQ ID NO: 18023 - RNA, 20 nt, synthetic construct
  source 1..20: mol_type = other RNA
acatagtgttggaagttctg

SEQ ID NO: 18024 - RNA, 20 nt, synthetic construct
  source 1..20: mol_type = other RNA
aacactatgttgaataggag

SEQ ID NO: 18025 - RNA, 20 nt, synthetic construct
  source 1..20: mol_type = other RNA
ctttgaaaactggcacaaga

SEQ ID NO: 18026 - RNA, 20 nt, synthetic construct
  source 1..20: mol_type = other RNA
aagggaatgcttccagtttt

SEQ ID NO: 18027 - RNA, 20 nt, synthetic construct
  source 1..20: mol_type = other RNA
agtttttgcccattcagtat

SEQ ID NO: 18028 - RNA, 20 nt, synthetic construct
  source 1..20: mol_type = other RNA
gtatgatattggctatgggt

SEQ ID NO: 18029 - RNA, 20 nt, synthetic construct
  source 1..20: mol_type = other RNA
acagctctccatgctgaact

SEQ ID NO: 18030 - RNA, 20 nt, synthetic construct
  source 1..20: mol_type = other RNA
gcatggagagctgttgaatt

SEQ ID NO: 18031 - RNA, 20 nt, synthetic construct
  source 1..20: mol_type = other RNA
gcatctattgagataatcat

SEQ ID NO: 18032 - RNA, 20 nt, synthetic construct
  source 1..20: mol_type = other RNA
gtttatatgatggattacat

SEQ ID NO: 18033 - RNA, 20 nt, synthetic construct
  source 1..20: mol_type = other RNA
acatatgcaaatcaataaat

SEQ ID NO: 18034 - RNA, 20 nt, synthetic construct
  source 1..20: mol_type = other RNA
gtttgccagtattttattga

SEQ ID NO: 18035 - RNA, 20 nt, synthetic construct
  source 1..20: mol_type = other RNA
tcatggatgttggtctaaaa

SEQ ID NO: 18036 - RNA, 20 nt, synthetic construct
  source 1..20: mol_type = other RNA
catttttgttgtgtctctgc

SEQ ID NO: 18037 - RNA, 20 nt, synthetic construct
  source 1..20: mol_type = other RNA
aatcatagaaaaagagggaa

SEQ ID NO: 18038 - RNA, 20 nt, synthetic construct
  source 1..20: mol_type = other RNA
ctctttttctatgattggaa

SEQ ID NO: 18039 - RNA, 20 nt, synthetic construct
  source 1..20: mol_type = other RNA
gaaactattccaatcataga

SEQ ID NO: 18040 - RNA, 20 nt, synthetic construct
  source 1..20: mol_type = other RNA
tctgaaactattccaatcat

SEQ ID NO: 18041 - RNA, 20 nt, synthetic construct
  source 1..20: mol_type = other RNA
atgattggaatagtttcaga

SEQ ID NO: 18042 - RNA, 20 nt, synthetic construct
  source 1..20: mol_type = other RNA
gaagaattggtaccagctcc

SEQ ID NO: 18043 - RNA, 20 nt, synthetic construct
  source 1..20: mol_type = other RNA
accacagatacaaagaggag

SEQ ID NO: 18044 - RNA, 20 nt, synthetic construct
  source 1..20: mol_type = other RNA
tagccgaattctaccacaga

SEQ ID NO: 18045 - RNA, 20 nt, synthetic construct
  source 1..20: mol_type = other RNA
gctatgaatctctcctggac

SEQ ID NO: 18046 - RNA, 20 nt, synthetic construct
  source 1..20: mol_type = other RNA
gagcctgttattggtctatt

SEQ ID NO: 18047 - RNA, 20 nt, synthetic construct
  source 1..20: mol_type = other RNA
aggattcaatttctttctgg

SEQ ID NO: 18048 - RNA, 20 nt, synthetic construct
  source 1..20: mol_type = other RNA
atttctttctggtttagtct

SEQ ID NO: 18049 - RNA, 20 nt, synthetic construct
  source 1..20: mol_type = other RNA
ttctggtttagtcttggtag

SEQ ID NO: 18050 - RNA, 20 nt, synthetic construct
  source 1..20: mol_type = other RNA
ggtttagtcttggtagggtg

SEQ ID NO: 18051 - RNA, 20 nt, synthetic construct
  source 1..20: mol_type = other RNA
tggacacatacaccctacca

SEQ ID NO: 18052 - RNA, 20 nt, synthetic construct
  source 1..20: mol_type = other RNA
atttcttctagattttctag

SEQ ID NO: 18053 - RNA, 20 nt, synthetic construct
  source 1..20: mol_type = other RNA
tctagattttctagtttatt

SEQ ID NO: 18054 - RNA, 20 nt, synthetic construct
  source 1..20: mol_type = other RNA
agattttctagtttatttgc

SEQ ID NO: 18055 - RNA, 20 nt, synthetic construct
  source 1..20: mol_type = other RNA
agtttatttgcacagaggtg

SEQ ID NO: 18056 - RNA, 20 nt, synthetic construct
  source 1..20: mol_type = other RNA
ctgatggtagtttgtatttc

SEQ ID NO: 18057 - RNA, 20 nt, synthetic construct
  source 1..20: mol_type = other RNA
gtgggattggtagtgatatc

SEQ ID NO: 18058 - RNA, 20 nt, synthetic construct
  source 1..20: mol_type = other RNA
tctctcttttcttctttatt

SEQ ID NO: 18059 - RNA, 20 nt, synthetic construct
  source 1..20: mol_type = other RNA
ctcttttcttctttattagt

SEQ ID NO: 18060 - RNA, 20 nt, synthetic construct
  source 1..20: mol_type = other RNA
tctttattagtcttgctagt

SEQ ID NO: 18061 - RNA, 20 nt, synthetic construct
  source 1..20: mol_type = other RNA
ttattagtcttgctagtggt

SEQ ID NO: 18062 - RNA, 20 nt, synthetic construct
  source 1..20: mol_type = other RNA
aaaaaccagctcctggattc

SEQ ID NO: 18063 - RNA, 20 nt, synthetic construct
  source 1..20: mol_type = other RNA
aaacatcaatgaatccagga

SEQ ID NO: 18064 - RNA, 20 nt, synthetic construct
  source 1..20: mol_type = other RNA
ttgatgttttgaaggttttt

SEQ ID NO: 18065 - RNA, 20 nt, synthetic construct
  source 1..20: mol_type = other RNA
gttctgctctggtcttagtt

SEQ ID NO: 18066 - RNA, 20 nt, synthetic construct
  source 1..20: mol_type = other RNA
gctctggtcttagttatttc

SEQ ID NO: 18067 - RNA, 20 nt, synthetic construct
  source 1..20: mol_type = other RNA
tgccttctgctagcttttta

SEQ ID NO: 18068 - RNA, 20 nt, synthetic construct
  source 1..20: mol_type = other RNA
gctagctttttaatgtgttt

SEQ ID NO: 18069 - RNA, 20 nt, synthetic construct
  source 1..20: mol_type = other RNA
ctagttcttttaatggtgat

SEQ ID NO: 18070 - RNA, 20 nt, synthetic construct
  source 1..20: mol_type = other RNA
tttaatggtgatgttagggt

SEQ ID NO: 18071 - RNA, 20 nt, synthetic construct
  source 1..20: mol_type = other RNA
tgctttctcttgtgggcatt

SEQ ID NO: 18072 - RNA, 20 nt, synthetic construct
  source 1..20: mol_type = other RNA
cttgtgggcatttagtgctg

SEQ ID NO: 18073 - RNA, 20 nt, synthetic construct
  source 1..20: mol_type = other RNA
ggtatgttgtgtctttgttg

SEQ ID NO: 18074 - RNA, 20 nt, synthetic construct
  source 1..20: mol_type = other RNA
ttgaaaccaatgacaacaaa

SEQ ID NO: 18075 - RNA, 20 nt, synthetic construct
  source 1..20: mol_type = other RNA
aagaatatctttatttctgc

SEQ ID NO: 18076 - RNA, 20 nt, synthetic construct
  source 1..20: mol_type = other RNA
gccttcatttcgttacatac

SEQ ID NO: 18077 - RNA, 20 nt, synthetic construct
  source 1..20: mol_type = other RNA
tttcgttacatacccagtag

SEQ ID NO: 18078 - RNA, 20 nt, synthetic construct
  source 1..20: mol_type = other RNA
ttacatacccagtagtcact

SEQ ID NO: 18079 - RNA, 20 nt, synthetic construct
  source 1..20: mol_type = other RNA
gtttccatatagttgagcag

SEQ ID NO: 18080 - RNA, 20 nt, synthetic construct
  source 1..20: mol_type = other RNA
atatagttgagcagttttta

SEQ ID NO: 18081 - RNA, 20 nt, synthetic construct
  source 1..20: mol_type = other RNA
taatcctgagtcctagtttg

SEQ ID NO: 18082 - RNA, 20 nt, synthetic construct
  source 1..20: mol_type = other RNA
tcagcaaatgtaaaagaaca

SEQ ID NO: 18083 - RNA, 20 nt, synthetic construct
  source 1..20: mol_type = other RNA
gttcttttacatttgctgag

SEQ ID NO: 18084 - RNA, 20 nt, synthetic construct
  source 1..20: mol_type = other RNA
tttacatttgctgaggaatg

SEQ ID NO: 18085 - RNA, 20 nt, synthetic construct
  source 1..20: mol_type = other RNA
gaaattgaccagatagttgg

SEQ ID NO: 18086 - RNA, 20 nt, synthetic construct
  source 1..20: mol_type = other RNA
aactatctggtcaatttcag

SEQ ID NO: 18087 - RNA, 20 nt, synthetic construct
  source 1..20: mol_type = other RNA
gaataagtgcgatgtggtgc

SEQ ID NO: 18088 - RNA, 20 nt, synthetic construct
  source 1..20: mol_type = other RNA
cagcaccacatcgcacttat

SEQ ID NO: 18089 - RNA, 20 nt, synthetic construct
  source 1..20: mol_type = other RNA
tctcagcaccacatcgcact

SEQ ID NO: 18090 - RNA, 20 nt, synthetic construct
  source 1..20: mol_type = other RNA
gttgatttggggtggagagt

SEQ ID NO: 18091 - RNA, 20 nt, synthetic construct
  source 1..20: mol_type = other RNA
gtagatgtctattaggtctg

SEQ ID NO: 18092 - RNA, 20 nt, synthetic construct
  source 1..20: mol_type = other RNA
attcctggatatccatgtta

SEQ ID NO: 18093 - RNA, 20 nt, synthetic construct
  source 1..20: mol_type = other RNA
tggatatccatgttaacttt

SEQ ID NO: 18094 - RNA, 20 nt, synthetic construct
  source 1..20: mol_type = other RNA
gtctcattgatctgtctaat

SEQ ID NO: 18095 - RNA, 20 nt, synthetic construct
  source 1..20: mol_type = other RNA
taaagcaagtccttagagac

SEQ ID NO: 18096 - RNA, 20 nt, synthetic construct
  source 1..20: mol_type = other RNA
tgttaaattggtccctttac

SEQ ID NO: 18097 - RNA, 20 nt, synthetic construct
  source 1..20: mol_type = other RNA
ttgtctcttttgatctttgt

SEQ ID NO: 18098 - RNA, 20 nt, synthetic construct
  source 1..20: mol_type = other RNA
atttgcttggtagatcttcc

SEQ ID NO: 18099 - RNA, 20 nt, synthetic construct
  source 1..20: mol_type = other RNA
tccatccctttattttgagc

SEQ ID NO: 18100 - RNA, 20 nt, synthetic construct
  source 1..20: mol_type = other RNA
gaagacacatctcacgtgca

SEQ ID NO: 18101 - RNA, 20 nt, synthetic construct
  source 1..20: mol_type = other RNA
gaatacagcacactgatgga

SEQ ID NO: 18102 - RNA, 20 nt, synthetic construct
  source 1..20: mol_type = other RNA
agtctgtgtcttttaattgg

SEQ ID NO: 18103 - RNA, 20 nt, synthetic construct
  source 1..20: mol_type = other RNA
cacataaaaatattaacctt

SEQ ID NO: 18104 - RNA, 20 nt, synthetic construct
  source 1..20: mol_type = other RNA
ctggttattttgctcattag

SEQ ID NO: 18105 - RNA, 20 nt, synthetic construct
  source 1..20: mol_type = other RNA
tcctagcatcgatggttttt

SEQ ID NO: 18106 - RNA, 20 nt, synthetic construct
  source 1..20: mol_type = other RNA
tagcatcgatggtttttaca

SEQ ID NO: 18107 - RNA, 20 nt, synthetic construct
  source 1..20: mol_type = other RNA
ttccatgtttagtgcttcct

SEQ ID NO: 18108 - RNA, 20 nt, synthetic construct
  source 1..20: mol_type = other RNA
atgtttagtgcttccttcag

SEQ ID NO: 18109 - RNA, 20 nt, synthetic construct
  source 1..20: mol_type = other RNA
ttcaggagctcttgtaaggc

SEQ ID NO: 18110 - RNA, 20 nt, synthetic construct
  source 1..20: mol_type = other RNA
ggagctcttgtaaggcaggc

SEQ ID NO: 18111 - RNA, 20 nt, synthetic construct
  source 1..20: mol_type = other RNA
taagtgaaggagaaataaaa

SEQ ID NO: 18112 - RNA, 20 nt, synthetic construct
  source 1..20: mol_type = other RNA
ccttcacttatgaagcttag

SEQ ID NO: 18113 - RNA, 20 nt, synthetic construct
  source 1..20: mol_type = other RNA
cttatgaagcttagtttggc

SEQ ID NO: 18114 - RNA, 20 nt, synthetic construct
  source 1..20: mol_type = other RNA
actgagaatatcatatccag

SEQ ID NO: 18115 - RNA, 20 nt, synthetic construct
  source 1..20: mol_type = other RNA
cagttgaaaattcttttctt

SEQ ID NO: 18116 - RNA, 20 nt, synthetic construct
  source 1..20: mol_type = other RNA
taaagaaaagaattttcaac

SEQ ID NO: 18117 - RNA, 20 nt, synthetic construct
  source 1..20: mol_type = other RNA
acattcttaaagaaaagaat

SEQ ID NO: 18118 - RNA, 20 nt, synthetic construct
  source 1..20: mol_type = other RNA
tttctttaagaatgttgaat

SEQ ID NO: 18119 - RNA, 20 nt, synthetic construct
  source 1..20: mol_type = other RNA
ttaagaatgttgaatattgg

SEQ ID NO: 18120 - RNA, 20 nt, synthetic construct
  source 1..20: mol_type = other RNA
ggcttgtagagtttctgctg

SEQ ID NO: 18121 - RNA, 20 nt, synthetic construct
  source 1..20: mol_type = other RNA
gctgagagatctgctgttag

SEQ ID NO: 18122 - RNA, 20 nt, synthetic construct
  source 1..20: mol_type = other RNA
ctttgtgggtaacccgacct

SEQ ID NO: 18123 - RNA, 20 nt, synthetic construct
  source 1..20: mol_type = other RNA
ccagaaaggtcgggttaccc

SEQ ID NO: 18124 - RNA, 20 nt, synthetic construct
  source 1..20: mol_type = other RNA
ggtgaatctgacaattatgt

SEQ ID NO: 18125 - RNA, 20 nt, synthetic construct
  source 1..20: mol_type = other RNA
cgaggagtatttttgtggca

SEQ ID NO: 18126 - RNA, 20 nt, synthetic construct
  source 1..20: mol_type = other RNA
ggaaatacagagaatgccac

SEQ ID NO: 18127 - RNA, 20 nt, synthetic construct
  source 1..20: mol_type = other RNA
aattcaggaaatacagagaa

SEQ ID NO: 18128 - RNA, 20 nt, synthetic construct
  source 1..20: mol_type = other RNA
ctgtatttcctgaatttgaa

SEQ ID NO: 18129 - RNA, 20 nt, synthetic construct
  source 1..20: mol_type = other RNA
tgaatttgaatgttggcctg

SEQ ID NO: 18130 - RNA, 20 nt, synthetic construct
  source 1..20: mol_type = other RNA
ccaacctacaaaggcaggcc

SEQ ID NO: 18131 - RNA, 20 nt, synthetic construct
  source 1..20: mol_type = other RNA
ggatattatccaggagaact

SEQ ID NO: 18132 - RNA, 20 nt, synthetic construct
  source 1..20: mol_type = other RNA
cctggataatatcctgaaga

SEQ ID NO: 18133 - RNA, 20 nt, synthetic construct
  source 1..20: mol_type = other RNA
aacttggttccattctcctc

SEQ ID NO: 18134 - RNA, 20 nt, synthetic construct
  source 1..20: mol_type = other RNA
attctcctcgtcactttcag

SEQ ID NO: 18135 - RNA, 20 nt, synthetic construct
  source 1..20: mol_type = other RNA
cctcgtcactttcaggtaca

SEQ ID NO: 18136 - RNA, 20 nt, synthetic construct
  source 1..20: mol_type = other RNA
ggtacaccaagcagatgtag

SEQ ID NO: 18137 - RNA, 20 nt, synthetic construct
  source 1..20: mol_type = other RNA
catagtcccatatttattgg

SEQ ID NO: 18138 - RNA, 20 nt, synthetic construct
  source 1..20: mol_type = other RNA
tttctttttactcctttttt

SEQ ID NO: 18139 - RNA, 20 nt, synthetic construct
  source 1..20: mol_type = other RNA
ttttactcctttttttctct

SEQ ID NO: 18140 - RNA, 20 nt, synthetic construct
  source 1..20: mol_type = other RNA
ctaaacttctcttctcgctt

SEQ ID NO: 18141 - RNA, 20 nt, synthetic construct
  source 1..20: mol_type = other RNA
cttctcgcttcatttcattc

SEQ ID NO: 18142 - RNA, 20 nt, synthetic construct
  source 1..20: mol_type = other RNA
cgcttcatttcattcatttg

SEQ ID NO: 18143 - RNA, 20 nt, synthetic construct
  source 1..20: mol_type = other RNA
tttcattcatttgatcttta

SEQ ID NO: 18144 - RNA, 20 nt, synthetic construct
  source 1..20: mol_type = other RNA
ttcatttgatctttaatcac

SEQ ID NO: 18145 - RNA, 20 nt, synthetic construct
  source 1..20: mol_type = other RNA
tttgatctttaatcactgat

SEQ ID NO: 18146 - RNA, 20 nt, synthetic construct
  source 1..20: mol_type = other RNA
atcaagtggaagaaagggta

SEQ ID NO: 18147 - RNA, 20 nt, synthetic construct
  source 1..20: mol_type = other RNA
tccacttgattgaatcaact

SEQ ID NO: 18148 - RNA, 20 nt, synthetic construct
  source 1..20: mol_type = other RNA
gtagttgattcaatcaagtg

SEQ ID NO: 18149 - RNA, 20 nt, synthetic construct
  source 1..20: mol_type = other RNA
acttgattgaatcaactact

SEQ ID NO: 18150 - RNA, 20 nt, synthetic construct
  source 1..20: mol_type = other RNA
tgtgtcacgtagttctcgtg

SEQ ID NO: 18151 - RNA, 20 nt, synthetic construct
  source 1..20: mol_type = other RNA
cgtgccatggttttcagctc

SEQ ID NO: 18152 - RNA, 20 nt, synthetic construct
  source 1..20: mol_type = other RNA
gctccattagatcatttaag

SEQ ID NO: 18153 - RNA, 20 nt, synthetic construct
  source 1..20: mol_type = other RNA
ctatgctgtttattttagtc

SEQ ID NO: 18154 - RNA, 20 nt, synthetic construct
  source 1..20: mol_type = other RNA
tctaaactttttcaaggttt

SEQ ID NO: 18155 - RNA, 20 nt, synthetic construct
  source 1..20: mol_type = other RNA
aggtttttagcttctttgca

SEQ ID NO: 18156 - RNA, 20 nt, synthetic construct
  source 1..20: mol_type = other RNA
aacccattgcaaagaagcta

SEQ ID NO: 18157 - RNA, 20 nt, synthetic construct
  source 1..20: mol_type = other RNA
ttgcaatgggttcgaacatc

SEQ ID NO: 18158 - RNA, 20 nt, synthetic construct
  source 1..20: mol_type = other RNA
ccgagctaaagaaggatgtt

SEQ ID NO: 18159 - RNA, 20 nt, synthetic construct
  source 1..20: mol_type = other RNA
aacatccttctttagctcgg

SEQ ID NO: 18160 - RNA, 20 nt, synthetic construct
  source 1..20: mol_type = other RNA
ttagctcggagaaatttgtt

SEQ ID NO: 18161 - RNA, 20 nt, synthetic construct
  source 1..20: mol_type = other RNA
gacgatctgtaataacaaat

SEQ ID NO: 18162 - RNA, 20 nt, synthetic construct
  source 1..20: mol_type = other RNA
tctctcaactcatcaaagtc

SEQ ID NO: 18163 - RNA, 20 nt, synthetic construct
  source 1..20: mol_type = other RNA
ctcaactcatcaaagtcatt

SEQ ID NO: 18164 - RNA, 20 nt, synthetic construct
  source 1..20: mol_type = other RNA
ctgtccagctttgttctgtt

SEQ ID NO: 18165 - RNA, 20 nt, synthetic construct
  source 1..20: mol_type = other RNA
gttgctcgtgaggagctgcg

SEQ ID NO: 18166 - RNA, 20 nt, synthetic construct
  source 1..20: mol_type = other RNA
cctccgaaggaacgcagctc

SEQ ID NO: 18167 - RNA, 20 nt, synthetic construct
  source 1..20: mol_type = other RNA
ttcggaggagaagaggcacc

SEQ ID NO: 18168 - RNA, 20 nt, synthetic construct
  source 1..20: mol_type = other RNA
gaggagaagaggcaccctga

SEQ ID NO: 18169 - RNA, 20 nt, synthetic construct
  source 1..20: mol_type = other RNA
aaaaatcagggtgcctcttc

SEQ ID NO: 18170 - RNA, 20 nt, synthetic construct
  source 1..20: mol_type = other RNA
gctgttctgctctggtttct

SEQ ID NO: 18171 - RNA, 20 nt, synthetic construct
  source 1..20: mol_type = other RNA
gctctggtttctccccatct

SEQ ID NO: 18172 - RNA, 20 nt, synthetic construct
  source 1..20: mol_type = other RNA
ccccatctttgtggtttatc

SEQ ID NO: 18173 - RNA, 20 nt, synthetic construct
  source 1..20: mol_type = other RNA
tgatgatggtgatgtacaga

SEQ ID NO: 18174 - RNA, 20 nt, synthetic construct
  source 1..20: mol_type = other RNA
gtttgttagttttccttcta

SEQ ID NO: 18175 - RNA, 20 nt, synthetic construct
  source 1..20: mol_type = other RNA
ttctaacagtcaggaccctc

SEQ ID NO: 18176 - RNA, 20 nt, synthetic construct
  source 1..20: mol_type = other RNA
aacagtcaggaccctcagct

SEQ ID NO: 18177 - RNA, 20 nt, synthetic construct
  source 1..20: mol_type = other RNA
gcagcctccactggtaatac

SEQ ID NO: 18178 - RNA, 20 nt, synthetic construct
  source 1..20: mol_type = other RNA
gtaatatttgctgttctgca

SEQ ID NO: 18179 - RNA, 20 nt, synthetic construct
  source 1..20: mol_type = other RNA
agaggaagaatcaggcagca

SEQ ID NO: 18180 - RNA, 20 nt, synthetic construct
  source 1..20: mol_type = other RNA
tcctctggaagcttcatctc

SEQ ID NO: 18181 - RNA, 20 nt, synthetic construct
  source 1..20: mol_type = other RNA
tctggaagcttcatctcaga

SEQ ID NO: 18182 - RNA, 20 nt, synthetic construct
  source 1..20: mol_type = other RNA
tctcagaggggcacccagct

SEQ ID NO: 18183 - RNA, 20 nt, synthetic construct
  source 1..20: mol_type = other RNA
cagatctcaaactctctgct

SEQ ID NO: 18184 - RNA, 20 nt, synthetic construct
  source 1..20: mol_type = other RNA
cccagcagagagtttgagat

SEQ ID NO: 18185 - RNA, 20 nt, synthetic construct
  source 1..20: mol_type = other RNA
aagctgtcagacagggatgt

SEQ ID NO: 18186 - RNA, 20 nt, synthetic construct
  source 1..20: mol_type = other RNA
gcagacttaaacatccctgt

SEQ ID NO: 18187 - RNA, 20 nt, synthetic construct
  source 1..20: mol_type = other RNA
gctgccttttgttcagctat

SEQ ID NO: 18188 - RNA, 20 nt, synthetic construct
  source 1..20: mol_type = other RNA
gctatgccctgcccccagag

SEQ ID NO: 18189 - RNA, 20 nt, synthetic construct
  source 1..20: mol_type = other RNA
tggtcgctttgtttacctac

SEQ ID NO: 18190 - RNA, 20 nt, synthetic construct
  source 1..20: mol_type = other RNA
gtctcagactactgtgctag

SEQ ID NO: 18191 - RNA, 20 nt, synthetic construct
  source 1..20: mol_type = other RNA
atctcagactgctgtactag

SEQ ID NO: 18192 - RNA, 20 nt, synthetic construct
  source 1..20: mol_type = other RNA
aatggtcttagcaaacggca

SEQ ID NO: 18193 - RNA, 20 nt, synthetic construct
  source 1..20: mol_type = other RNA
gggtacatctgtcatggctt

SEQ ID NO: 18194 - RNA, 20 nt, synthetic construct
  source 1..20: mol_type = other RNA
tagccaagggaagccatgac

SEQ ID NO: 18195 - RNA, 20 nt, synthetic construct
  source 1..20: mol_type = other RNA
ctttcctagccaagggaagc

SEQ ID NO: 18196 - RNA, 20 nt, synthetic construct
  source 1..20: mol_type = other RNA
cttggctaggaaagggaatt

SEQ ID NO: 18197 - RNA, 20 nt, synthetic construct
  source 1..20: mol_type = other RNA
ctgaccccttacacttcccg

SEQ ID NO: 18198 - RNA, 20 nt, synthetic construct
  source 1..20: mol_type = other RNA
cgggtgaggcaatatcccgc

SEQ ID NO: 18199 - RNA, 20 nt, synthetic construct
  source 1..20: mol_type = other RNA
gctcactctccgtgggctgc

SEQ ID NO: 18200 - RNA, 20 nt, synthetic construct
  source 1..20: mol_type = other RNA
tctcaccggggcttgtcaga

SEQ ID NO: 18201 - RNA, 20 nt, synthetic construct
  source 1..20: mol_type = other RNA
agctgaggtactgggttcat

SEQ ID NO: 18202 - RNA, 20 nt, synthetic construct
  source 1..20: mol_type = other RNA
gcatttccagctgaggtact

SEQ ID NO: 18203 - RNA, 20 nt, synthetic construct
  source 1..20: mol_type = other RNA
cagcatgagcaaagcagaag

SEQ ID NO: 18204 - RNA, 20 nt, synthetic construct
  source 1..20: mol_type = other RNA
gctttgctcatgctgggaac

SEQ ID NO: 18205 - RNA, 20 nt, synthetic construct
  source 1..20: mol_type = other RNA
agatggccgaataggaacag

SEQ ID NO: 18206 - RNA, 20 nt, synthetic construct
  source 1..20: mol_type = other RNA
tattcggccatcttgaaacc

SEQ ID NO: 18207 - RNA, 20 nt, synthetic construct
  source 1..20: mol_type = other RNA
gccatcttgaaacctcccct

SEQ ID NO: 18208 - RNA, 20 nt, synthetic construct
  source 1..20: mol_type = other RNA
tgctcctcagcctgcagacg

SEQ ID NO: 18209 - RNA, 20 nt, synthetic construct
  source 1..20: mol_type = other RNA
gactggcttttcttgctcct

SEQ ID NO: 18210 - RNA, 20 nt, synthetic construct
  source 1..20: mol_type = other RNA
gttttggaattcagactggc

SEQ ID NO: 18211 - RNA, 20 nt, synthetic construct
  source 1..20: mol_type = other RNA
tcagttttggaattcagact

SEQ ID NO: 18212 - RNA, 20 nt, synthetic construct
  source 1..20: mol_type = other RNA
aaaactgaagaaattggagt

SEQ ID NO: 18213 - RNA, 20 nt, synthetic construct
  source 1..20: mol_type = other RNA
tgcccttgaacatcagactc

SEQ ID NO: 18214 - RNA, 20 nt, synthetic construct
  source 1..20: mol_type = other RNA
agggcaggaaacatccagtg

SEQ ID NO: 18215 - RNA, 20 nt, synthetic construct
  source 1..20: mol_type = other RNA
ttggcactggatgtttcctg

SEQ ID NO: 18216 - RNA, 20 nt, synthetic construct
  source 1..20: mol_type = other RNA
acatctttctttggcactgg

SEQ ID NO: 18217 - RNA, 20 nt, synthetic construct
  source 1..20: mol_type = other RNA
ttaagaatgttgaatattct

SEQ ID NO: 18218 - RNA, 20 nt, synthetic construct
  source 1..20: mol_type = other RNA
acattcttaaagaaaataat

SEQ ID NO: 18219 - RNA, 20 nt, synthetic construct
  source 1..20: mol_type = other RNA
taaagaaaataattttcaac

SEQ ID NO: 18220 - RNA, 20 nt, synthetic construct
  source 1..20: mol_type = other RNA
aggttgaaaattattttctt

SEQ ID NO: 18221 - RNA, 20 nt, synthetic construct
  source 1..20: mol_type = other RNA
acctagaatttcatatccag

SEQ ID NO: 18222 - RNA, 20 nt, synthetic construct
  source 1..20: mol_type = other RNA
tatccagccaaactaagctt

SEQ ID NO: 18223 - RNA, 20 nt, synthetic construct
  source 1..20: mol_type = other RNA
cctttgttataaagcttagt

SEQ ID NO: 18224 - RNA, 20 nt, synthetic construct
  source 1..20: mol_type = other RNA
tcagcatttgcttgtttgta

SEQ ID NO: 18225 - RNA, 20 nt, synthetic construct
  source 1..20: mol_type = other RNA
ggacctcttgtaaggcaggc

SEQ ID NO: 18226 - RNA, 20 nt, synthetic construct
  source 1..20: mol_type = other RNA
tcaggacctcttgtaaggca

SEQ ID NO: 18227 - RNA, 20 nt, synthetic construct
  source 1..20: mol_type = other RNA
atatttagtgttttcttcag

SEQ ID NO: 18228 - RNA, 20 nt, synthetic construct
  source 1..20: mol_type = other RNA
tttccatatttagtgttttc

SEQ ID NO: 18229 - RNA, 20 nt, synthetic construct
  source 1..20: mol_type = other RNA
ttatagtgttgatggtgttt

SEQ ID NO: 18230 - RNA, 20 nt, synthetic construct
  source 1..20: mol_type = other RNA
cacataacaatattaacctt

SEQ ID NO: 18231 - RNA, 20 nt, synthetic construct
  source 1..20: mol_type = other RNA
cagtctgtgtcttttaattg

SEQ ID NO: 18232 - RNA, 20 nt, synthetic construct
  source 1..20: mol_type = other RNA
atttcccagtctgtgtcttt

SEQ ID NO: 18233 - RNA, 20 nt, synthetic construct
  source 1..20: mol_type = other RNA
gaacacagcaaaccaatggg

SEQ ID NO: 18234 - RNA, 20 nt, synthetic construct
  source 1..20: mol_type = other RNA
ccctgagatgggtcttctga

SEQ ID NO: 18235 - RNA, 20 nt, synthetic construct
  source 1..20: mol_type = other RNA
gaagacccatctcagggtga

SEQ ID NO: 18236 - RNA, 20 nt, synthetic construct
  source 1..20: mol_type = other RNA
ttattttgagcccatgtatg

SEQ ID NO: 18237 - RNA, 20 nt, synthetic construct
  source 1..20: mol_type = other RNA
tttctttattttgagcccat

SEQ ID NO: 18238 - RNA, 20 nt, synthetic construct
  source 1..20: mol_type = other RNA
ttcatttctttattttgagc

SEQ ID NO: 18239 - RNA, 20 nt, synthetic construct
  source 1..20: mol_type = other RNA
atttgcttggtaaatattcc

SEQ ID NO: 18240 - RNA, 20 nt, synthetic construct
  source 1..20: mol_type = other RNA
ttccatttgcttggtaaata

SEQ ID NO: 18241 - RNA, 20 nt, synthetic construct
  source 1..20: mol_type = other RNA
tcaaagactaagattgcaac

SEQ ID NO: 18242 - RNA, 20 nt, synthetic construct
  source 1..20: mol_type = other RNA
tgttgcattgatacttttac

SEQ ID NO: 18243 - RNA, 20 nt, synthetic construct
  source 1..20: mol_type = other RNA
tagagacctacaaagagact

SEQ ID NO: 18244 - RNA, 20 nt, synthetic construct
  source 1..20: mol_type = other RNA
acacaaaaatagtgggagac

SEQ ID NO: 18245 - RNA, 20 nt, synthetic construct
  source 1..20: mol_type = other RNA
gtcacgtcgatctaatattg

SEQ ID NO: 18246 - RNA, 20 nt, synthetic construct
  source 1..20: mol_type = other RNA
cgtcctgaatatccttgtta

SEQ ID NO: 18247 - RNA, 20 nt, synthetic construct
  source 1..20: mol_type = other RNA
ggacgtgaattcagctctgg

SEQ ID NO: 18248 - RNA, 20 nt, synthetic construct
  source 1..20: mol_type = other RNA
gctctggaccaagctgacct

SEQ ID NO: 18249 - RNA, 20 nt, synthetic construct
  source 1..20: mol_type = other RNA
gtagatgtctattaggtcag

SEQ ID NO: 18250 - RNA, 20 nt, synthetic construct
  source 1..20: mol_type = other RNA
gttgatttgtggtgtcgagt

SEQ ID NO: 18251 - RNA, 20 nt, synthetic construct
  source 1..20: mol_type = other RNA
tctcagcaccacattgcact

SEQ ID NO: 18252 - RNA, 20 nt, synthetic construct
  source 1..20: mol_type = other RNA
cagcaccacattgcacttat

SEQ ID NO: 18253 - RNA, 20 nt, synthetic construct
  source 1..20: mol_type = other RNA
aattatgtggtcaattttag

SEQ ID NO: 18254 - RNA, 20 nt, synthetic construct
  source 1..20: mol_type = other RNA
aaaattgaccacataattgg

SEQ ID NO: 18255 - RNA, 20 nt, synthetic construct
  source 1..20: mol_type = other RNA
acggcatttgctgagaagtg

SEQ ID NO: 18256 - RNA, 20 nt, synthetic construct
  source 1..20: mol_type = other RNA
attctacggcatttgctgag

SEQ ID NO: 18257 - RNA, 20 nt, synthetic construct
  source 1..20: mol_type = other RNA
cagcaaatgccgtagaatgg

SEQ ID NO: 18258 - RNA, 20 nt, synthetic construct
  source 1..20: mol_type = other RNA
agtttgattgcactttggtc

SEQ ID NO: 18259 - RNA, 20 nt, synthetic construct
  source 1..20: mol_type = other RNA
atatagttgtgtggttttga

SEQ ID NO: 18260 - RNA, 20 nt, synthetic construct
  source 1..20: mol_type = other RNA
gtttccatatagttgtgtgg

SEQ ID NO: 18261 - RNA, 20 nt, synthetic construct
  source 1..20: mol_type = other RNA
ggagcaggttgttcagtttc

SEQ ID NO: 18262 - RNA, 20 nt, synthetic construct
  source 1..20: mol_type = other RNA
gccttaattttgttatttac

SEQ ID NO: 18263 - RNA, 20 nt, synthetic construct
  source 1..20: mol_type = other RNA
aagaacttatctacttctgc

SEQ ID NO: 18264 - RNA, 20 nt, synthetic construct
  source 1..20: mol_type = other RNA
ctttggtttctaagaactta

SEQ ID NO: 18265 - RNA, 20 nt, synthetic construct
  source 1..20: mol_type = other RNA
tagaaaccaaagagaacaaa

SEQ ID NO: 18266 - RNA, 20 nt, synthetic construct
  source 1..20: mol_type = other RNA
ggcacattgtgtctttgttc

SEQ ID NO: 18267 - RNA, 20 nt, synthetic construct
  source 1..20: mol_type = other RNA
ctctaaacatggctttagct

SEQ ID NO: 18268 - RNA, 20 nt, synthetic construct
  source 1..20: mol_type = other RNA
cctgtgggcatttagtgcta

SEQ ID NO: 18269 - RNA, 20 nt, synthetic construct
  source 1..20: mol_type = other RNA
cgctttctcctgtgggcatt

SEQ ID NO: 18270 - RNA, 20 nt, synthetic construct
  source 1..20: mol_type = other RNA
ttgaattgtgatgttagggt

SEQ ID NO: 18271 - RNA, 20 nt, synthetic construct
  source 1..20: mol_type = other RNA
ctggttctttgaattgtgat

SEQ ID NO: 18272 - RNA, 20 nt, synthetic construct
  source 1..20: mol_type = other RNA
aagaaccagagaagcaagag

SEQ ID NO: 18273 - RNA, 20 nt, synthetic construct
  source 1..20: mol_type = other RNA
gctagcttttgtatttgttt

SEQ ID NO: 18274 - RNA, 20 nt, synthetic construct
  source 1..20: mol_type = other RNA
tgtcttctgctagcttttgt

SEQ ID NO: 18275 - RNA, 20 nt, synthetic construct
  source 1..20: mol_type = other RNA
gctctgatcttagttatttc

SEQ ID NO: 18276 - RNA, 20 nt, synthetic construct
  source 1..20: mol_type = other RNA
gttctgctctgatcttagtt

SEQ ID NO: 18277 - RNA, 20 nt, synthetic construct
  source 1..20: mol_type = other RNA
tgtctttatccccttcagtt

SEQ ID NO: 18278 - RNA, 20 nt, synthetic construct
  source 1..20: mol_type = other RNA
aaaaaccagctcttggattt

SEQ ID NO: 18279 - RNA, 20 nt, synthetic construct
  source 1..20: mol_type = other RNA
atgtattttgttaatctttt

SEQ ID NO: 18280 - RNA, 20 nt, synthetic construct
  source 1..20: mol_type = other RNA
ttattagtctggctaggctt

SEQ ID NO: 18281 - RNA, 20 nt, synthetic construct
  source 1..20: mol_type = other RNA
tctttattagtctggctagg

SEQ ID NO: 18282 - RNA, 20 nt, synthetic construct
  source 1..20: mol_type = other RNA
ctattttcttctttattagt

SEQ ID NO: 18283 - RNA, 20 nt, synthetic construct
  source 1..20: mol_type = other RNA
tctctattttcttctttatt

SEQ ID NO: 18284 - RNA, 20 nt, synthetic construct
  source 1..20: mol_type = other RNA
ttattgtgtctatttgattc

SEQ ID NO: 18285 - RNA, 20 nt, synthetic construct
  source 1..20: mol_type = other RNA
gtggcatcattggtgatatc

SEQ ID NO: 18286 - RNA, 20 nt, synthetic construct
  source 1..20: mol_type = other RNA
ctgatggtagtttgtatttc

SEQ ID NO: 18287 - RNA, 20 nt, synthetic construct
  source 1..20: mol_type = other RNA
attttatttgcatagaggtg

SEQ ID NO: 18288 - RNA, 20 nt, synthetic construct
  source 1..20: mol_type = other RNA
tttagattttctattttatt

SEQ ID NO: 18289 - RNA, 20 nt, synthetic construct
  source 1..20: mol_type = other RNA
tggacacatacaccctccca

SEQ ID NO: 18290 - RNA, 20 nt, synthetic construct
  source 1..20: mol_type = other RNA
tggtttagtcttgggagggt

SEQ ID NO: 18291 - RNA, 20 nt, synthetic construct
  source 1..20: mol_type = other RNA
tcctggtttagtcttgggag

SEQ ID NO: 18292 - RNA, 20 nt, synthetic construct
  source 1..20: mol_type = other RNA
gggatttgacttcttcctgg

SEQ ID NO: 18293 - RNA, 20 nt, synthetic construct
  source 1..20: mol_type = other RNA
gaacttgttattggtctatt

SEQ ID NO: 18294 - RNA, 20 nt, synthetic construct
  source 1..20: mol_type = other RNA
gaaatcgaggcagtaattaa

SEQ ID NO: 18295 - RNA, 20 nt, synthetic construct
  source 1..20: mol_type = other RNA
ttgtacctctgttaggattt

SEQ ID NO: 18296 - RNA, 20 nt, synthetic construct
  source 1..20: mol_type = other RNA
gaaggaatagtactagctct

SEQ ID NO: 18297 - RNA, 20 nt, synthetic construct
  source 1..20: mol_type = other RNA
ttctgaaactattccacaca

SEQ ID NO: 18298 - RNA, 20 nt, synthetic construct
  source 1..20: mol_type = other RNA
attgtgtggaatagtttcag

SEQ ID NO: 18299 - RNA, 20 nt, synthetic construct
  source 1..20: mol_type = other RNA
gaaactattccacacaatag

SEQ ID NO: 18300 - RNA, 20 nt, synthetic construct
  source 1..20: mol_type = other RNA
acacaatagaaaaagaggga

SEQ ID NO: 18301 - RNA, 20 nt, synthetic construct
  source 1..20: mol_type = other RNA
gataccaaaacctggcagag

SEQ ID NO: 18302 - RNA, 20 nt, synthetic construct
  source 1..20: mol_type = other RNA
tgttgtgtctctgccaggtt

SEQ ID NO: 18303 - RNA, 20 nt, synthetic construct
  source 1..20: mol_type = other RNA
tttcttgttgtgtctctgcc

SEQ ID NO: 18304 - RNA, 20 nt, synthetic construct
  source 1..20: mol_type = other RNA
tcagggatgttggcctgaaa

SEQ ID NO: 18305 - RNA, 20 nt, synthetic construct
  source 1..20: mol_type = other RNA
ggccaacatccctgatgaac

SEQ ID NO: 18306 - RNA, 20 nt, synthetic construct
  source 1..20: mol_type = other RNA
cattgatgttcatcagggat

SEQ ID NO: 18307 - RNA, 20 nt, synthetic construct
  source 1..20: mol_type = other RNA
gtttgccagtattttattga

SEQ ID NO: 18308 - RNA, 20 nt, synthetic construct
  source 1..20: mol_type = other RNA
tccctgggatgcaaggctgg

SEQ ID NO: 18309 - RNA, 20 nt, synthetic construct
  source 1..20: mol_type = other RNA
acatattcaaatcaataaac

SEQ ID NO: 18310 - RNA, 20 nt, synthetic construct
  source 1..20: mol_type = other RNA
aatcaataaacataatccat

SEQ ID NO: 18311 - RNA, 20 nt, synthetic construct
  source 1..20: mol_type = other RNA
gtttatgtgatggattatgt

SEQ ID NO: 18312 - RNA, 20 nt, synthetic construct
  source 1..20: mol_type = other RNA
gcgtctattgcgataatcat

SEQ ID NO: 18313 - RNA, 20 nt, synthetic construct
  source 1..20: mol_type = other RNA
atacccaatcatgctaaaaa

SEQ ID NO: 18314 - RNA, 20 nt, synthetic construct
  source 1..20: mol_type = other RNA
gtatgatattggctatgcat

SEQ ID NO: 18315 - RNA, 20 nt, synthetic construct
  source 1..20: mol_type = other RNA
gctcattcagtatgatattg

SEQ ID NO: 18316 - RNA, 20 nt, synthetic construct
  source 1..20: mol_type = other RNA
agcttctgctcattcagtat

SEQ ID NO: 18317 - RNA, 20 nt, synthetic construct
  source 1..20: mol_type = other RNA
aagggaatgcttccagcttc

SEQ ID NO: 18318 - RNA, 20 nt, synthetic construct
  source 1..20: mol_type = other RNA
ctttgaaaaccagcacaaga

SEQ ID NO: 18319 - RNA, 20 nt, synthetic construct
  source 1..20: mol_type = other RNA
aatactatgttgaataggag

SEQ ID NO: 18320 - RNA, 20 nt, synthetic construct
  source 1..20: mol_type = other RNA
acatagtattggaaattctg

SEQ ID NO: 18321 - RNA, 20 nt, synthetic construct
  source 1..20: mol_type = other RNA
cttgcctgattgccctggac

SEQ ID NO: 18322 - RNA, 20 nt, synthetic construct
  source 1..20: mol_type = other RNA
gtccagggcaatcaggcaag

SEQ ID NO: 18323 - RNA, 20 nt, synthetic construct
  source 1..20: mol_type = other RNA
ttctcttgcctgattgccct

SEQ ID NO: 18324 - RNA, 20 nt, synthetic construct
  source 1..20: mol_type = other RNA
cacttgaatacctttatttc

SEQ ID NO: 18325 - RNA, 20 nt, synthetic construct
  source 1..20: mol_type = other RNA
agtgggaagagagggagtca

SEQ ID NO: 18326 - RNA, 20 nt, synthetic construct
  source 1..20: mol_type = other RNA
ctttgcagatgacatgattg

SEQ ID NO: 18327 - RNA, 20 nt, synthetic construct
  source 1..20: mol_type = other RNA
aaatatacaatcatgtcatc

SEQ ID NO: 18328 - RNA, 20 nt, synthetic construct
  source 1..20: mol_type = other RNA
gcaaagtctcaggatacaaa

SEQ ID NO: 18329 - RNA, 20 nt, synthetic construct
  source 1..20: mol_type = other RNA
tatacaccaataagagacac

SEQ ID NO: 18330 - RNA, 20 nt, synthetic construct
  source 1..20: mol_type = other RNA
ctcaggatttggctctgtgt

SEQ ID NO: 18331 - RNA, 20 nt, synthetic construct
  source 1..20: mol_type = other RNA
ctttgtagcaattgtgaatg

SEQ ID NO: 18332 - RNA, 20 nt, synthetic construct
  source 1..20: mol_type = other RNA
cattcacaattgctacaaag

SEQ ID NO: 18333 - RNA, 20 nt, synthetic construct
  source 1..20: mol_type = other RNA
caattgctacaaagagaata

SEQ ID NO: 18334 - RNA, 20 nt, synthetic construct
  source 1..20: mol_type = other RNA
taggtatattttattctctt

SEQ ID NO: 18335 - RNA, 20 nt, synthetic construct
  source 1..20: mol_type = other RNA
catcccttgtaagttggatt

SEQ ID NO: 18336 - RNA, 20 nt, synthetic construct
  source 1..20: mol_type = other RNA
ccttgaagaggtccttcaca

SEQ ID NO: 18337 - RNA, 20 nt, synthetic construct
  source 1..20: mol_type = other RNA
aggagaactacaaaccactg

SEQ ID NO: 18338 - RNA, 20 nt, synthetic construct
  source 1..20: mol_type = other RNA
ttgagcagtggtttgtagtt

SEQ ID NO: 18339 - RNA, 20 nt, synthetic construct
  source 1..20: mol_type = other RNA
atttgtttgtgtcctatctt

SEQ ID NO: 18340 - RNA, 20 nt, synthetic construct
  source 1..20: mol_type = other RNA
aatccattagcatggaatgt

SEQ ID NO: 18341 - RNA, 20 nt, synthetic construct
  source 1..20: mol_type = other RNA
tccaatccattagcatggaa

SEQ ID NO: 18342 - RNA, 20 nt, synthetic construct
  source 1..20: mol_type = other RNA
atgctaatggattggaagaa

SEQ ID NO: 18343 - RNA, 20 nt, synthetic construct
  source 1..20: mol_type = other RNA
caatattgattcttccaatc

SEQ ID NO: 18344 - RNA, 20 nt, synthetic construct
  source 1..20: mol_type = other RNA
atgttatccccatcaagcta

SEQ ID NO: 18345 - RNA, 20 nt, synthetic construct
  source 1..20: mol_type = other RNA
aattatgtgaagaaatcaat

SEQ ID NO: 18346 - RNA, 20 nt, synthetic construct
  source 1..20: mol_type = other RNA
tcacataattagaaaaaact

SEQ ID NO: 18347 - RNA, 20 nt, synthetic construct
  source 1..20: mol_type = other RNA
cataattagaaaaaactact

SEQ ID NO: 18348 - RNA, 20 nt, synthetic construct
  source 1..20: mol_type = other RNA
atatgaaattgaaagtagtt

SEQ ID NO: 18349 - RNA, 20 nt, synthetic construct
  source 1..20: mol_type = other RNA
attccatatgaaattgaaag

SEQ ID NO: 18350 - RNA, 20 nt, synthetic construct
  source 1..20: mol_type = other RNA
atttcatatggaatagaaaa

SEQ ID NO: 18351 - RNA, 20 nt, synthetic construct
  source 1..20: mol_type = other RNA
tatggaatagaaaaagggcc

SEQ ID NO: 18352 - RNA, 20 nt, synthetic construct
  source 1..20: mol_type = other RNA
ttttgcttaggttgtcttgg

SEQ ID NO: 18353 - RNA, 20 nt, synthetic construct
  source 1..20: mol_type = other RNA
aaatatactacaaggctaca

SEQ ID NO: 18354 - RNA, 20 nt, synthetic construct
  source 1..20: mol_type = other RNA
attggtctatatatctgttt

SEQ ID NO: 18355 - RNA, 20 nt, synthetic construct
  source 1..20: mol_type = other RNA
gttctattggtctatatatc

SEQ ID NO: 18356 - RNA, 20 nt, synthetic construct
  source 1..20: mol_type = other RNA
gaggcctctgttctgttcta

SEQ ID NO: 18357 - RNA, 20 nt, synthetic construct
  source 1..20: mol_type = other RNA
ccattgcttatttttgtcca

SEQ ID NO: 18358 - RNA, 20 nt, synthetic construct
  source 1..20: mol_type = other RNA
caacaccatttattaaatag

SEQ ID NO: 18359 - RNA, 20 nt, synthetic construct
  source 1..20: mol_type = other RNA
ctatttaataaatggtgttg

SEQ ID NO: 18360 - RNA, 20 nt, synthetic construct
  source 1..20: mol_type = other RNA
gcatatggctagccagtttt

SEQ ID NO: 18361 - RNA, 20 nt, synthetic construct
  source 1..20: mol_type = other RNA
gttttctgcatatggctagc

SEQ ID NO: 18362 - RNA, 20 nt, synthetic construct
  source 1..20: mol_type = other RNA
ttacaccttatacacaaatt

SEQ ID NO: 18363 - RNA, 20 nt, synthetic construct
  source 1..20: mol_type = other RNA
ttaatctatcttgagttaat

SEQ ID NO: 18364 - RNA, 20 nt, synthetic construct
  source 1..20: mol_type = other RNA
agggtttttatggttttagg

SEQ ID NO: 18365 - RNA, 20 nt, synthetic construct
  source 1..20: mol_type = other RNA
ctgtgttagccaagatggtc

SEQ ID NO: 18366 - RNA, 20 nt, synthetic construct
  source 1..20: mol_type = other RNA
cctgcctcagcctcccaagt

SEQ ID NO: 18367 - RNA, 20 nt, synthetic construct
  source 1..20: mol_type = other RNA
agggtttgattttttgtttt

SEQ ID NO: 18368 - RNA, 20 nt, synthetic construct
  source 1..20: mol_type = other RNA
tctagggtttgattttttgt

SEQ ID NO: 18369 - RNA, 20 nt, synthetic construct
  source 1..20: mol_type = other RNA
cccatgcctatgtcctgaat

SEQ ID NO: 18370 - RNA, 20 nt, synthetic construct
  source 1..20: mol_type = other RNA
ggacataggcatgggagaag

SEQ ID NO: 18371 - RNA, 20 nt, synthetic construct
  source 1..20: mol_type = other RNA
tgactaaaacagcaaaacca

SEQ ID NO: 18372 - RNA, 20 nt, synthetic construct
  source 1..20: mol_type = other RNA
gcacagcaaaaaactctcat

SEQ ID NO: 18373 - RNA, 20 nt, synthetic construct
  source 1..20: mol_type = other RNA
ctctgatgagagttttttgc

SEQ ID NO: 18374 - RNA, 20 nt, synthetic construct
  source 1..20: mol_type = other RNA
ccataggttgctttttcact

SEQ ID NO: 18375 - RNA, 20 nt, synthetic construct
  source 1..20: mol_type = other RNA
gtggtctagccatctgacaa

SEQ ID NO: 18376 - RNA, 20 nt, synthetic construct
  source 1..20: mol_type = other RNA
aaacattagccctttgtcag

SEQ ID NO: 18377 - RNA, 20 nt, synthetic construct
  source 1..20: mol_type = other RNA
tgtacatttgtttaagttgc

SEQ ID NO: 18378 - RNA, 20 nt, synthetic construct
  source 1..20: mol_type = other RNA
tatcctttgcccactttttg

SEQ ID NO: 18379 - RNA, 20 nt, synthetic construct
  source 1..20: mol_type = other RNA
tgtcagaagtgtctgttcat

SEQ ID NO: 18380 - RNA, 20 nt, synthetic construct
  source 1..20: mol_type = other RNA
gacaggaagacctttatgtg

SEQ ID NO: 18381 - RNA, 20 nt, synthetic construct
  source 1..20: mol_type = other RNA
tgtttgtcagccacataaag

SEQ ID NO: 18382 - RNA, 20 nt, synthetic construct
  source 1..20: mol_type = other RNA
ctaattaacagtgatgatga

SEQ ID NO: 18383 - RNA, 20 nt, synthetic construct
  source 1..20: mol_type = other RNA
atttgcatttctctaattaa

SEQ ID NO: 18384 - RNA, 20 nt, synthetic construct
  source 1..20: mol_type = other RNA
aacgggcatgagatggtatc

SEQ ID NO: 18385 - RNA, 20 nt, synthetic construct
  source 1..20: mol_type = other RNA
tgactttttaatgatcgcca

SEQ ID NO: 18386 - RNA, 20 nt, synthetic construct
  source 1..20: mol_type = other RNA
gcatctgttgtttcctgact

SEQ ID NO: 18387 - RNA, 20 nt, synthetic construct
  source 1..20: mol_type = other RNA
ccacacatcctcttcagcat

SEQ ID NO: 18388 - RNA, 20 nt, synthetic construct
  source 1..20: mol_type = other RNA
tctttctccacacatcctct

SEQ ID NO: 18389 - RNA, 20 nt, synthetic construct
  source 1..20: mol_type = other RNA
acaatggttgaactaattta

SEQ ID NO: 18390 - RNA, 20 nt, synthetic construct
  source 1..20: mol_type = other RNA
accattgtggaagacagtgc

SEQ ID NO: 18391 - RNA, 20 nt, synthetic construct
  source 1..20: mol_type = other RNA
agatccttgaggaatcaccg

SEQ ID NO: 18392 - RNA, 20 nt, synthetic construct
  source 1..20: mol_type = other RNA
ggttctagatccttgaggaa

SEQ ID NO: 18393 - RNA, 20 nt, synthetic construct
  source 1..20: mol_type = other RNA
tcaaggatctagaaccagaa

SEQ ID NO: 18394 - RNA, 20 nt, synthetic construct
  source 1..20: mol_type = other RNA
acaataaagacacatgcaca

SEQ ID NO: 18395 - RNA, 20 nt, synthetic construct
  source 1..20: mol_type = other RNA
aagtctttgctattgtgaat

SEQ ID NO: 18396 - RNA, 20 nt, synthetic construct
  source 1..20: mol_type = other RNA
caatagcaaagacttggaac

SEQ ID NO: 18397 - RNA, 20 nt, synthetic construct
  source 1..20: mol_type = other RNA
gttggttccaagtctttgct

SEQ ID NO: 18398 - RNA, 20 nt, synthetic construct
  source 1..20: mol_type = other RNA
ttatccagtctatcattgat

SEQ ID NO: 18399 - RNA, 20 nt, synthetic construct
  source 1..20: mol_type = other RNA
acagtgtatatgtgccacat

SEQ ID NO: 18400 - RNA, 20 nt, synthetic construct
  source 1..20: mol_type = other RNA
tgtcttttgcagggacatgg

SEQ ID NO: 18401 - RNA, 20 nt, synthetic construct
  source 1..20: mol_type = other RNA
tccatgtccctgcaaaagac

SEQ ID NO: 18402 - RNA, 20 nt, synthetic construct
  source 1..20: mol_type = other RNA
agcttcatccatgtccctgc

SEQ ID NO: 18403 - RNA, 20 nt, synthetic construct
  source 1..20: mol_type = other RNA
tgtgttagtttgctgagaat

SEQ ID NO: 18404 - RNA, 20 nt, synthetic construct
  source 1..20: mol_type = other RNA
gttcttgtgttagtttgctg

SEQ ID NO: 18405 - RNA, 20 nt, synthetic construct
  source 1..20: mol_type = other RNA
cagcaaactaacacaagaac

SEQ ID NO: 18406 - RNA, 20 nt, synthetic construct
  source 1..20: mol_type = other RNA
actcacacttatgagtgaga

SEQ ID NO: 18407 - RNA, 20 nt, synthetic construct
  source 1..20: mol_type = other RNA
cactcataagtgtgagttga

SEQ ID NO: 18408 - RNA, 20 nt, synthetic construct
  source 1..20: mol_type = other RNA
cattgttcaactcacactta

SEQ ID NO: 18409 - RNA, 20 nt, synthetic construct
  source 1..20: mol_type = other RNA
tgtgtccatgtgttctcatt

SEQ ID NO: 18410 - RNA, 20 nt, synthetic construct
  source 1..20: mol_type = other RNA
ccttcctgtgtccatgtgtt

SEQ ID NO: 18411 - RNA, 20 nt, synthetic construct
  source 1..20: mol_type = other RNA
cctaatccaatccctcccct

SEQ ID NO: 18412 - RNA, 20 nt, synthetic construct
  source 1..20: mol_type = other RNA
gagatacatgtgtagaatgt

SEQ ID NO: 18413 - RNA, 20 nt, synthetic construct
  source 1..20: mol_type = other RNA
acacatgtatctcagaactt

SEQ ID NO: 18414 - RNA, 20 nt, synthetic construct
  source 1..20: mol_type = other RNA
gtatcttattattattatac

SEQ ID NO: 18415 - RNA, 20 nt, synthetic construct
  source 1..20: mol_type = other RNA
gcagttctgtatcttattat

SEQ ID NO: 18416 - RNA, 20 nt, synthetic construct
  source 1..20: mol_type = other RNA
ttctgcagttctgtatctta

SEQ ID NO: 18417 - RNA, 20 nt, synthetic construct
  source 1..20: mol_type = other RNA
tattcattctgcagttctgt

SEQ ID NO: 18418 - RNA, 20 nt, synthetic construct
  source 1..20: mol_type = other RNA
ggagactcatttaagacata

SEQ ID NO: 18419 - RNA, 20 nt, synthetic construct
  source 1..20: mol_type = other RNA
acccatttactttaagttta

SEQ ID NO: 18420 - RNA, 20 nt, synthetic construct
  source 1..20: mol_type = other RNA
accagcatatgataagagtt

SEQ ID NO: 18421 - RNA, 20 nt, synthetic construct
  source 1..20: mol_type = other RNA
ttttatcattttgatcttcc

SEQ ID NO: 18422 - RNA, 20 nt, synthetic construct
  source 1..20: mol_type = other RNA
taaaaagttccatcaatatg

SEQ ID NO: 18423 - RNA, 20 nt, synthetic construct
  source 1..20: mol_type = other RNA
atcaatatgcctctatctta

SEQ ID NO: 18424 - RNA, 20 nt, synthetic construct
  source 1..20: mol_type = other RNA
ggaatagaattgcaggtttg

SEQ ID NO: 18425 - RNA, 20 nt, synthetic construct
  source 1..20: mol_type = other RNA
attcctgaatctttatccca

SEQ ID NO: 18426 - RNA, 20 nt, synthetic construct
  source 1..20: mol_type = other RNA
ttgggataaagattcaggaa

SEQ ID NO: 18427 - RNA, 20 nt, synthetic construct
  source 1..20: mol_type = other RNA
tgaatctttatcccaaggaa

SEQ ID NO: 18428 - RNA, 20 nt, synthetic construct
  source 1..20: mol_type = other RNA
tttccttgggataaagattc

SEQ ID NO: 18429 - RNA, 20 nt, synthetic construct
  source 1..20: mol_type = other RNA
tatagaactctttgtggact

SEQ ID NO: 18430 - RNA, 20 nt, synthetic construct
  source 1..20: mol_type = other RNA
atatgaatatttataggagc

SEQ ID NO: 18431 - RNA, 20 nt, synthetic construct
  source 1..20: mol_type = other RNA
aactgtaaaaataatttcaa

SEQ ID NO: 18432 - RNA, 20 nt, synthetic construct
  source 1..20: mol_type = other RNA
ttttgttattgatgaacatt

SEQ ID NO: 18433 - RNA, 20 nt, synthetic construct
  source 1..20: mol_type = other RNA
atgttcatcaataacaaaat

SEQ ID NO: 18434 - RNA, 20 nt, synthetic construct
  source 1..20: mol_type = other RNA
tcaataacaaaatgaaaaaa

SEQ ID NO: 18435 - RNA, 20 nt, synthetic construct
  source 1..20: mol_type = other RNA
tgagtatatttttgagctcc

SEQ ID NO: 18436 - RNA, 20 nt, synthetic construct
  source 1..20: mol_type = other RNA
ttcctgagtatatttttgag

SEQ ID NO: 18437 - RNA, 20 nt, synthetic construct
  source 1..20: mol_type = other RNA
acagaaattagtttttcctc

SEQ ID NO: 18438 - RNA, 20 nt, synthetic construct
  source 1..20: mol_type = other RNA
ttcaacagaaattagttttt

SEQ ID NO: 18439 - RNA, 20 nt, synthetic construct
  source 1..20: mol_type = other RNA
gtgaccccagaaactctctt

SEQ ID NO: 18440 - RNA, 20 nt, synthetic construct
  source 1..20: mol_type = other RNA
ggggtcacagaaatgttccg

SEQ ID NO: 18441 - RNA, 20 nt, synthetic construct
  source 1..20: mol_type = other RNA
gtgtggtgatgggagtttgg

SEQ ID NO: 18442 - RNA, 20 nt, synthetic construct
  source 1..20: mol_type = other RNA
cacagagtgagatgcacaga

SEQ ID NO: 18443 - RNA, 20 nt, synthetic construct
  source 1..20: mol_type = other RNA
gccctttttacagttgagat

SEQ ID NO: 18444 - RNA, 20 nt, synthetic construct
  source 1..20: mol_type = other RNA
ccaagcaactggatgtgcta

SEQ ID NO: 18445 - RNA, 20 nt, synthetic construct
  source 1..20: mol_type = other RNA
catggcacataatacgtttc

SEQ ID NO: 18446 - RNA, 20 nt, synthetic construct
  source 1..20: mol_type = other RNA
ggttttctcagagagctgca

SEQ ID NO: 18447 - RNA, 20 nt, synthetic construct
  source 1..20: mol_type = other RNA
cagagagctgcaggttagta

SEQ ID NO: 18448 - RNA, 20 nt, synthetic construct
  source 1..20: mol_type = other RNA
gacaagttgggtcaacgttc

SEQ ID NO: 18449 - RNA, 20 nt, synthetic construct
  source 1..20: mol_type = other RNA
tgcctcctaggaacgttgac

SEQ ID NO: 18450 - RNA, 20 nt, synthetic construct
  source 1..20: mol_type = other RNA
taggaggcatgaatgggagt

SEQ ID NO: 18451 - RNA, 20 nt, synthetic construct
  source 1..20: mol_type = other RNA
ctaagatccctccaccccag

SEQ ID NO: 18452 - RNA, 20 nt, synthetic construct
  source 1..20: mol_type = other RNA
gtgcctcttactccattgtt

SEQ ID NO: 18453 - RNA, 20 nt, synthetic construct
  source 1..20: mol_type = other RNA
gactcctctgtagccactcg

SEQ ID NO: 18454 - RNA, 20 nt, synthetic construct
  source 1..20: mol_type = other RNA
gatcccattgtctacccagc

SEQ ID NO: 18455 - RNA, 20 nt, synthetic construct
  source 1..20: mol_type = other RNA
ttcatctcatcctccattcc

SEQ ID NO: 18456 - RNA, 20 nt, synthetic construct
  source 1..20: mol_type = other RNA
tctcatcctccattccctca

SEQ ID NO: 18457 - RNA, 20 nt, synthetic construct
  source 1..20: mol_type = other RNA
ctcagtttcggagtggctgc

SEQ ID NO: 18458 - RNA, 20 nt, synthetic construct
  source 1..20: mol_type = other RNA
gagtggctgccgctagcaga

SEQ ID NO: 18459 - RNA, 20 nt, synthetic construct
  source 1..20: mol_type = other RNA
tgggcaggaccacctctcct

SEQ ID NO: 18460 - RNA, 20 nt, synthetic construct
  source 1..20: mol_type = other RNA
ctaggatgggttcctgggca

SEQ ID NO: 18461 - RNA, 20 nt, synthetic construct
  source 1..20: mol_type = other RNA
taattgcttttcactctaaa

SEQ ID NO: 18462 - RNA, 20 nt, synthetic construct
  source 1..20: mol_type = other RNA
ctctaaaagtagagcctttt

SEQ ID NO: 18463 - RNA, 20 nt, synthetic construct
  source 1..20: mol_type = other RNA
caggccagcccctttattta

SEQ ID NO: 18464 - RNA, 20 nt, synthetic construct
  source 1..20: mol_type = other RNA
gggaagaaacaacatccaac

SEQ ID NO: 18465 - RNA, 20 nt, synthetic construct
  source 1..20: mol_type = other RNA
tccctgaagtaatatatatc

SEQ ID NO: 18466 - RNA, 20 nt, synthetic construct
  source 1..20: mol_type = other RNA
ctgaagtaatatatatcagt

SEQ ID NO: 18467 - RNA, 20 nt, synthetic construct
  source 1..20: mol_type = other RNA
ctgtgtctctctctaggact

SEQ ID NO: 18468 - RNA, 20 nt, synthetic construct
  source 1..20: mol_type = other RNA
ccgtgttagccaggatggtc

SEQ ID NO: 18469 - RNA, 20 nt, synthetic construct
  source 1..20: mol_type = other RNA
cctgcctcagtctcctgagt

SEQ ID NO: 18470 - RNA, 20 nt, synthetic construct
  source 1..20: mol_type = other RNA
agccattctcctgcctcagt

SEQ ID NO: 18471 - RNA, 20 nt, synthetic construct
  source 1..20: mol_type = other RNA
aaatctatgtcatttattct

SEQ ID NO: 18472 - RNA, 20 nt, synthetic construct
  source 1..20: mol_type = other RNA
tccagaataaatgacataga

SEQ ID NO: 18473 - RNA, 20 nt, synthetic construct
  source 1..20: mol_type = other RNA
gccaactgcattcctccaga

SEQ ID NO: 18474 - RNA, 20 nt, synthetic construct
  source 1..20: mol_type = other RNA
ggaggaatgcagttggcaga

SEQ ID NO: 18475 - RNA, 20 nt, synthetic construct
  source 1..20: mol_type = other RNA
tccttctgccaactgcattc

SEQ ID NO: 18476 - RNA, 20 nt, synthetic construct
  source 1..20: mol_type = other RNA
gaatatcttcctccttctgc

SEQ ID NO: 18477 - RNA, 20 nt, synthetic construct
  source 1..20: mol_type = other RNA
gaatttttcttgtatacatt

SEQ ID NO: 18478 - RNA, 20 nt, synthetic construct
  source 1..20: mol_type = other RNA
tgtatacatttatgtatgat

SEQ ID NO: 18479 - RNA, 20 nt, synthetic construct
  source 1..20: mol_type = other RNA
aagatagattataattttta

SEQ ID NO: 18480 - RNA, 20 nt, synthetic construct
  source 1..20: mol_type = other RNA
aaagaaccatgtaaatttcc

SEQ ID NO: 18481 - RNA, 20 nt, synthetic construct
  source 1..20: mol_type = other RNA
ttagaacttgaggaccgttt

SEQ ID NO: 18482 - RNA, 20 nt, synthetic construct
  source 1..20: mol_type = other RNA
gaaaagcaaaaacggtcctc

SEQ ID NO: 18483 - RNA, 20 nt, synthetic construct
  source 1..20: mol_type = other RNA
gaatattattgtacctaaaa

SEQ ID NO: 18484 - RNA, 20 nt, synthetic construct
  source 1..20: mol_type = other RNA
cattttaggtacaataatat

SEQ ID NO: 18485 - RNA, 20 nt, synthetic construct
  source 1..20: mol_type = other RNA
ggggcacccagcgctgtcta

SEQ ID NO: 18486 - RNA, 20 nt, synthetic construct
  source 1..20: mol_type = other RNA
cgcctcttgtgacctgtgtt

SEQ ID NO: 18487 - RNA, 20 nt, synthetic construct
  source 1..20: mol_type = other RNA
aaaacaacacaggtcacaag

SEQ ID NO: 18488 - RNA, 20 nt, synthetic construct
  source 1..20: mol_type = other RNA
cggtcaggccactgcaaatt

SEQ ID NO: 18489 - RNA, 20 nt, synthetic construct
  source 1..20: mol_type = other RNA
cagaatctggattcctgcag

SEQ ID NO: 18490 - RNA, 20 nt, synthetic construct
  source 1..20: mol_type = other RNA
gggaaacaaccctggtgtta

SEQ ID NO: 18491 - RNA, 20 nt, synthetic construct
  source 1..20: mol_type = other RNA
gagcattgtgtcagattgca

SEQ ID NO: 18492 - RNA, 20 nt, synthetic construct
  source 1..20: mol_type = other RNA
gtttctgagcattgtgtcag

SEQ ID NO: 18493 - RNA, 20 nt, synthetic construct
  source 1..20: mol_type = other RNA
agttccaagcatggaggctc

SEQ ID NO: 18494 - RNA, 20 nt, synthetic construct
  source 1..20: mol_type = other RNA
gaatgagcctccatgcttgg

SEQ ID NO: 18495 - RNA, 20 nt, synthetic construct
  source 1..20: mol_type = other RNA
aagcatggaggctcattctg

SEQ ID NO: 18496 - RNA, 20 nt, synthetic construct
  source 1..20: mol_type = other RNA
tacctgcttcagaatgagcc

SEQ ID NO: 18497 - RNA, 20 nt, synthetic construct
  source 1..20: mol_type = other RNA
gaagcaggtaagaagtctgt

SEQ ID NO: 18498 - RNA, 20 nt, synthetic construct
  source 1..20: mol_type = other RNA
aatgtgtagatatctggcca

SEQ ID NO: 18499 - RNA, 20 nt, synthetic construct
  source 1..20: mol_type = other RNA
tcccaatgttcaaatgtgta

SEQ ID NO: 18500 - RNA, 20 nt, synthetic construct
  source 1..20: mol_type = other RNA
atctcttttcatcccaatgt

SEQ ID NO: 18501 - RNA, 20 nt, synthetic construct
  source 1..20: mol_type = other RNA
gcatcagtcagattttccat

SEQ ID NO: 18502 - RNA, 20 nt, synthetic construct
  source 1..20: mol_type = other RNA
gtgtagcatggaaggcttct

SEQ ID NO: 18503 - RNA, 20 nt, synthetic construct
  source 1..20: mol_type = other RNA
atgctacacagaaacttgag

SEQ ID NO: 18504 - RNA, 20 nt, synthetic construct
  source 1..20: mol_type = other RNA
acctgccataccctcaagtt

SEQ ID NO: 18505 - RNA, 20 nt, synthetic construct
  source 1..20: mol_type = other RNA
ttccacctgccataccctca

SEQ ID NO: 18506 - RNA, 20 nt, synthetic construct
  source 1..20: mol_type = other RNA
tgaagtcaccgcccacgcac

SEQ ID NO: 18507 - RNA, 20 nt, synthetic construct
  source 1..20: mol_type = other RNA
ggaatggtgcaaacccacct

SEQ ID NO: 18508 - RNA, 20 nt, synthetic construct
  source 1..20: mol_type = other RNA
taacaaagtgagtggtaagt

SEQ ID NO: 18509 - RNA, 20 nt, synthetic construct
  source 1..20: mol_type = other RNA
agacaaaattccaattctaa

SEQ ID NO: 18510 - RNA, 20 nt, synthetic construct
  source 1..20: mol_type = other RNA
aattctaacatcaggccaaa

SEQ ID NO: 18511 - RNA, 20 nt, synthetic construct
  source 1..20: mol_type = other RNA
aacatcaggccaaatttgtg

SEQ ID NO: 18512 - RNA, 20 nt, synthetic construct
  source 1..20: mol_type = other RNA
cactagtgagtgtttccagg

SEQ ID NO: 18513 - RNA, 20 nt, synthetic construct
  source 1..20: mol_type = other RNA
aggcatttattaaaatggac

SEQ ID NO: 18514 - RNA, 20 nt, synthetic construct
  source 1..20: mol_type = other RNA
ttgcaatcttcagcattgca

SEQ ID NO: 18515 - RNA, 20 nt, synthetic construct
  source 1..20: mol_type = other RNA
gcattgcagttgctgaggta

SEQ ID NO: 18516 - RNA, 20 nt, synthetic construct
  source 1..20: mol_type = other RNA
ccaggatgacaaactcagcg

SEQ ID NO: 18517 - RNA, 20 nt, synthetic construct
  source 1..20: mol_type = other RNA
atctaatcctggggctattt

SEQ ID NO: 18518 - RNA, 20 nt, synthetic construct
  source 1..20: mol_type = other RNA
gtggtatttactgccaaata

SEQ ID NO: 18519 - RNA, 20 nt, synthetic construct
  source 1..20: mol_type = other RNA
ctggcttatttcagtcttag

SEQ ID NO: 18520 - RNA, 20 nt, synthetic construct
  source 1..20: mol_type = other RNA
gtcttaggtaggctctgcac

SEQ ID NO: 18521 - RNA, 20 nt, synthetic construct
  source 1..20: mol_type = other RNA
aagcataggtgtgcagagcc

SEQ ID NO: 18522 - RNA, 20 nt, synthetic construct
  source 1..20: mol_type = other RNA
tgccttccaagcataggtgt

SEQ ID NO: 18523 - RNA, 20 nt, synthetic construct
  source 1..20: mol_type = other RNA
tggtgttcttgtgccttctt

SEQ ID NO: 18524 - RNA, 20 nt, synthetic construct
  source 1..20: mol_type = other RNA
atgagaagaaggcacaagaa

SEQ ID NO: 18525 - RNA, 20 nt, synthetic construct
  source 1..20: mol_type = other RNA
tgtgccttcttctcatggaa

SEQ ID NO: 18526 - RNA, 20 nt, synthetic construct
  source 1..20: mol_type = other RNA
tctcatggaacgtgcatctt

SEQ ID NO: 18527 - RNA, 20 nt, synthetic construct
  source 1..20: mol_type = other RNA
catggaacgtgcatctttgg

SEQ ID NO: 18528 - RNA, 20 nt, synthetic construct
  source 1..20: mol_type = other RNA
tctcaacacacaccaaagat

SEQ ID NO: 18529 - RNA, 20 nt, synthetic construct
  source 1..20: mol_type = other RNA
gctttgttgcaatgcaggat

SEQ ID NO: 18530 - RNA, 20 nt, synthetic construct
  source 1..20: mol_type = other RNA
agcatcctgcattgcaacaa

SEQ ID NO: 18531 - RNA, 20 nt, synthetic construct
  source 1..20: mol_type = other RNA
cttacagtagagacagggaa

SEQ ID NO: 18532 - RNA, 20 nt, synthetic construct
  source 1..20: mol_type = other RNA
ctgtctctactgtaagggaa

SEQ ID NO: 18533 - RNA, 20 nt, synthetic construct
  source 1..20: mol_type = other RNA
tagagaaggatggaggctaa

SEQ ID NO: 18534 - RNA, 20 nt, synthetic construct
  source 1..20: mol_type = other RNA
ctaagaagcaatgtgtcttt

SEQ ID NO: 18535 - RNA, 20 nt, synthetic construct
  source 1..20: mol_type = other RNA
tggtcctgcatctagtactt

SEQ ID NO: 18536 - RNA, 20 nt, synthetic construct
  source 1..20: mol_type = other RNA
ggtggacggggcagttcatg

SEQ ID NO: 18537 - RNA, 20 nt, synthetic construct
  source 1..20: mol_type = other RNA
ctagatgattgctcctgaaa

SEQ ID NO: 18538 - RNA, 20 nt, synthetic construct
  source 1..20: mol_type = other RNA
ggagcaatcatctagggaac

SEQ ID NO: 18539 - RNA, 20 nt, synthetic construct
  source 1..20: mol_type = other RNA
tgtctgtcccctactgacag

SEQ ID NO: 18540 - RNA, 20 nt, synthetic construct
  source 1..20: mol_type = other RNA
tgaaaacaatgaggcaggaa

SEQ ID NO: 18541 - RNA, 20 nt, synthetic construct
  source 1..20: mol_type = other RNA
tgcctcattgttttcatgaa

SEQ ID NO: 18542 - RNA, 20 nt, synthetic construct
  source 1..20: mol_type = other RNA
tgaacaaccagtagagagcc

SEQ ID NO: 18543 - RNA, 20 nt, synthetic construct
  source 1..20: mol_type = other RNA
tatggctctctactggttgt

SEQ ID NO: 18544 - RNA, 20 nt, synthetic construct
  source 1..20: mol_type = other RNA
aattgtaagagcactgatag

SEQ ID NO: 18545 - RNA, 20 nt, synthetic construct
  source 1..20: mol_type = other RNA
aaacctggtgggaaaaggac

SEQ ID NO: 18546 - RNA, 20 nt, synthetic construct
  source 1..20: mol_type = other RNA
caccaggttttgaatataaa

SEQ ID NO: 18547 - RNA, 20 nt, synthetic construct
  source 1..20: mol_type = other RNA
tagaaattttatattcaaaa

SEQ ID NO: 18548 - RNA, 20 nt, synthetic construct
  source 1..20: mol_type = other RNA
aatattttaataagttctta

SEQ ID NO: 18549 - RNA, 20 nt, synthetic construct
  source 1..20: mol_type = other RNA
aagaacttattaaaatatta

SEQ ID NO: 18550 - RNA, 20 nt, synthetic construct
  source 1..20: mol_type = other RNA
gcatgtccttctgcttgtga

SEQ ID NO: 18551 - RNA, 20 nt, synthetic construct
  source 1..20: mol_type = other RNA
ctttagtatactcacaagca

SEQ ID NO: 18552 - RNA, 20 nt, synthetic construct
  source 1..20: mol_type = other RNA
gcttgtgagtatactaaaga

SEQ ID NO: 18553 - RNA, 20 nt, synthetic construct
  source 1..20: mol_type = other RNA
gaattatgactgttctcttt

SEQ ID NO: 18554 - RNA, 20 nt, synthetic construct
  source 1..20: mol_type = other RNA
gaaactactgtcctgtttgt

SEQ ID NO: 18555 - RNA, 20 nt, synthetic construct
  source 1..20: mol_type = other RNA
catgtttctgcatactagta

SEQ ID NO: 18556 - RNA, 20 nt, synthetic construct
  source 1..20: mol_type = other RNA
gcatactagtagttactcag

SEQ ID NO: 18557 - RNA, 20 nt, synthetic construct
  source 1..20: mol_type = other RNA
gcaccaactgagcaaacccc

SEQ ID NO: 18558 - RNA, 20 nt, synthetic construct
  source 1..20: mol_type = other RNA
tgtgacagtggtggagaatg

SEQ ID NO: 18559 - RNA, 20 nt, synthetic construct
  source 1..20: mol_type = other RNA
ccaccactgtcacaggaagg

SEQ ID NO: 18560 - RNA, 20 nt, synthetic construct
  source 1..20: mol_type = other RNA
ggggtcctctgatgccggtg

SEQ ID NO: 18561 - RNA, 20 nt, synthetic construct
  source 1..20: mol_type = other RNA
aggaggaacttaagttggct

SEQ ID NO: 18562 - RNA, 20 nt, synthetic construct
  source 1..20: mol_type = other RNA
tcctagaagagccttgcttc

SEQ ID NO: 18563 - RNA, 20 nt, synthetic construct
  source 1..20: mol_type = other RNA
agctaacttgttaggacaaa

SEQ ID NO: 18564 - RNA, 20 nt, synthetic construct
  source 1..20: mol_type = other RNA
gggtctaagggaaatttgtc

SEQ ID NO: 18565 - RNA, 20 nt, synthetic construct
  source 1..20: mol_type = other RNA
cttagacccagaaggtgtgt

SEQ ID NO: 18566 - RNA, 20 nt, synthetic construct
  source 1..20: mol_type = other RNA
ctcagactctttgatcaaaa

SEQ ID NO: 18567 - RNA, 20 nt, synthetic construct
  source 1..20: mol_type = other RNA
atcagactattagaaaagat

SEQ ID NO: 18568 - RNA, 20 nt, synthetic construct
  source 1..20: mol_type = other RNA
gcttccatcagactattaga

SEQ ID NO: 18569 - RNA, 20 nt, synthetic construct
  source 1..20: mol_type = other RNA
aatagtctgatggaagcaga

SEQ ID NO: 18570 - RNA, 20 nt, synthetic construct
  source 1..20: mol_type = other RNA
acaaggctcataaaagatca

SEQ ID NO: 18571 - RNA, 20 nt, synthetic construct
  source 1..20: mol_type = other RNA
cccatgcaattctatcattc

SEQ ID NO: 18572 - RNA, 20 nt, synthetic construct
  source 1..20: mol_type = other RNA
atcattctaacctcccttct

SEQ ID NO: 18573 - RNA, 20 nt, synthetic construct
  source 1..20: mol_type = other RNA
gagaagggaggttagaatga

SEQ ID NO: 18574 - RNA, 20 nt, synthetic construct
  source 1..20: mol_type = other RNA
tttcagagaagggaggttag

SEQ ID NO: 18575 - RNA, 20 nt, synthetic construct
  source 1..20: mol_type = other RNA
aacctcccttctctgaaatg

SEQ ID NO: 18576 - RNA, 20 nt, synthetic construct
  source 1..20: mol_type = other RNA
ctgaaatgaaggctttttgc

SEQ ID NO: 18577 - RNA, 20 nt, synthetic construct
  source 1..20: mol_type = other RNA
catgtatatgagtatatata

SEQ ID NO: 18578 - RNA, 20 nt, synthetic construct
  source 1..20: mol_type = other RNA
gactagtatgtatatatata

SEQ ID NO: 18579 - RNA, 20 nt, synthetic construct
  source 1..20: mol_type = other RNA
tataagttagtattcatata

SEQ ID NO: 18580 - RNA, 20 nt, synthetic construct
  source 1..20: mol_type = other RNA
tatatatgttcatatatata

SEQ ID NO: 18581 - RNA, 20 nt, synthetic construct
  source 1..20: mol_type = other RNA
tatatatatgttcatacaga

SEQ ID NO: 18582 - RNA, 20 nt, synthetic construct
  source 1..20: mol_type = other RNA
tacagactagtattcatata

SEQ ID NO: 18583 - RNA, 20 nt, synthetic construct
  source 1..20: mol_type = other RNA
tatatatatacatatatata

SEQ ID NO: 18584 - RNA, 20 nt, synthetic construct
  source 1..20: mol_type = other RNA
ctagaacatatatatatata

SEQ ID NO: 18585 - RNA, 20 nt, synthetic construct
  source 1..20: mol_type = other RNA
agggaaacatgcaaggtttt

SEQ ID NO: 18586 - RNA, 20 nt, synthetic construct
  source 1..20: mol_type = other RNA
cacaggtttatatatattaa

SEQ ID NO: 18587 - RNA, 20 nt, synthetic construct
  source 1..20: mol_type = other RNA
gaaaactggagcttagaacc

SEQ ID NO: 18588 - RNA, 20 nt, synthetic construct
  source 1..20: mol_type = other RNA
aagctccagttttctgaagg

SEQ ID NO: 18589 - RNA, 20 nt, synthetic construct
  source 1..20: mol_type = other RNA
gaagggatatgggttgccag

SEQ ID NO: 18590 - RNA, 20 nt, synthetic construct
  source 1..20: mol_type = other RNA
tctcctggcaacccatatcc

SEQ ID NO: 18591 - RNA, 20 nt, synthetic construct
  source 1..20: mol_type = other RNA
tgcttttgctcttcctctcc

SEQ ID NO: 18592 - RNA, 20 nt, synthetic construct
  source 1..20: mol_type = other RNA
catctacattcttgcttttg

SEQ ID NO: 18593 - RNA, 20 nt, synthetic construct
  source 1..20: mol_type = other RNA
taattctcatctacattctt

SEQ ID NO: 18594 - RNA, 20 nt, synthetic construct
  source 1..20: mol_type = other RNA
gccataaatgactataaaag

SEQ ID NO: 18595 - RNA, 20 nt, synthetic construct
  source 1..20: mol_type = other RNA
acatgttggacaagagacag

SEQ ID NO: 18596 - RNA, 20 nt, synthetic construct
  source 1..20: mol_type = other RNA
aaattatctcagtcctgtac

SEQ ID NO: 18597 - RNA, 20 nt, synthetic construct
  source 1..20: mol_type = other RNA
ttttctaaattatctcagtc

SEQ ID NO: 18598 - RNA, 20 nt, synthetic construct
  source 1..20: mol_type = other RNA
tttccttttctaaattatct

SEQ ID NO: 18599 - RNA, 20 nt, synthetic construct
  source 1..20: mol_type = other RNA
ccaggaagaaagtcataata

SEQ ID NO: 18600 - RNA, 20 nt, synthetic construct
  source 1..20: mol_type = other RNA
tcctggagaaccttcctgga

SEQ ID NO: 18601 - RNA, 20 nt, synthetic construct
  source 1..20: mol_type = other RNA
gtccaggaaggttctccagg

SEQ ID NO: 18602 - RNA, 20 nt, synthetic construct
  source 1..20: mol_type = other RNA
tggagaaccttcctggactg

SEQ ID NO: 18603 - RNA, 20 nt, synthetic construct
  source 1..20: mol_type = other RNA
ttgcccttcagtccaggaag

SEQ ID NO: 18604 - RNA, 20 nt, synthetic construct
  source 1..20: mol_type = other RNA
tggactgaagggcaaggaat

SEQ ID NO: 18605 - RNA, 20 nt, synthetic construct
  source 1..20: mol_type = other RNA
gcaagactgctgtggttggc

SEQ ID NO: 18606 - RNA, 20 nt, synthetic construct
  source 1..20: mol_type = other RNA
tcagttcagcaagactgctg

SEQ ID NO: 18607 - RNA, 20 nt, synthetic construct
  source 1..20: mol_type = other RNA
tagctatcccaaactccagt

SEQ ID NO: 18608 - RNA, 20 nt, synthetic construct
  source 1..20: mol_type = other RNA
cattattacctagcatagaa

SEQ ID NO: 18609 - RNA, 20 nt, synthetic construct
  source 1..20: mol_type = other RNA
ttctcattattacctagcat

SEQ ID NO: 18610 - RNA, 20 nt, synthetic construct
  source 1..20: mol_type = other RNA
atgctaggtaataatgagaa

SEQ ID NO: 18611 - RNA, 20 nt, synthetic construct
  source 1..20: mol_type = other RNA
ccacaaattctttctcatta

SEQ ID NO: 18612 - RNA, 20 nt, synthetic construct
  source 1..20: mol_type = other RNA
gctccttttcaccacaaatt

SEQ ID NO: 18613 - RNA, 20 nt, synthetic construct
  source 1..20: mol_type = other RNA
ttcagctccttttcaccaca

SEQ ID NO: 18614 - RNA, 20 nt, synthetic construct
  source 1..20: mol_type = other RNA
atgcatattccttcagctcc

SEQ ID NO: 18615 - RNA, 20 nt, synthetic construct
  source 1..20: mol_type = other RNA
ccctgtgcatatgcagttta

SEQ ID NO: 18616 - RNA, 20 nt, synthetic construct
  source 1..20: mol_type = other RNA
ctgtcccactttgtagaatt

SEQ ID NO: 18617 - RNA, 20 nt, synthetic construct
  source 1..20: mol_type = other RNA
acaaagtgggacagagaacc

SEQ ID NO: 18618 - RNA, 20 nt, synthetic construct
  source 1..20: mol_type = other RNA
ccagtagtggttctctgtcc

SEQ ID NO: 18619 - RNA, 20 nt, synthetic construct
  source 1..20: mol_type = other RNA
ctgaatttgtcctttcccca

SEQ ID NO: 18620 - RNA, 20 nt, synthetic construct
  source 1..20: mol_type = other RNA
gggaaacagtgagctcaatg

SEQ ID NO: 18621 - RNA, 20 nt, synthetic construct
  source 1..20: mol_type = other RNA
gatcagcccgaggagagaca

SEQ ID NO: 18622 - RNA, 20 nt, synthetic construct
  source 1..20: mol_type = other RNA
atgaggtgtctctcctcggg

SEQ ID NO: 18623 - RNA, 20 nt, synthetic construct
  source 1..20: mol_type = other RNA
ggggtctctactgaatgccc

SEQ ID NO: 18624 - RNA, 20 nt, synthetic construct
  source 1..20: mol_type = other RNA
gtagagaccccagaaaagtc

SEQ ID NO: 18625 - RNA, 20 nt, synthetic construct
  source 1..20: mol_type = other RNA
aagaaggcataaatcctact

SEQ ID NO: 18626 - RNA, 20 nt, synthetic construct
  source 1..20: mol_type = other RNA
ggggtagtctttattctaag

SEQ ID NO: 18627 - RNA, 20 nt, synthetic construct
  source 1..20: mol_type = other RNA
tagaataaagactaccccag

SEQ ID NO: 18628 - RNA, 20 nt, synthetic construct
  source 1..20: mol_type = other RNA
gtcaggcagttaatttactt

SEQ ID NO: 18629 - RNA, 20 nt, synthetic construct
  source 1..20: mol_type = other RNA
tctgtcaggcagttaattta

SEQ ID NO: 18630 - RNA, 20 nt, synthetic construct
  source 1..20: mol_type = other RNA
caaggagtgacatcatttaa

SEQ ID NO: 18631 - RNA, 20 nt, synthetic construct
  source 1..20: mol_type = other RNA
tgcctcataaatttttaaat

SEQ ID NO: 18632 - RNA, 20 nt, synthetic construct
  source 1..20: mol_type = other RNA
cctagttatggatcacacta

SEQ ID NO: 18633 - RNA, 20 nt, synthetic construct
  source 1..20: mol_type = other RNA
tggtctatttgtattgactg

SEQ ID NO: 18634 - RNA, 20 nt, synthetic construct
  source 1..20: mol_type = other RNA
actatttcttggtctatttg

SEQ ID NO: 18635 - RNA, 20 nt, synthetic construct
  source 1..20: mol_type = other RNA
atcgtttctactatttcttg

SEQ ID NO: 18636 - RNA, 20 nt, synthetic construct
  source 1..20: mol_type = other RNA
ttgtcaattccatcgtttct

SEQ ID NO: 18637 - RNA, 20 nt, synthetic construct
  source 1..20: mol_type = other RNA
ttaaatctttgaacacaatt

SEQ ID NO: 18638 - RNA, 20 nt, synthetic construct
  source 1..20: mol_type = other RNA
tgttttctttaaatctttga

SEQ ID NO: 18639 - RNA, 20 nt, synthetic construct
  source 1..20: mol_type = other RNA
aagatttaaagaaaacatga

SEQ ID NO: 18640 - RNA, 20 nt, synthetic construct
  source 1..20: mol_type = other RNA
ctcatgttcatgttttcttt

SEQ ID NO: 18641 - RNA, 20 nt, synthetic construct
  source 1..20: mol_type = other RNA
gcatttgtttccctcatgtt

SEQ ID NO: 18642 - RNA, 20 nt, synthetic construct
  source 1..20: mol_type = other RNA
atttggttgttttacgcatt

SEQ ID NO: 18643 - RNA, 20 nt, synthetic construct
  source 1..20: mol_type = other RNA
ttaatttccatttggttgtt

SEQ ID NO: 18644 - RNA, 20 nt, synthetic construct
  source 1..20: mol_type = other RNA
gtaatgtataaactaatatt

SEQ ID NO: 18645 - RNA, 20 nt, synthetic construct
  source 1..20: mol_type = other RNA
tctgtaatgtataaactaat

SEQ ID NO: 18646 - RNA, 20 nt, synthetic construct
  source 1..20: mol_type = other RNA
ctttttcttctgtaatgtat

SEQ ID NO: 18647 - RNA, 20 nt, synthetic construct
  source 1..20: mol_type = other RNA
ggttcactttttcttctgta

SEQ ID NO: 18648 - RNA, 20 nt, synthetic construct
  source 1..20: mol_type = other RNA
ttgagttatcttctggttca

SEQ ID NO: 18649 - RNA, 20 nt, synthetic construct
  source 1..20: mol_type = other RNA
ctctctctctctctctgtgt

SEQ ID NO: 18650 - RNA, 20 nt, synthetic construct
  source 1..20: mol_type = other RNA
ctctctctctttctctctct

SEQ ID NO: 18651 - RNA, 20 nt, synthetic construct
  source 1..20: mol_type = other RNA
gcctttctctctctctcttt

SEQ ID NO: 18652 - RNA, 20 nt, synthetic construct
  source 1..20: mol_type = other RNA
atttatttttttcagccttt

SEQ ID NO: 18653 - RNA, 20 nt, synthetic construct
  source 1..20: mol_type = other RNA
ctgatatccttaaggttcta

SEQ ID NO: 18654 - RNA, 20 nt, synthetic construct
  source 1..20: mol_type = other RNA
gtgacttgctttacccatat

SEQ ID NO: 18655 - RNA, 20 nt, synthetic construct
  source 1..20: mol_type = other RNA
cgtccttctgtgacttgctt

SEQ ID NO: 18656 - RNA, 20 nt, synthetic construct
  source 1..20: mol_type = other RNA
gtcccaatatctccttcccg

SEQ ID NO: 18657 - RNA, 20 nt, synthetic construct
  source 1..20: mol_type = other RNA
gccatcattgctttgagtat

SEQ ID NO: 18658 - RNA, 20 nt, synthetic construct
  source 1..20: mol_type = other RNA
tacgtgtaaagtcttcagcc

SEQ ID NO: 18659 - RNA, 20 nt, synthetic construct
  source 1..20: mol_type = other RNA
tcatacgtgtaaagtcttca

SEQ ID NO: 18660 - RNA, 20 nt, synthetic construct
  source 1..20: mol_type = other RNA
tgactgtgagtttatcattt

SEQ ID NO: 18661 - RNA, 20 nt, synthetic construct
  source 1..20: mol_type = other RNA
ttgagcttcttgactgtgag

SEQ ID NO: 18662 - RNA, 20 nt, synthetic construct
  source 1..20: mol_type = other RNA
gattcattgagcttcttgac

SEQ ID NO: 18663 - RNA, 20 nt, synthetic construct
  source 1..20: mol_type = other RNA
tctggcttataagattatcc

SEQ ID NO: 18664 - RNA, 20 nt, synthetic construct
  source 1..20: mol_type = other RNA
ttactgtccctctatgtaaa

SEQ ID NO: 18665 - RNA, 20 nt, synthetic construct
  source 1..20: mol_type = other RNA
aaggagaaggcatcggtcac

SEQ ID NO: 18666 - RNA, 20 nt, synthetic construct
  source 1..20: mol_type = other RNA
ccttggaaacaatggcataa

SEQ ID NO: 18667 - RNA, 20 nt, synthetic construct
  source 1..20: mol_type = other RNA
ctttatcactttaaagatgt

SEQ ID NO: 18668 - RNA, 20 nt, synthetic construct
  source 1..20: mol_type = other RNA
tctggaggtggcagaatacg

SEQ ID NO: 18669 - RNA, 20 nt, synthetic construct
  source 1..20: mol_type = other RNA
gccacctccagaggaaacaa

SEQ ID NO: 18670 - RNA, 20 nt, synthetic construct
  source 1..20: mol_type = other RNA
tttgtttttttgcttgtttc

SEQ ID NO: 18671 - RNA, 20 nt, synthetic construct
  source 1..20: mol_type = other RNA
aaggcaggcttctgtattaa

SEQ ID NO: 18672 - RNA, 20 nt, synthetic construct
  source 1..20: mol_type = other RNA
ttaaaatcttttaatacaga

SEQ ID NO: 18673 - RNA, 20 nt, synthetic construct
  source 1..20: mol_type = other RNA
gtattaaaagattttaagga

SEQ ID NO: 18674 - RNA, 20 nt, synthetic construct
  source 1..20: mol_type = other RNA
acctgaataactttccttaa

SEQ ID NO: 18675 - RNA, 20 nt, synthetic construct
  source 1..20: mol_type = other RNA
tctacctgaataactttcct

SEQ ID NO: 18676 - RNA, 20 nt, synthetic construct
  source 1..20: mol_type = other RNA
ggtagaagaaaaataatacc

SEQ ID NO: 18677 - RNA, 20 nt, synthetic construct
  source 1..20: mol_type = other RNA
catctggtattatttttctt

SEQ ID NO: 18678 - RNA, 20 nt, synthetic construct
  source 1..20: mol_type = other RNA
ttacttagtatggattaaag

SEQ ID NO: 18679 - RNA, 20 nt, synthetic construct
  source 1..20: mol_type = other RNA
agggctcttcattacttagt

SEQ ID NO: 18680 - RNA, 20 nt, synthetic construct
  source 1..20: mol_type = other RNA
tattattttaattaatatca

SEQ ID NO: 18681 - RNA, 20 nt, synthetic construct
  source 1..20: mol_type = other RNA
acgtatgtagtagtaaaatt

SEQ ID NO: 18682 - RNA, 20 nt, synthetic construct
  source 1..20: mol_type = other RNA
taaaaacagtagcacaaata

SEQ ID NO: 18683 - RNA, 20 nt, synthetic construct
  source 1..20: mol_type = other RNA
agttatcatctgcattattt

SEQ ID NO: 18684 - RNA, 20 nt, synthetic construct
  source 1..20: mol_type = other RNA
tggataatgcaaaaaactca

SEQ ID NO: 18685 - RNA, 20 nt, synthetic construct
  source 1..20: mol_type = other RNA
accatctattaatattatat

SEQ ID NO: 18686 - RNA, 20 nt, synthetic construct
  source 1..20: mol_type = other RNA
tctcagtttaaatttttttg

SEQ ID NO: 18687 - RNA, 20 nt, synthetic construct
  source 1..20: mol_type = other RNA
tcttactatccattcctctc

SEQ ID NO: 18688 - RNA, 20 nt, synthetic construct
  source 1..20: mol_type = other RNA
tttgcataaaaggactattc

SEQ ID NO: 18689 - RNA, 20 nt, synthetic construct
  source 1..20: mol_type = other RNA
ttcttttgcataaaaggact

SEQ ID NO: 18690 - RNA, 20 nt, synthetic construct
  source 1..20: mol_type = other RNA
tccttcttttgcataaaagg

SEQ ID NO: 18691 - RNA, 20 nt, synthetic construct
  source 1..20: mol_type = other RNA
tctttttcttccttcttttg

SEQ ID NO: 18692 - RNA, 20 nt, synthetic construct
  source 1..20: mol_type = other RNA
ttattcctctttttcttcct

SEQ ID NO: 18693 - RNA, 20 nt, synthetic construct
  source 1..20: mol_type = other RNA
gtttacaccatatcttttat

SEQ ID NO: 18694 - RNA, 20 nt, synthetic construct
  source 1..20: mol_type = other RNA
gtttgtgtctacaataatgc

SEQ ID NO: 18695 - RNA, 20 nt, synthetic construct
  source 1..20: mol_type = other RNA
atttacaatctctgcctttt

SEQ ID NO: 18696 - RNA, 20 nt, synthetic construct
  source 1..20: mol_type = other RNA
aaaaagaacacacttagctg

SEQ ID NO: 18697 - RNA, 20 nt, synthetic construct
  source 1..20: mol_type = other RNA
ttttagaataaatactcttt

SEQ ID NO: 18698 - RNA, 20 nt, synthetic construct
  source 1..20: mol_type = other RNA
tattttggtgtttaaagtag

SEQ ID NO: 18699 - RNA, 20 nt, synthetic construct
  source 1..20: mol_type = other RNA
tggtatatatcctttttcat

SEQ ID NO: 18700 - RNA, 20 nt, synthetic construct
  source 1..20: mol_type = other RNA
ggttttcatggtatatatcc

SEQ ID NO: 18701 - RNA, 20 nt, synthetic construct
  source 1..20: mol_type = other RNA
cttattagtctttaggagtg

SEQ ID NO: 18702 - RNA, 20 nt, synthetic construct
  source 1..20: mol_type = other RNA
atttgaccacattcacttat

SEQ ID NO: 18703 - RNA, 20 nt, synthetic construct
  source 1..20: mol_type = other RNA
tcaatttgaccacattcact

SEQ ID NO: 18704 - RNA, 20 nt, synthetic construct
  source 1..20: mol_type = other RNA
gtatacatgctatgatcctt

SEQ ID NO: 18705 - RNA, 20 nt, synthetic construct
  source 1..20: mol_type = other RNA
aaaggatcatagcatgtata

SEQ ID NO: 18706 - RNA, 20 nt, synthetic construct
  source 1..20: mol_type = other RNA
cacactatgctcaaggacta

SEQ ID NO: 18707 - RNA, 20 nt, synthetic construct
  source 1..20: mol_type = other RNA
agtgcaaggtgtatagtcct

SEQ ID NO: 18708 - RNA, 20 nt, synthetic construct
  source 1..20: mol_type = other RNA
tcaacattgttttctagtgc

SEQ ID NO: 18709 - RNA, 20 nt, synthetic construct
  source 1..20: mol_type = other RNA
ttcctcaacattgttttcta

SEQ ID NO: 18710 - RNA, 20 nt, synthetic construct
  source 1..20: mol_type = other RNA
cgagaactgatatggagtct

SEQ ID NO: 18711 - RNA, 20 nt, synthetic construct
  source 1..20: mol_type = other RNA
tccaaagatcaatttcacga

SEQ ID NO: 18712 - RNA, 20 nt, synthetic construct
  source 1..20: mol_type = other RNA
cgtgaaattgatctttggat

SEQ ID NO: 18713 - RNA, 20 nt, synthetic construct
  source 1..20: mol_type = other RNA
aaaaaaggactgttgcaata

SEQ ID NO: 18714 - RNA, 20 nt, synthetic construct
  source 1..20: mol_type = other RNA
tgtacttttataagtcttta

SEQ ID NO: 18715 - RNA, 20 nt, synthetic construct
  source 1..20: mol_type = other RNA
agaccagccttagcaacaga

SEQ ID NO: 18716 - RNA, 20 nt, synthetic construct
  source 1..20: mol_type = other RNA
gagtagctgaaactacatgt

SEQ ID NO: 18717 - RNA, 20 nt, synthetic construct
  source 1..20: mol_type = other RNA
gctactcggaatgctgaggt

SEQ ID NO: 18718 - RNA, 20 nt, synthetic construct
  source 1..20: mol_type = other RNA
atcatccaggctggaatgca

SEQ ID NO: 18719 - RNA, 20 nt, synthetic construct
  source 1..20: mol_type = other RNA
agcctggatgatggaatgag

SEQ ID NO: 18720 - RNA, 20 nt, synthetic construct
  source 1..20: mol_type = other RNA
gtatagatggcaaagcaatt

SEQ ID NO: 18721 - RNA, 20 nt, synthetic construct
  source 1..20: mol_type = other RNA
atggagacaaaaatgtttta

SEQ ID NO: 18722 - RNA, 20 nt, synthetic construct
  source 1..20: mol_type = other RNA
gaatgattttgtaaaacatt

SEQ ID NO: 18723 - RNA, 20 nt, synthetic construct
  source 1..20: mol_type = other RNA
gaaccatttggatatccatg

SEQ ID NO: 18724 - RNA, 20 nt, synthetic construct
  source 1..20: mol_type = other RNA
gcttttgttttgtatcatgg

SEQ ID NO: 18725 - RNA, 20 nt, synthetic construct
  source 1..20: mol_type = other RNA
tctcaaattattttgatatc

SEQ ID NO: 18726 - RNA, 20 nt, synthetic construct
  source 1..20: mol_type = other RNA
acctaagtgtcagagctaaa

SEQ ID NO: 18727 - RNA, 20 nt, synthetic construct
  source 1..20: mol_type = other RNA
gttttagctctgacacttag

SEQ ID NO: 18728 - RNA, 20 nt, synthetic construct
  source 1..20: mol_type = other RNA
ggttcagttttagctctgac

SEQ ID NO: 18729 - RNA, 20 nt, synthetic construct
  source 1..20: mol_type = other RNA
tatttcaggttcagttttag

SEQ ID NO: 18730 - RNA, 20 nt, synthetic construct
  source 1..20: mol_type = other RNA
tggaactttcatatttcagg

SEQ ID NO: 18731 - RNA, 20 nt, synthetic construct
  source 1..20: mol_type = other RNA
atgaaaaaatataaaatctt

SEQ ID NO: 18732 - RNA, 20 nt, synthetic construct
  source 1..20: mol_type = other RNA
ccaaggttgtgaagatttta

SEQ ID NO: 18733 - RNA, 20 nt, synthetic construct
  source 1..20: mol_type = other RNA
caaccttggagaaggcaaac

SEQ ID NO: 18734 - RNA, 20 nt, synthetic construct
  source 1..20: mol_type = other RNA
tgaaagcccacattataatt

SEQ ID NO: 18735 - RNA, 20 nt, synthetic construct
  source 1..20: mol_type = other RNA
tgaaaactcatgcttaccaa

SEQ ID NO: 18736 - RNA, 20 nt, synthetic construct
  source 1..20: mol_type = other RNA
taacaatgacttttggtaag

SEQ ID NO: 18737 - RNA, 20 nt, synthetic construct
  source 1..20: mol_type = other RNA
catgtgttacttgcctattt

SEQ ID NO: 18738 - RNA, 20 nt, synthetic construct
  source 1..20: mol_type = other RNA
tctcatgtgttacttgccta

SEQ ID NO: 18739 - RNA, 20 nt, synthetic construct
  source 1..20: mol_type = other RNA
ggacacaagccatttgtcag

SEQ ID NO: 18740 - RNA, 20 nt, synthetic construct
  source 1..20: mol_type = other RNA
tatattctggacacaagcca

SEQ ID NO: 18741 - RNA, 20 nt, synthetic construct
  source 1..20: mol_type = other RNA
cccactcactaaacagagga

SEQ ID NO: 18742 - RNA, 20 nt, synthetic construct
  source 1..20: mol_type = other RNA
atctgttgcccattagttgt

SEQ ID NO: 18743 - RNA, 20 nt, synthetic construct
  source 1..20: mol_type = other RNA
tggggatagatagatgtaca

SEQ ID NO: 18744 - RNA, 20 nt, synthetic construct
  source 1..20: mol_type = other RNA
ggtgcttattggctatgtgt

SEQ ID NO: 18745 - RNA, 20 nt, synthetic construct
  source 1..20: mol_type = other RNA
tggctgagatactggacatt

SEQ ID NO: 18746 - RNA, 20 nt, synthetic construct
  source 1..20: mol_type = other RNA
taataatatccatgtccatt

SEQ ID NO: 18747 - RNA, 20 nt, synthetic construct
  source 1..20: mol_type = other RNA
catccttgctctacatcagt

SEQ ID NO: 18748 - RNA, 20 nt, synthetic construct
  source 1..20: mol_type = other RNA
ccagcatatgagagagtttc

SEQ ID NO: 18749 - RNA, 20 nt, synthetic construct
  source 1..20: mol_type = other RNA
aaagtggttgtatcattttg

SEQ ID NO: 18750 - RNA, 20 nt, synthetic construct
  source 1..20: mol_type = other RNA
ccaaaagttcaataaatgca

SEQ ID NO: 18751 - RNA, 20 nt, synthetic construct
  source 1..20: mol_type = other RNA
ataaatgcacttttacccta

SEQ ID NO: 18752 - RNA, 20 nt, synthetic construct
  source 1..20: mol_type = other RNA
caaacaggattgcaggtttg

SEQ ID NO: 18753 - RNA, 20 nt, synthetic construct
  source 1..20: mol_type = other RNA
gtggggtaaatattcacaaa

SEQ ID NO: 18754 - RNA, 20 nt, synthetic construct
  source 1..20: mol_type = other RNA
atttctgtggggtaaatatt

SEQ ID NO: 18755 - RNA, 20 nt, synthetic construct
  source 1..20: mol_type = other RNA
tggacttatgtttccatttc

SEQ ID NO: 18756 - RNA, 20 nt, synthetic construct
  source 1..20: mol_type = other RNA
tggagatgtcttcgtggact

SEQ ID NO: 18757 - RNA, 20 nt, synthetic construct
  source 1..20: mol_type = other RNA
tagcagctttattttttata

SEQ ID NO: 18758 - RNA, 20 nt, synthetic construct
  source 1..20: mol_type = other RNA
tattgattgacattgaaatt

SEQ ID NO: 18759 - RNA, 20 nt, synthetic construct
  source 1..20: mol_type = other RNA
ttttcttattgattgacatt

SEQ ID NO: 18760 - RNA, 20 nt, synthetic construct
  source 1..20: mol_type = other RNA
atgtcaatcaataagaaaat

SEQ ID NO: 18761 - RNA, 20 nt, synthetic construct
  source 1..20: mol_type = other RNA
caaattatttattcattttc

SEQ ID NO: 18762 - RNA, 20 nt, synthetic construct
  source 1..20: mol_type = other RNA
gcaataaaagggagcatgtt

SEQ ID NO: 18763 - RNA, 20 nt, synthetic construct
  source 1..20: mol_type = other RNA
atactatttgagagtatcaa

SEQ ID NO: 18764 - RNA, 20 nt, synthetic construct
  source 1..20: mol_type = other RNA
ttaatgtaatatttttgagc

SEQ ID NO: 18765 - RNA, 20 nt, synthetic construct
  source 1..20: mol_type = other RNA
tttttgttatctggcatctt

SEQ ID NO: 18766 - RNA, 20 nt, synthetic construct
  source 1..20: mol_type = other RNA
ggaaccttacatcaatagac

SEQ ID NO: 18767 - RNA, 20 nt, synthetic construct
  source 1..20: mol_type = other RNA
agaaaggtaaaactaatttc

SEQ ID NO: 18768 - RNA, 20 nt, synthetic construct
  source 1..20: mol_type = other RNA
ccagaaattagttttacctt

SEQ ID NO: 18769 - RNA, 20 nt, synthetic construct
  source 1..20: mol_type = other RNA
ttcaccagaaattagtttta

SEQ ID NO: 18770 - RNA, 20 nt, synthetic construct
  source 1..20: mol_type = other RNA
ggtgaaagaaaccaatatca

SEQ ID NO: 18771 - RNA, 20 nt, synthetic construct
  source 1..20: mol_type = other RNA
catggccagaggcaaatgat

SEQ ID NO: 18772 - RNA, 20 nt, synthetic construct
  source 1..20: mol_type = other RNA
ttttactgctcaatcaatct

SEQ ID NO: 18773 - RNA, 20 nt, synthetic construct
  source 1..20: mol_type = other RNA
ggggtgatgtaaatgtcctg

SEQ ID NO: 18774 - RNA, 20 nt, synthetic construct
  source 1..20: mol_type = other RNA
atcacaatacaggacattta

SEQ ID NO: 18775 - RNA, 20 nt, synthetic construct
  source 1..20: mol_type = other RNA
gatgaacatgtacacttgtg

SEQ ID NO: 18776 - RNA, 20 nt, synthetic construct
  source 1..20: mol_type = other RNA
tcagaagtcatcaaactaca

SEQ ID NO: 18777 - RNA, 20 nt, synthetic construct
  source 1..20: mol_type = other RNA
tgtatagtcaaatgcacaga

SEQ ID NO: 18778 - RNA, 20 nt, synthetic construct
  source 1..20: mol_type = other RNA
actgaggtatattttcatgt

SEQ ID NO: 18779 - RNA, 20 nt, synthetic construct
  source 1..20: mol_type = other RNA
ccaagcagctggctgtgtta

SEQ ID NO: 18780 - RNA, 20 nt, synthetic construct
  source 1..20: mol_type = other RNA
agcaagctggttctccaagc

SEQ ID NO: 18781 - RNA, 20 nt, synthetic construct
  source 1..20: mol_type = other RNA
ccattccagcaagctggttc

SEQ ID NO: 18782 - RNA, 20 nt, synthetic construct
  source 1..20: mol_type = other RNA
cacggtacataatacatttc

SEQ ID NO: 18783 - RNA, 20 nt, synthetic construct
  source 1..20: mol_type = other RNA
aggtttctcagacagccaca

SEQ ID NO: 18784 - RNA, 20 nt, synthetic construct
  source 1..20: mol_type = other RNA
tgacatgtggctgtctgaga

SEQ ID NO: 18785 - RNA, 20 nt, synthetic construct
  source 1..20: mol_type = other RNA
cagacagccacatgtcatga

SEQ ID NO: 18786 - RNA, 20 nt, synthetic construct
  source 1..20: mol_type = other RNA
gagaggttggagcaacattc

SEQ ID NO: 18787 - RNA, 20 nt, synthetic construct
  source 1..20: mol_type = other RNA
tcccaggaatgttgctccaa

SEQ ID NO: 18788 - RNA, 20 nt, synthetic construct
  source 1..20: mol_type = other RNA
ttcctcccaggaatgttgct

SEQ ID NO: 18789 - RNA, 20 nt, synthetic construct
  source 1..20: mol_type = other RNA
tgggaggaacgaaggggagc

SEQ ID NO: 18790 - RNA, 20 nt, synthetic construct
  source 1..20: mol_type = other RNA
ccaagatcccccaccaccgg

SEQ ID NO: 18791 - RNA, 20 nt, synthetic construct
  source 1..20: mol_type = other RNA
tgacagagtctcgctctgtc

SEQ ID NO: 18792 - RNA, 20 nt, synthetic construct
  source 1..20: mol_type = other RNA
agagattctcctgcctcagc

SEQ ID NO: 18793 - RNA, 20 nt, synthetic construct
  source 1..20: mol_type = other RNA
cctgcctcagcttcatgagt

SEQ ID NO: 18794 - RNA, 20 nt, synthetic construct
  source 1..20: mol_type = other RNA
tgagtagctgggactacaga

SEQ ID NO: 18795 - RNA, 20 nt, synthetic construct
  source 1..20: mol_type = other RNA
caaagtgctgggattacagg

SEQ ID NO: 18796 - RNA, 20 nt, synthetic construct
  source 1..20: mol_type = other RNA
gaaaaacaattgagtaagtg

SEQ ID NO: 18797 - RNA, 20 nt, synthetic construct
  source 1..20: mol_type = other RNA
gaaccctccatagctggtgg

SEQ ID NO: 18798 - RNA, 20 nt, synthetic construct
  source 1..20: mol_type = other RNA
gatcccatagtctagccagc

SEQ ID NO: 18799 - RNA, 20 nt, synthetic construct
  source 1..20: mol_type = other RNA
ttcatctcatcccccttctg

SEQ ID NO: 18800 - RNA, 20 nt, synthetic construct
  source 1..20: mol_type = other RNA
tctcatcccccttctgtcag

SEQ ID NO: 18801 - RNA, 20 nt, synthetic construct
  source 1..20: mol_type = other RNA
gtcagtcccgcagtggctgt

SEQ ID NO: 18802 - RNA, 20 nt, synthetic construct
  source 1..20: mol_type = other RNA
tgggcagaacctcctctcct

SEQ ID NO: 18803 - RNA, 20 nt, synthetic construct
  source 1..20: mol_type = other RNA
ctaggatgggttcctgggca

SEQ ID NO: 18804 - RNA, 20 nt, synthetic construct
  source 1..20: mol_type = other RNA
gcccaggaacccatcctaga

SEQ ID NO: 18805 - RNA, 20 nt, synthetic construct
  source 1..20: mol_type = other RNA
aggtcagcttttataagtct

SEQ ID NO: 18806 - RNA, 20 nt, synthetic construct
  source 1..20: mol_type = other RNA
ggtgggtcaagtgagtttga

SEQ ID NO: 18807 - RNA, 20 nt, synthetic construct
  source 1..20: mol_type = other RNA
tggttgtttttcactgtaaa

SEQ ID NO: 18808 - RNA, 20 nt, synthetic construct
  source 1..20: mol_type = other RNA
ctgtaaatgcagagcctttt

SEQ ID NO: 18809 - RNA, 20 nt, synthetic construct
  source 1..20: mol_type = other RNA
caggccagcctcccttactc

SEQ ID NO: 18810 - RNA, 20 nt, synthetic construct
  source 1..20: mol_type = other RNA
ccaaggaggaaatgccatcc

SEQ ID NO: 18811 - RNA, 20 nt, synthetic construct
  source 1..20: mol_type = other RNA
tccttggagaaatatatgtt

SEQ ID NO: 18812 - RNA, 20 nt, synthetic construct
  source 1..20: mol_type = other RNA
aactcacatgttactataca

SEQ ID NO: 18813 - RNA, 20 nt, synthetic construct
  source 1..20: mol_type = other RNA
acaggactgtatagtaacat

SEQ ID NO: 18814 - RNA, 20 nt, synthetic construct
  source 1..20: mol_type = other RNA
gccaagcacatacccctaga

SEQ ID NO: 18815 - RNA, 20 nt, synthetic construct
  source 1..20: mol_type = other RNA
tctaggggtatgtgcttggc

SEQ ID NO: 18816 - RNA, 20 nt, synthetic construct
  source 1..20: mol_type = other RNA
accttctgccaagcacatac

SEQ ID NO: 18817 - RNA, 20 nt, synthetic construct
  source 1..20: mol_type = other RNA
ggttcctttcttttgcacat

SEQ ID NO: 18818 - RNA, 20 nt, synthetic construct
  source 1..20: mol_type = other RNA
tttcttttgcacatttatgt

SEQ ID NO: 18819 - RNA, 20 nt, synthetic construct
  source 1..20: mol_type = other RNA
tttgcacatttatgtatgat

SEQ ID NO: 18820 - RNA, 20 nt, synthetic construct
  source 1..20: mol_type = other RNA
cccaggctgttctcatgaca

SEQ ID NO: 18821 - RNA, 20 nt, synthetic construct
  source 1..20: mol_type = other RNA
catgacagtgagagagtctc

SEQ ID NO: 18822 - RNA, 20 nt, synthetic construct
  source 1..20: mol_type = other RNA
cctacttgcacttactctgt

SEQ ID NO: 18823 - RNA, 20 nt, synthetic construct
  source 1..20: mol_type = other RNA
caggcggcaggacagagtaa

SEQ ID NO: 18824 - RNA, 20 nt, synthetic construct
  source 1..20: mol_type = other RNA
tcacaggcggcaggacagag

SEQ ID NO: 18825 - RNA, 20 nt, synthetic construct
  source 1..20: mol_type = other RNA
cccttgccttctgccatgac

SEQ ID NO: 18826 - RNA, 20 nt, synthetic construct
  source 1..20: mol_type = other RNA
gccatgactgtaaatttcca

SEQ ID NO: 18827 - RNA, 20 nt, synthetic construct
  source 1..20: mol_type = other RNA
acattgctggggaggcctct

SEQ ID NO: 18828 - RNA, 20 nt, synthetic construct
  source 1..20: mol_type = other RNA
agaggcctccccagcaatgt

SEQ ID NO: 18829 - RNA, 20 nt, synthetic construct
  source 1..20: mol_type = other RNA
ttgtaacttacccagtctgt

SEQ ID NO: 18830 - RNA, 20 nt, synthetic construct
  source 1..20: mol_type = other RNA
cacattgctatgaggaaata

SEQ ID NO: 18831 - RNA, 20 nt, synthetic construct
  source 1..20: mol_type = other RNA
tcatagcaatgtgagaacgg

SEQ ID NO: 18832 - RNA, 20 nt, synthetic construct
  source 1..20: mol_type = other RNA
aagatagatgataattttta

SEQ ID NO: 18833 - RNA, 20 nt, synthetic construct
  source 1..20: mol_type = other RNA
catttgtgcatgcctttcaa

SEQ ID NO: 18834 - RNA, 20 nt, synthetic construct
  source 1..20: mol_type = other RNA
tcaacttcccatttgtgcat

SEQ ID NO: 18835 - RNA, 20 nt, synthetic construct
  source 1..20: mol_type = other RNA
cattaaaggtatcatacaat

SEQ ID NO: 18836 - RNA, 20 nt, synthetic construct
  source 1..20: mol_type = other RNA
aagacacttgttaagacttt

SEQ ID NO: 18837 - RNA, 20 nt, synthetic construct
  source 1..20: mol_type = other RNA
aacaaagtcttaacaagtgt

SEQ ID NO: 18838 - RNA, 20 nt, synthetic construct
  source 1..20: mol_type = other RNA
gggacatccagcaccctcta

SEQ ID NO: 18839 - RNA, 20 nt, synthetic construct
  source 1..20: mol_type = other RNA
tccgcctcctgtaacttgta

SEQ ID NO: 18840 - RNA, 20 nt, synthetic construct
  source 1..20: mol_type = other RNA
gcctcctgtaacttgtattg

SEQ ID NO: 18841 - RNA, 20 nt, synthetic construct
  source 1..20: mol_type = other RNA
aaagcaatacaagttacagg

SEQ ID NO: 18842 - RNA, 20 nt, synthetic construct
  source 1..20: mol_type = other RNA
ttgtcaggccactggaaatt

SEQ ID NO: 18843 - RNA, 20 nt, synthetic construct
  source 1..20: mol_type = other RNA
agtggcctgacaatgaacta

SEQ ID NO: 18844 - RNA, 20 nt, synthetic construct
  source 1..20: mol_type = other RNA
tgcagtagttcattgtcagg

SEQ ID NO: 18845 - RNA, 20 nt, synthetic construct
  source 1..20: mol_type = other RNA
gtgtctgagcatcgcgtcag

SEQ ID NO: 18846 - RNA, 20 nt, synthetic construct
  source 1..20: mol_type = other RNA
taccttgttcagaaggaggc

SEQ ID NO: 18847 - RNA, 20 nt, synthetic construct
  source 1..20: mol_type = other RNA
gaacaaggtaagaagtctgt

SEQ ID NO: 18848 - RNA, 20 nt, synthetic construct
  source 1..20: mol_type = other RNA
tcccgttgtccaagcacata

SEQ ID NO: 18849 - RNA, 20 nt, synthetic construct
  source 1..20: mol_type = other RNA
tgtcttttcatcccgttgtc

SEQ ID NO: 18850 - RNA, 20 nt, synthetic construct
  source 1..20: mol_type = other RNA
gcatcagtgtggtttttcat

SEQ ID NO: 18851 - RNA, 20 nt, synthetic construct
  source 1..20: mol_type = other RNA
ttggtcatggcagaacctca

SEQ ID NO: 18852 - RNA, 20 nt, synthetic construct
  source 1..20: mol_type = other RNA
gccatgaccaaggaagtctc

SEQ ID NO: 18853 - RNA, 20 nt, synthetic construct
  source 1..20: mol_type = other RNA
cagggacggcactgagactt

SEQ ID NO: 18854 - RNA, 20 nt, synthetic construct
  source 1..20: mol_type = other RNA
aaaatgggttatttcagtgt

SEQ ID NO: 18855 - RNA, 20 nt, synthetic construct
  source 1..20: mol_type = other RNA
gtgtcccagtcaaattccta

SEQ ID NO: 18856 - RNA, 20 nt, synthetic construct
  source 1..20: mol_type = other RNA
tattctaacatgctgtcaac

SEQ ID NO: 18857 - RNA, 20 nt, synthetic construct
  source 1..20: mol_type = other RNA
aacatgctgtcaactgtgtg

SEQ ID NO: 18858 - RNA, 20 nt, synthetic construct
  source 1..20: mol_type = other RNA
aagccaataagcatttccag

SEQ ID NO: 18859 - RNA, 20 nt, synthetic construct
  source 1..20: mol_type = other RNA
agtaatttcttaaaatagtg

SEQ ID NO: 18860 - RNA, 20 nt, synthetic construct
  source 1..20: mol_type = other RNA
taaaatagtgttcattgcag

SEQ ID NO: 18861 - RNA, 20 nt, synthetic construct
  source 1..20: mol_type = other RNA
ttgcagtcttcagcgttgtg

SEQ ID NO: 18862 - RNA, 20 nt, synthetic construct
  source 1..20: mol_type = other RNA
gcgttgtggctcctgaggga

SEQ ID NO: 18863 - RNA, 20 nt, synthetic construct
  source 1..20: mol_type = other RNA
ctaggacgacagaatcaggg

SEQ ID NO: 18864 - RNA, 20 nt, synthetic construct
  source 1..20: mol_type = other RNA
gtcgtcctagagaagcctga

SEQ ID NO: 18865 - RNA, 20 nt, synthetic construct
  source 1..20: mol_type = other RNA
gtatcgtcctgggtctatgt

SEQ ID NO: 18866 - RNA, 20 nt, synthetic construct
  source 1..20: mol_type = other RNA
caaacatacagtctgtagaa

SEQ ID NO: 18867 - RNA, 20 nt, synthetic construct
  source 1..20: mol_type = other RNA
acagactgtatgtttgggaa

SEQ ID NO: 18868 - RNA, 20 nt, synthetic construct
  source 1..20: mol_type = other RNA
cattcccaaacatacagtct

SEQ ID NO: 18869 - RNA, 20 nt, synthetic construct
  source 1..20: mol_type = other RNA
tgccccggtatcctttccca

SEQ ID NO: 18870 - RNA, 20 nt, synthetic construct
  source 1..20: mol_type = other RNA
tggcatggcgtcccagtaac

SEQ ID NO: 18871 - RNA, 20 nt, synthetic construct
  source 1..20: mol_type = other RNA
ctttgctgacaaatcttttc

SEQ ID NO: 18872 - RNA, 20 nt, synthetic construct
  source 1..20: mol_type = other RNA
gtttgaaaagatttgtcagc

SEQ ID NO: 18873 - RNA, 20 nt, synthetic construct
  source 1..20: mol_type = other RNA
tctgcccctcttctgtttga

SEQ ID NO: 18874 - RNA, 20 nt, synthetic construct
  source 1..20: mol_type = other RNA
aacagaagaggggcagagga

SEQ ID NO: 18875 - RNA, 20 nt, synthetic construct
  source 1..20: mol_type = other RNA
agtattttcctctgcccctc

SEQ ID NO: 18876 - RNA, 20 nt, synthetic construct
  source 1..20: mol_type = other RNA
ggaggctaagcgtaattagc

SEQ ID NO: 18877 - RNA, 20 nt, synthetic construct
  source 1..20: mol_type = other RNA
atgctaaggctaattacgct

SEQ ID NO: 18878 - RNA, 20 nt, synthetic construct
  source 1..20: mol_type = other RNA
caggcctcttctcttttgac

SEQ ID NO: 18879 - RNA, 20 nt, synthetic construct
  source 1..20: mol_type = other RNA
cttttgacatttctttactg

SEQ ID NO: 18880 - RNA, 20 nt, synthetic construct
  source 1..20: mol_type = other RNA
ttactgtttccattgttggg

SEQ ID NO: 18881 - RNA, 20 nt, synthetic construct
  source 1..20: mol_type = other RNA
attgttgggtgctgtttctc

SEQ ID NO: 18882 - RNA, 20 nt, synthetic construct
  source 1..20: mol_type = other RNA
cgtttctagtgcttgtcctc

SEQ ID NO: 18883 - RNA, 20 nt, synthetic construct
  source 1..20: mol_type = other RNA
agtgcttgtcctctaagcca

SEQ ID NO: 18884 - RNA, 20 nt, synthetic construct
  source 1..20: mol_type = other RNA
agtaccagtaccagtaccag

SEQ ID NO: 18885 - RNA, 20 nt, synthetic construct
  source 1..20: mol_type = other RNA
taacaggccacagataatta

SEQ ID NO: 18886 - RNA, 20 nt, synthetic construct
  source 1..20: mol_type = other RNA
ggggagcaaacaaagcttca

SEQ ID NO: 18887 - RNA, 20 nt, synthetic construct
  source 1..20: mol_type = other RNA
tctgtattttctgctgcttc

SEQ ID NO: 18888 - RNA, 20 nt, synthetic construct
  source 1..20: mol_type = other RNA
gctgcttcccatcactctca

SEQ ID NO: 18889 - RNA, 20 nt, synthetic construct
  source 1..20: mol_type = other RNA
catcactctcatagctgcct

SEQ ID NO: 18890 - RNA, 20 nt, synthetic construct
  source 1..20: mol_type = other RNA
caatagggtttgtgctatga

SEQ ID NO: 18891 - RNA, 20 nt, synthetic construct
  source 1..20: mol_type = other RNA
tcacatgtgcagttcacaat

SEQ ID NO: 18892 - RNA, 20 nt, synthetic construct
  source 1..20: mol_type = other RNA
cataaggagcatgcaatcta

SEQ ID NO: 18893 - RNA, 20 nt, synthetic construct
  source 1..20: mol_type = other RNA
atcacccccagatgggacca

SEQ ID NO: 18894 - RNA, 20 nt, synthetic construct
  source 1..20: mol_type = other RNA
tgcaagtaggtggtcccatc

SEQ ID NO: 18895 - RNA, 20 nt, synthetic construct
  source 1..20: mol_type = other RNA
ttatatattacaatgtaata

SEQ ID NO: 18896 - RNA, 20 nt, synthetic construct
  source 1..20: mol_type = other RNA
attattattacattgtaata

SEQ ID NO: 18897 - RNA, 20 nt, synthetic construct
  source 1..20: mol_type = other RNA
atttatcgtgcactttattt

SEQ ID NO: 18898 - RNA, 20 nt, synthetic construct
  source 1..20: mol_type = other RNA
gtgcacctggggtgaggggg

SEQ ID NO: 18899 - RNA, 20 nt, synthetic construct
  source 1..20: mol_type = other RNA
taaaaggcaatttttctgtg

SEQ ID NO: 18900 - RNA, 20 nt, synthetic construct
  source 1..20: mol_type = other RNA
ccaacttttttggcaccaga

SEQ ID NO: 18901 - RNA, 20 nt, synthetic construct
  source 1..20: mol_type = other RNA
agtagtcagagatgccctct

SEQ ID NO: 18902 - RNA, 20 nt, synthetic construct
  source 1..20: mol_type = other RNA
agaaaaatctgacttaagcc

SEQ ID NO: 18903 - RNA, 20 nt, synthetic construct
  source 1..20: mol_type = other RNA
agaaaagatttggatgggcc

SEQ ID NO: 18904 - RNA, 20 nt, synthetic construct
  source 1..20: mol_type = other RNA
cttagcctcatgcattctct

SEQ ID NO: 18905 - RNA, 20 nt, synthetic construct
  source 1..20: mol_type = other RNA
ctgtgatggtttactttggg

SEQ ID NO: 18906 - RNA, 20 nt, synthetic construct
  source 1..20: mol_type = other RNA
taggccccaaagtaaaccat

SEQ ID NO: 18907 - RNA, 20 nt, synthetic construct
  source 1..20: mol_type = other RNA
ctattcataggccccaaagt

SEQ ID NO: 18908 - RNA, 20 nt, synthetic construct
  source 1..20: mol_type = other RNA
tatatctcagtcttccctat

SEQ ID NO: 18909 - RNA, 20 nt, synthetic construct
  source 1..20: mol_type = other RNA
cccactctcacacccatgta

SEQ ID NO: 18910 - RNA, 20 nt, synthetic construct
  source 1..20: mol_type = other RNA
cacaccagatatggggggat

SEQ ID NO: 18911 - RNA, 20 nt, synthetic construct
  source 1..20: mol_type = other RNA
cctcacaccccaagcgagtc

SEQ ID NO: 18912 - RNA, 20 nt, synthetic construct
  source 1..20: mol_type = other RNA
gcccagctggataaagatct

SEQ ID NO: 18913 - RNA, 20 nt, synthetic construct
  source 1..20: mol_type = other RNA
atatgaccctccatgggttt

SEQ ID NO: 18914 - RNA, 20 nt, synthetic construct
  source 1..20: mol_type = other RNA
gtgagccactctagcaaagt

SEQ ID NO: 18915 - RNA, 20 nt, synthetic construct
  source 1..20: mol_type = other RNA
ctgagttctgtgagccactc

SEQ ID NO: 18916 - RNA, 20 nt, synthetic construct
  source 1..20: mol_type = other RNA
ccaggatcctttttaatatc

SEQ ID NO: 18917 - RNA, 20 nt, synthetic construct
  source 1..20: mol_type = other RNA
acctggctgttcaccaggat

SEQ ID NO: 18918 - RNA, 20 nt, synthetic construct
  source 1..20: mol_type = other RNA
cacgtgccttgccctgtgca

SEQ ID NO: 18919 - RNA, 20 nt, synthetic construct
  source 1..20: mol_type = other RNA
gggttgctgaacacttaggg

SEQ ID NO: 18920 - RNA, 20 nt, synthetic construct
  source 1..20: mol_type = other RNA
gcaacccagaagctctccaa

SEQ ID NO: 18921 - RNA, 20 nt, synthetic construct
  source 1..20: mol_type = other RNA
ttacagaggcacagttgatt

SEQ ID NO: 18922 - RNA, 20 nt, synthetic construct
  source 1..20: mol_type = other RNA
gcccctcttccctccctgga

SEQ ID NO: 18923 - RNA, 20 nt, synthetic construct
  source 1..20: mol_type = other RNA
ctccctggaggttggagggt

SEQ ID NO: 18924 - RNA, 20 nt, synthetic construct
  source 1..20: mol_type = other RNA
gccccaccctccaacctcca

SEQ ID NO: 18925 - RNA, 20 nt, synthetic construct
  source 1..20: mol_type = other RNA
aaccctcaagtcacatggtt

SEQ ID NO: 18926 - RNA, 20 nt, synthetic construct
  source 1..20: mol_type = other RNA
cttggcaaccagcccctggg

SEQ ID NO: 18927 - RNA, 20 nt, synthetic construct
  source 1..20: mol_type = other RNA
tggatagccccaggggctgg

SEQ ID NO: 18928 - RNA, 20 nt, synthetic construct
  source 1..20: mol_type = other RNA
tgggtgaagggagctgcaat

SEQ ID NO: 18929 - RNA, 20 nt, synthetic construct
  source 1..20: mol_type = other RNA
ttgcagctcccttcacccag

SEQ ID NO: 18930 - RNA, 20 nt, synthetic construct
  source 1..20: mol_type = other RNA
cccaggaaactccaagggat

SEQ ID NO: 18931 - RNA, 20 nt, synthetic construct
  source 1..20: mol_type = other RNA
taacacagagctcctaaatc

SEQ ID NO: 18932 - RNA, 20 nt, synthetic construct
  source 1..20: mol_type = other RNA
tgtgatattgtgatagaata

SEQ ID NO: 18933 - RNA, 20 nt, synthetic construct
  source 1..20: mol_type = other RNA
tattctatcacaatatcaca

SEQ ID NO: 18934 - RNA, 20 nt, synthetic construct
  source 1..20: mol_type = other RNA
atcacaatatcacaggaagc

SEQ ID NO: 18935 - RNA, 20 nt, synthetic construct
  source 1..20: mol_type = other RNA
atgcattatgcaccatccac

SEQ ID NO: 18936 - RNA, 20 nt, synthetic construct
  source 1..20: mol_type = other RNA
gaaatgcttacttccatgca

SEQ ID NO: 18937 - RNA, 20 nt, synthetic construct
  source 1..20: mol_type = other RNA
gaatcaacagcaaacaggct

SEQ ID NO: 18938 - RNA, 20 nt, synthetic construct
  source 1..20: mol_type = other RNA
acctgataaagcctgtttgc

SEQ ID NO: 18939 - RNA, 20 nt, synthetic construct
  source 1..20: mol_type = other RNA
ccaggagcttgacccactgg

SEQ ID NO: 18940 - RNA, 20 nt, synthetic construct
  source 1..20: mol_type = other RNA
ccaaagacccttcagggtca

SEQ ID NO: 18941 - RNA, 20 nt, synthetic construct
  source 1..20: mol_type = other RNA
gggtcaccacaccctggtta

SEQ ID NO: 18942 - RNA, 20 nt, synthetic construct
  source 1..20: mol_type = other RNA
atgctgtaagccatcagtca

SEQ ID NO: 18943 - RNA, 20 nt, synthetic construct
  source 1..20: mol_type = other RNA
ttctatgctgtaagccatca

SEQ ID NO: 18944 - RNA, 20 nt, synthetic construct
  source 1..20: mol_type = other RNA
atcattattatattttttga

SEQ ID NO: 18945 - RNA, 20 nt, synthetic construct
  source 1..20: mol_type = other RNA
tttctatcattattatattt

SEQ ID NO: 18946 - RNA, 20 nt, synthetic construct
  source 1..20: mol_type = other RNA
tcctttctatcattattata

SEQ ID NO: 18947 - RNA, 20 nt, synthetic construct
  source 1..20: mol_type = other RNA
ttcttcctttctatcattat

SEQ ID NO: 18948 - RNA, 20 nt, synthetic construct
  source 1..20: mol_type = other RNA
tagaagacaaaagggagcgt

SEQ ID NO: 18949 - RNA, 20 nt, synthetic construct
  source 1..20: mol_type = other RNA
catctattcttagaagacaa

SEQ ID NO: 18950 - RNA, 20 nt, synthetic construct
  source 1..20: mol_type = other RNA
aagaatagatgtgaaatgtg

SEQ ID NO: 18951 - RNA, 20 nt, synthetic construct
  source 1..20: mol_type = other RNA
aaggcacacacatttcacat

SEQ ID NO: 18952 - RNA, 20 nt, synthetic construct
  source 1..20: mol_type = other RNA
ccctctcctgctccacgtga

SEQ ID NO: 18953 - RNA, 20 nt, synthetic construct
  source 1..20: mol_type = other RNA
gtactgccgtaaccctgatg

SEQ ID NO: 18954 - RNA, 20 nt, synthetic construct
  source 1..20: mol_type = other RNA
ttaccaaaacagaaggcaac

SEQ ID NO: 18955 - RNA, 20 nt, synthetic construct
  source 1..20: mol_type = other RNA
gttttggtaaggaaactgct

SEQ ID NO: 18956 - RNA, 20 nt, synthetic construct
  source 1..20: mol_type = other RNA
aaatccatattaaggaagca

SEQ ID NO: 18957 - RNA, 20 nt, synthetic construct
  source 1..20: mol_type = other RNA
ttaatatggatttggaaaaa

SEQ ID NO: 18958 - RNA, 20 nt, synthetic construct
  source 1..20: mol_type = other RNA
gttttttttgcttttttttt

SEQ ID NO: 18959 - RNA, 20 nt, synthetic construct
  source 1..20: mol_type = other RNA
ggggaggagatggctgccct

SEQ ID NO: 18960 - RNA, 20 nt, synthetic construct
  source 1..20: mol_type = other RNA
aggtggccatgatgaaaagc

SEQ ID NO: 18961 - RNA, 20 nt, synthetic construct
  source 1..20: mol_type = other RNA
tcatggccaccttgaacctg

SEQ ID NO: 18962 - RNA, 20 nt, synthetic construct
  source 1..20: mol_type = other RNA
taacaaatggggccaatagt

SEQ ID NO: 18963 - RNA, 20 nt, synthetic construct
  source 1..20: mol_type = other RNA
caaagggcaaacttagaggt

SEQ ID NO: 18964 - RNA, 20 nt, synthetic construct
  source 1..20: mol_type = other RNA
gtgggactatcccgggctga

SEQ ID NO: 18965 - RNA, 20 nt, synthetic construct
  source 1..20: mol_type = other RNA
gcagctgagaagaaaaaaaa

SEQ ID NO: 18966 - RNA, 20 nt, synthetic construct
  source 1..20: mol_type = other RNA
tgctgctcgtattttttttt

SEQ ID NO: 18967 - RNA, 20 nt, synthetic construct
  source 1..20: mol_type = other RNA
taggatggccatctgaggtt

SEQ ID NO: 18968 - RNA, 20 nt, synthetic construct
  source 1..20: mol_type = other RNA
ttgatttcctaggatggcca

SEQ ID NO: 18969 - RNA, 20 nt, synthetic construct
  source 1..20: mol_type = other RNA
ttcctcattgctctgagact

SEQ ID NO: 18970 - RNA, 20 nt, synthetic construct
  source 1..20: mol_type = other RNA
cctgatccaagcctcatact

SEQ ID NO: 18971 - RNA, 20 nt, synthetic construct
  source 1..20: mol_type = other RNA
cccatggatttgttacccca

SEQ ID NO: 18972 - RNA, 20 nt, synthetic construct
  source 1..20: mol_type = other RNA
ctattttcttcctgctgacc

SEQ ID NO: 18973 - RNA, 20 nt, synthetic construct
  source 1..20: mol_type = other RNA
tcctgctgaccaatcaactt

SEQ ID NO: 18974 - RNA, 20 nt, synthetic construct
  source 1..20: mol_type = other RNA
tgctgaccaatcaacttgtc

SEQ ID NO: 18975 - RNA, 20 nt, synthetic construct
  source 1..20: mol_type = other RNA
gtaactcggacagacaagtt

SEQ ID NO: 18976 - RNA, 20 nt, synthetic construct
  source 1..20: mol_type = other RNA
tttgtgtaatttggttgctt

SEQ ID NO: 18977 - RNA, 20 nt, synthetic construct
  source 1..20: mol_type = other RNA
catggcagacccaaccacaa

SEQ ID NO: 18978 - RNA, 20 nt, synthetic construct
  source 1..20: mol_type = other RNA
cccagctcaaggtcccttca

SEQ ID NO: 18979 - RNA, 20 nt, synthetic construct
  source 1..20: mol_type = other RNA
tcccccagctcaaggtccct

SEQ ID NO: 18980 - RNA, 20 nt, synthetic construct
  source 1..20: mol_type = other RNA
gtggacttggaggccaacct

SEQ ID NO: 18981 - RNA, 20 nt, synthetic construct
  source 1..20: mol_type = other RNA
tcactgccctgtaccacctc

SEQ ID NO: 18982 - RNA, 20 nt, synthetic construct
  source 1..20: mol_type = other RNA
ctcttgctctccccaggagt

SEQ ID NO: 18983 - RNA, 20 nt, synthetic construct
  source 1..20: mol_type = other RNA
tccctcttgctctccccagg

SEQ ID NO: 18984 - RNA, 20 nt, synthetic construct
  source 1..20: mol_type = other RNA
tatcaccctaacctctcctt

SEQ ID NO: 18985 - RNA, 20 nt, synthetic construct
  source 1..20: mol_type = other RNA
acttggccaatattattata

SEQ ID NO: 18986 - RNA, 20 nt, synthetic construct
  source 1..20: mol_type = other RNA
cgagtgggtgcttttgttct

SEQ ID NO: 18987 - RNA, 20 nt, synthetic construct
  source 1..20: mol_type = other RNA
gcaatagcaccgacaaaata

SEQ ID NO: 18988 - RNA, 20 nt, synthetic construct
  source 1..20: mol_type = other RNA
attttgtcggtgctattgca

SEQ ID NO: 18989 - RNA, 20 nt, synthetic construct
  source 1..20: mol_type = other RNA
tctacctcaaagtctcttga

SEQ ID NO: 18990 - RNA, 20 nt, synthetic construct
  source 1..20: mol_type = other RNA
agttctccgcttctggcccc

SEQ ID NO: 18991 - RNA, 20 nt, synthetic construct
  source 1..20: mol_type = other RNA
ccgcttctggccccatctag

SEQ ID NO: 18992 - RNA, 20 nt, synthetic construct
  source 1..20: mol_type = other RNA
ggccccatctagtacacgcc

SEQ ID NO: 18993 - RNA, 20 nt, synthetic construct
  source 1..20: mol_type = other RNA
aggcagcctgtcaaggatag

SEQ ID NO: 18994 - RNA, 20 nt, synthetic construct
  source 1..20: mol_type = other RNA
atgggagtcaaaggtgcatg

SEQ ID NO: 18995 - RNA, 20 nt, synthetic construct
  source 1..20: mol_type = other RNA
cttccatgggagtcaaaggt

SEQ ID NO: 18996 - RNA, 20 nt, synthetic construct
  source 1..20: mol_type = other RNA
caggtgcaattctgctgtcc

SEQ ID NO: 18997 - RNA, 20 nt, synthetic construct
  source 1..20: mol_type = other RNA
gctgtcctcacccacattga

SEQ ID NO: 18998 - RNA, 20 nt, synthetic construct
  source 1..20: mol_type = other RNA
catacatcctcaatgtgggt

SEQ ID NO: 18999 - RNA, 20 nt, synthetic construct
  source 1..20: mol_type = other RNA
ccaatctctaagaacctgat

SEQ ID NO: 19000 - RNA, 20 nt, synthetic construct
  source 1..20: mol_type = other RNA
ttctccaatctctaagaacc

SEQ ID NO: 19001 - RNA, 20 nt, synthetic construct
  source 1..20: mol_type = other RNA
ttctttctccaatctctaag

SEQ ID NO: 19002 - RNA, 20 nt, synthetic construct
  source 1..20: mol_type = other RNA
tagagattggagaaagaagg

SEQ ID NO: 19003 - RNA, 20 nt, synthetic construct
  source 1..20: mol_type = other RNA
tccttctttctccaatctct

SEQ ID NO: 19004 - RNA, 20 nt, synthetic construct
  source 1..20: mol_type = other RNA
cattcttccttctttctcca

SEQ ID NO: 19005 - RNA, 20 nt, synthetic construct
  source 1..20: mol_type = other RNA
tccaatggactgtgaggttc

SEQ ID NO: 19006 - RNA, 20 nt, synthetic construct
  source 1..20: mol_type = other RNA
aatggactgtgaggttcccc

SEQ ID NO: 19007 - RNA, 20 nt, synthetic construct
  source 1..20: mol_type = other RNA
ccaccttactttgatgtaag

SEQ ID NO: 19008 - RNA, 20 nt, synthetic construct
  source 1..20: mol_type = other RNA
aagtgtctgatgggaaccct

SEQ ID NO: 19009 - RNA, 20 nt, synthetic construct
  source 1..20: mol_type = other RNA
catcagacacttggaaatcc

SEQ ID NO: 19010 - RNA, 20 nt, synthetic construct
  source 1..20: mol_type = other RNA
gcaggaaacagtcctcagga

SEQ ID NO: 19011 - RNA, 20 nt, synthetic construct
  source 1..20: mol_type = other RNA
tgcagaaggatgtggttggt

SEQ ID NO: 19012 - RNA, 20 nt, synthetic construct
  source 1..20: mol_type = other RNA
caatcatgagtcaaacctga

SEQ ID NO: 19013 - RNA, 20 nt, synthetic construct
  source 1..20: mol_type = other RNA
ggtttgactcatgattgaga

SEQ ID NO: 19014 - RNA, 20 nt, synthetic construct
  source 1..20: mol_type = other RNA
ccaaccagaggctctaactt

SEQ ID NO: 19015 - RNA, 20 nt, synthetic construct
  source 1..20: mol_type = other RNA
tttccaccaacacattcagt

SEQ ID NO: 19016 - RNA, 20 nt, synthetic construct
  source 1..20: mol_type = other RNA
tactgaatgtgttggtggaa

SEQ ID NO: 19017 - RNA, 20 nt, synthetic construct
  source 1..20: mol_type = other RNA
accaacacattcagtacgaa

SEQ ID NO: 19018 - RNA, 20 nt, synthetic construct
  source 1..20: mol_type = other RNA
gtacgaataataaataagta

SEQ ID NO: 19019 - RNA, 20 nt, synthetic construct
  source 1..20: mol_type = other RNA
atttatttttacttatttat

SEQ ID NO: 19020 - RNA, 20 nt, synthetic construct
  source 1..20: mol_type = other RNA
aaataaaactgaatgtttct

SEQ ID NO: 19021 - RNA, 20 nt, synthetic construct
  source 1..20: mol_type = other RNA
gttttattttgaatagtagg

SEQ ID NO: 19022 - RNA, 20 nt, synthetic construct
  source 1..20: mol_type = other RNA
gtagttactcttttagtaca

SEQ ID NO: 19023 - RNA, 20 nt, synthetic construct
  source 1..20: mol_type = other RNA
gctagtatgccttacataca

SEQ ID NO: 19024 - RNA, 20 nt, synthetic construct
  source 1..20: mol_type = other RNA
agtgctgagctcaatttctg

SEQ ID NO: 19025 - RNA, 20 nt, synthetic construct
  source 1..20: mol_type = other RNA
atgccatgcttcttttttac

SEQ ID NO: 19026 - RNA, 20 nt, synthetic construct
  source 1..20: mol_type = other RNA
tttttacaaaagacttctat

SEQ ID NO: 19027 - RNA, 20 nt, synthetic construct
  source 1..20: mol_type = other RNA
atagatagattctcaaaaca

SEQ ID NO: 19028 - RNA, 20 nt, synthetic construct
  source 1..20: mol_type = other RNA
tttgctgtgggttgttttga

SEQ ID NO: 19029 - RNA, 20 nt, synthetic construct
  source 1..20: mol_type = other RNA
caaaacaacccacagcaaat

SEQ ID NO: 19030 - RNA, 20 nt, synthetic construct
  source 1..20: mol_type = other RNA
aaataacttttcatttgctg

SEQ ID NO: 19031 - RNA, 20 nt, synthetic construct
  source 1..20: mol_type = other RNA
acactccagtgaatctggaa

SEQ ID NO: 19032 - RNA, 20 nt, synthetic construct
  source 1..20: mol_type = other RNA
agattcactggagtgtagaa

SEQ ID NO: 19033 - RNA, 20 nt, synthetic construct
  source 1..20: mol_type = other RNA
ctggagtgtagaatctctgg

SEQ ID NO: 19034 - RNA, 20 nt, synthetic construct
  source 1..20: mol_type = other RNA
tccccaaccaaccagagatt

SEQ ID NO: 19035 - RNA, 20 nt, synthetic construct
  source 1..20: mol_type = other RNA
tcttgcagttgttattaata

SEQ ID NO: 19036 - RNA, 20 nt, synthetic construct
  source 1..20: mol_type = other RNA
tataattattaataacaact

SEQ ID NO: 19037 - RNA, 20 nt, synthetic construct
  source 1..20: mol_type = other RNA
aaactataaatattaatata

SEQ ID NO: 19038 - RNA, 20 nt, synthetic construct
  source 1..20: mol_type = other RNA
aggtcttcaaaactataaat

SEQ ID NO: 19039 - RNA, 20 nt, synthetic construct
  source 1..20: mol_type = other RNA
ctgttgtctccagcccttca

SEQ ID NO: 19040 - RNA, 20 nt, synthetic construct
  source 1..20: mol_type = other RNA
aaaatgcttctctgttgtct

SEQ ID NO: 19041 - RNA, 20 nt, synthetic construct
  source 1..20: mol_type = other RNA
ctacctccagagaccttgtg

SEQ ID NO: 19042 - RNA, 20 nt, synthetic construct
  source 1..20: mol_type = other RNA
ctctgcagcaagcccacaag

SEQ ID NO: 19043 - RNA, 20 nt, synthetic construct
  source 1..20: mol_type = other RNA
tcctccctgccttctctctg

SEQ ID NO: 19044 - RNA, 20 nt, synthetic construct
  source 1..20: mol_type = other RNA
tttcctcctccctgccttct

SEQ ID NO: 19045 - RNA, 20 nt, synthetic construct
  source 1..20: mol_type = other RNA
tcttttcctcctccctgcct

SEQ ID NO: 19046 - RNA, 20 nt, synthetic construct
  source 1..20: mol_type = other RNA
ggggagcctcccatgactaa

SEQ ID NO: 19047 - RNA, 20 nt, synthetic construct
  source 1..20: mol_type = other RNA
tctggggagcctcccatgac

SEQ ID NO: 19048 - RNA, 20 nt, synthetic construct
  source 1..20: mol_type = other RNA
ggacagttcttctggggagc

SEQ ID NO: 19049 - RNA, 20 nt, synthetic construct
  source 1..20: mol_type = other RNA
ctcagccagcttcaggacag

SEQ ID NO: 19050 - RNA, 20 nt, synthetic construct
  source 1..20: mol_type = other RNA
acataggacagttatccttg

SEQ ID NO: 19051 - RNA, 20 nt, synthetic construct
  source 1..20: mol_type = other RNA
tttgcatgtgagtctctgtg

SEQ ID NO: 19052 - RNA, 20 nt, synthetic construct
  source 1..20: mol_type = other RNA
aaaccatgtaaagtttactg

SEQ ID NO: 19053 - RNA, 20 nt, synthetic construct
  source 1..20: mol_type = other RNA
gtaaactttacatggtttag

SEQ ID NO: 19054 - RNA, 20 nt, synthetic construct
  source 1..20: mol_type = other RNA
ttctaaaccatgtaaagttt

SEQ ID NO: 19055 - RNA, 20 nt, synthetic construct
  source 1..20: mol_type = other RNA
aggaaatataagttctttct

SEQ ID NO: 19056 - RNA, 20 nt, synthetic construct
  source 1..20: mol_type = other RNA
ttgaaaggagagtgtccttt

SEQ ID NO: 19057 - RNA, 20 nt, synthetic construct
  source 1..20: mol_type = other RNA
aagtttaaaaagtggtagta

SEQ ID NO: 19058 - RNA, 20 nt, synthetic construct
  source 1..20: mol_type = other RNA
ttctaagtttaaaaagtggt

SEQ ID NO: 19059 - RNA, 20 nt, synthetic construct
  source 1..20: mol_type = other RNA
catctcaaaggtgaaattaa

SEQ ID NO: 19060 - RNA, 20 nt, synthetic construct
  source 1..20: mol_type = other RNA
cctttgagatgtgaaaaact

SEQ ID NO: 19061 - RNA, 20 nt, synthetic construct
  source 1..20: mol_type = other RNA
aagcactagtttttcacatc

SEQ ID NO: 19062 - RNA, 20 nt, synthetic construct
  source 1..20: mol_type = other RNA
ggacgaattccaagcactag

SEQ ID NO: 19063 - RNA, 20 nt, synthetic construct
  source 1..20: mol_type = other RNA
tcctgaattaaacgacacaa

SEQ ID NO: 19064 - RNA, 20 nt, synthetic construct
  source 1..20: mol_type = other RNA
caccttgtgccacagcatcc

SEQ ID NO: 19065 - RNA, 20 nt, synthetic construct
  source 1..20: mol_type = other RNA
cacaatcaaatgaagaggat

SEQ ID NO: 19066 - RNA, 20 nt, synthetic construct
  source 1..20: mol_type = other RNA
tttgattgtgggaagcctca

SEQ ID NO: 19067 - RNA, 20 nt, synthetic construct
  source 1..20: mol_type = other RNA
gctccacttgaggcttccca

SEQ ID NO: 19068 - RNA, 20 nt, synthetic construct
  source 1..20: mol_type = other RNA
tcggctccacttgaggcttc

SEQ ID NO: 19069 - RNA, 20 nt, synthetic construct
  source 1..20: mol_type = other RNA
aggacatttcttcggctcca

SEQ ID NO: 19070 - RNA, 20 nt, synthetic construct
  source 1..20: mol_type = other RNA
tggccctggcaagtcagtct

SEQ ID NO: 19071 - RNA, 20 nt, synthetic construct
  source 1..20: mol_type = other RNA
gagactgacttgccagggcc

SEQ ID NO: 19072 - RNA, 20 nt, synthetic construct
  source 1..20: mol_type = other RNA
taccttgttctgagactgac

SEQ ID NO: 19073 - RNA, 20 nt, synthetic construct
  source 1..20: mol_type = other RNA
gggcctgttcttaccttgtt

SEQ ID NO: 19074 - RNA, 20 nt, synthetic construct
  source 1..20: mol_type = other RNA
atgtaagccccacaaaaccc

SEQ ID NO: 19075 - RNA, 20 nt, synthetic construct
  source 1..20: mol_type = other RNA
gtgtaaatgtagaagggttt

SEQ ID NO: 19076 - RNA, 20 nt, synthetic construct
  source 1..20: mol_type = other RNA
acatttacacagaacccaca

SEQ ID NO: 19077 - RNA, 20 nt, synthetic construct
  source 1..20: mol_type = other RNA
gaaaacagagaggcaggtat

SEQ ID NO: 19078 - RNA, 20 nt, synthetic construct
  source 1..20: mol_type = other RNA
tccttcagaaaacagagagg

SEQ ID NO: 19079 - RNA, 20 nt, synthetic construct
  source 1..20: mol_type = other RNA
atattttttcctccttcaga

SEQ ID NO: 19080 - RNA, 20 nt, synthetic construct
  source 1..20: mol_type = other RNA
gaaggaggaaaaaatataga

SEQ ID NO: 19081 - RNA, 20 nt, synthetic construct
  source 1..20: mol_type = other RNA
aagtagagaacctataataa

SEQ ID NO: 19082 - RNA, 20 nt, synthetic construct
  source 1..20: mol_type = other RNA
ctacttggaaaatagccaaa

SEQ ID NO: 19083 - RNA, 20 nt, synthetic construct
  source 1..20: mol_type = other RNA
tgatctgggcagttccatca

SEQ ID NO: 19084 - RNA, 20 nt, synthetic construct
  source 1..20: mol_type = other RNA
atcaaaatctgtaggcacag

SEQ ID NO: 19085 - RNA, 20 nt, synthetic construct
  source 1..20: mol_type = other RNA
aaaagtattggaacttggtg

SEQ ID NO: 19086 - RNA, 20 nt, synthetic construct
  source 1..20: mol_type = other RNA
atattttccaaaagtattgg

SEQ ID NO: 19087 - RNA, 20 nt, synthetic construct
  source 1..20: mol_type = other RNA
aatacttttggaaaatattg

SEQ ID NO: 19088 - RNA, 20 nt, synthetic construct
  source 1..20: mol_type = other RNA
atggatatccattgtctcac

SEQ ID NO: 19089 - RNA, 20 nt, synthetic construct
  source 1..20: mol_type = other RNA
tctgacagtgagacaatgga

SEQ ID NO: 19090 - RNA, 20 nt, synthetic construct
  source 1..20: mol_type = other RNA
tttcatctgacagtgagaca

SEQ ID NO: 19091 - RNA, 20 nt, synthetic construct
  source 1..20: mol_type = other RNA
ctttcttttcatctgacagt

SEQ ID NO: 19092 - RNA, 20 nt, synthetic construct
  source 1..20: mol_type = other RNA
aaaaacttccctttcttttc

SEQ ID NO: 19093 - RNA, 20 nt, synthetic construct
  source 1..20: mol_type = other RNA
caaaagtgtaaaaaaaaatc

SEQ ID NO: 19094 - RNA, 20 nt, synthetic construct
  source 1..20: mol_type = other RNA
atgattcacaaaagtgtaaa

SEQ ID NO: 19095 - RNA, 20 nt, synthetic construct
  source 1..20: mol_type = other RNA
atgccgaggctattcatcta

SEQ ID NO: 19096 - RNA, 20 nt, synthetic construct
  source 1..20: mol_type = other RNA
tgtgtttgtgaatagatgaa

SEQ ID NO: 19097 - RNA, 20 nt, synthetic construct
  source 1..20: mol_type = other RNA
tctattcacaaacacatgaa

SEQ ID NO: 19098 - RNA, 20 nt, synthetic construct
  source 1..20: mol_type = other RNA
caaacacatgaacaaattat

SEQ ID NO: 19099 - RNA, 20 nt, synthetic construct
  source 1..20: mol_type = other RNA
tttatggggatcacaaccca

SEQ ID NO: 19100 - RNA, 20 nt, synthetic construct
  source 1..20: mol_type = other RNA
gactgattactcttcattta

SEQ ID NO: 19101 - RNA, 20 nt, synthetic construct
  source 1..20: mol_type = other RNA
gtgggttcggactgattact

SEQ ID NO: 19102 - RNA, 20 nt, synthetic construct
  source 1..20: mol_type = other RNA
actgaaacgatacccaaaat

SEQ ID NO: 19103 - RNA, 20 nt, synthetic construct
  source 1..20: mol_type = other RNA
gtggaacatgcaattcgtaa

SEQ ID NO: 19104 - RNA, 20 nt, synthetic construct
  source 1..20: mol_type = other RNA
taagttcagtttgcttgggt

SEQ ID NO: 19105 - RNA, 20 nt, synthetic construct
  source 1..20: mol_type = other RNA
taagagacacccaagcaaac

SEQ ID NO: 19106 - RNA, 20 nt, synthetic construct
  source 1..20: mol_type = other RNA
gtttgcttgggtgtctctta

SEQ ID NO: 19107 - RNA, 20 nt, synthetic construct
  source 1..20: mol_type = other RNA
tcctaagagacacccaagca

SEQ ID NO: 19108 - RNA, 20 nt, synthetic construct
  source 1..20: mol_type = other RNA
tcatctcctttctacaccag

SEQ ID NO: 19109 - RNA, 20 nt, synthetic construct
  source 1..20: mol_type = other RNA
acaccagggcacctgtgctc

SEQ ID NO: 19110 - RNA, 20 nt, synthetic construct
  source 1..20: mol_type = other RNA
cctctaaagagacttccttc

SEQ ID NO: 19111 - RNA, 20 nt, synthetic construct
  source 1..20: mol_type = other RNA
caaacttacagaaggaagtc

SEQ ID NO: 19112 - RNA, 20 nt, synthetic construct
  source 1..20: mol_type = other RNA
ttctgtaagtttgtgaaatg

SEQ ID NO: 19113 - RNA, 20 nt, synthetic construct
  source 1..20: mol_type = other RNA
gtaagtttgtgaaatgccat

SEQ ID NO: 19114 - RNA, 20 nt, synthetic construct
  source 1..20: mol_type = other RNA
ctctgctgttgagttgattt

SEQ ID NO: 19115 - RNA, 20 nt, synthetic construct
  source 1..20: mol_type = other RNA
ttactttatcgtttgtaact

SEQ ID NO: 19116 - RNA, 20 nt, synthetic construct
  source 1..20: mol_type = other RNA
tgctctacagagctttcacc

SEQ ID NO: 19117 - RNA, 20 nt, synthetic construct
  source 1..20: mol_type = other RNA
ccttccacatatttcagatt

SEQ ID NO: 19118 - RNA, 20 nt, synthetic construct
  source 1..20: mol_type = other RNA
acatatttcagattcattct

SEQ ID NO: 19119 - RNA, 20 nt, synthetic construct
  source 1..20: mol_type = other RNA
gattcattctttcctaaact

SEQ ID NO: 19120 - RNA, 20 nt, synthetic construct
  source 1..20: mol_type = other RNA
ttctttcctaaactgtgtgg

SEQ ID NO: 19121 - RNA, 20 nt, synthetic construct
  source 1..20: mol_type = other RNA
ttcctaaactgtgtggtggt

SEQ ID NO: 19122 - RNA, 20 nt, synthetic construct
  source 1..20: mol_type = other RNA
taaactgtgtggtggtctat

SEQ ID NO: 19123 - RNA, 20 nt, synthetic construct
  source 1..20: mol_type = other RNA
tatctctattcctcttcgtt

SEQ ID NO: 19124 - RNA, 20 nt, synthetic construct
  source 1..20: mol_type = other RNA
tcttcgttgcaatctggctc

SEQ ID NO: 19125 - RNA, 20 nt, synthetic construct
  source 1..20: mol_type = other RNA
ttgcaatctggctccaagtg

SEQ ID NO: 19126 - RNA, 20 nt, synthetic construct
  source 1..20: mol_type = other RNA
gatctatcaactgcctacac

SEQ ID NO: 19127 - RNA, 20 nt, synthetic construct
  source 1..20: mol_type = other RNA
aggactgtgtaggcagttga

SEQ ID NO: 19128 - RNA, 20 nt, synthetic construct
  source 1..20: mol_type = other RNA
tgactcacttactttctagg

SEQ ID NO: 19129 - RNA, 20 nt, synthetic construct
  source 1..20: mol_type = other RNA
gatcttacctgaaaagttta

SEQ ID NO: 19130 - RNA, 20 nt, synthetic construct
  source 1..20: mol_type = other RNA
ggtaagatcagaagaccctc

SEQ ID NO: 19131 - RNA, 20 nt, synthetic construct
  source 1..20: mol_type = other RNA
aggagccagatacgatcctg

SEQ ID NO: 19132 - RNA, 20 nt, synthetic construct
  source 1..20: mol_type = other RNA
ttttttatgacaagatctat

SEQ ID NO: 19133 - RNA, 20 nt, synthetic construct
  source 1..20: mol_type = other RNA
caaggtctctttcatttttt

SEQ ID NO: 19134 - RNA, 20 nt, synthetic construct
  source 1..20: mol_type = other RNA
ccccacagccctggactctg

SEQ ID NO: 19135 - RNA, 20 nt, synthetic construct
  source 1..20: mol_type = other RNA
ttctggagtcacttagcttt

SEQ ID NO: 19136 - RNA, 20 nt, synthetic construct
  source 1..20: mol_type = other RNA
ggagtcacttagctttgctc

SEQ ID NO: 19137 - RNA, 20 nt, synthetic construct
  source 1..20: mol_type = other RNA
tgcctcaggcatcaaaaaaa

SEQ ID NO: 19138 - RNA, 20 nt, synthetic construct
  source 1..20: mol_type = other RNA
gaagggcccatctgtgccac

SEQ ID NO: 19139 - RNA, 20 nt, synthetic construct
  source 1..20: mol_type = other RNA
gaaaaatctcactactggag

SEQ ID NO: 19140 - RNA, 20 nt, synthetic construct
  source 1..20: mol_type = other RNA
agctgtgctccagtagtgag

SEQ ID NO: 19141 - RNA, 20 nt, synthetic construct
  source 1..20: mol_type = other RNA
actatcctgacgttgggcgg

SEQ ID NO: 19142 - RNA, 20 nt, synthetic construct
  source 1..20: mol_type = other RNA
caaagcaaaggactaccgcc

SEQ ID NO: 19143 - RNA, 20 nt, synthetic construct
  source 1..20: mol_type = other RNA
tattcccaaagcaaaggact

SEQ ID NO: 19144 - RNA, 20 nt, synthetic construct
  source 1..20: mol_type = other RNA
ctcagttttgatcatgttca

SEQ ID NO: 19145 - RNA, 20 nt, synthetic construct
  source 1..20: mol_type = other RNA
ttgtacagaaagccaggaag

SEQ ID NO: 19146 - RNA, 20 nt, synthetic construct
  source 1..20: mol_type = other RNA
tggctttctgtacaatgaag

SEQ ID NO: 19147 - RNA, 20 nt, synthetic construct
  source 1..20: mol_type = other RNA
acttcattgtacagaaagcc

SEQ ID NO: 19148 - RNA, 20 nt, synthetic construct
  source 1..20: mol_type = other RNA
gtacaatgaagtagaacaaa

SEQ ID NO: 19149 - RNA, 20 nt, synthetic construct
  source 1..20: mol_type = other RNA
aaacctagaaagaaaacatg

SEQ ID NO: 19150 - RNA, 20 nt, synthetic construct
  source 1..20: mol_type = other RNA
aggtttggaaagcacttctg

SEQ ID NO: 19151 - RNA, 20 nt, synthetic construct
  source 1..20: mol_type = other RNA
gtggaggcaccttaatatcc

SEQ ID NO: 19152 - RNA, 20 nt, synthetic construct
  source 1..20: mol_type = other RNA
agacttttttcctccctctc

SEQ ID NO: 19153 - RNA, 20 nt, synthetic construct
  source 1..20: mol_type = other RNA
tccctctcttcctccatccc

SEQ ID NO: 19154 - RNA, 20 nt, synthetic construct
  source 1..20: mol_type = other RNA
tccatcccttctttcttccc

SEQ ID NO: 19155 - RNA, 20 nt, synthetic construct
  source 1..20: mol_type = other RNA
ttcttcccaccctccccttc

SEQ ID NO: 19156 - RNA, 20 nt, synthetic construct
  source 1..20: mol_type = other RNA
tcccaccctccccttccttc

SEQ ID NO: 19157 - RNA, 20 nt, synthetic construct
  source 1..20: mol_type = other RNA
caccctccccttccttcctc

SEQ ID NO: 19158 - RNA, 20 nt, synthetic construct
  source 1..20: mol_type = other RNA
ttcctccccacctctcttcc

SEQ ID NO: 19159 - RNA, 20 nt, synthetic construct
  source 1..20: mol_type = other RNA
tccccacctctcttcctttt

SEQ ID NO: 19160 - RNA, 20 nt, synthetic construct
  source 1..20: mol_type = other RNA
agaaaaggaagagaggtggg

SEQ ID NO: 19161 - RNA, 20 nt, synthetic construct
  source 1..20: mol_type = other RNA
ttccagaaaaggaagagagg

SEQ ID NO: 19162 - RNA, 20 nt, synthetic construct
  source 1..20: mol_type = other RNA
tagtgttccttccagaaaag

SEQ ID NO: 19163 - RNA, 20 nt, synthetic construct
  source 1..20: mol_type = other RNA
ttttctggaaggaacactag

SEQ ID NO: 19164 - RNA, 20 nt, synthetic construct
  source 1..20: mol_type = other RNA
ggaaggaacactaggaacca

SEQ ID NO: 19165 - RNA, 20 nt, synthetic construct
  source 1..20: mol_type = other RNA
ctggttcctagtgttccttc

SEQ ID NO: 19166 - RNA, 20 nt, synthetic construct
  source 1..20: mol_type = other RNA
gcatgcattccctggttcct

SEQ ID NO: 19167 - RNA, 20 nt, synthetic construct
  source 1..20: mol_type = other RNA
gcctcaggattctgcatgca

SEQ ID NO: 19168 - RNA, 20 nt, synthetic construct
  source 1..20: mol_type = other RNA
agggcaattggatgagagag

SEQ ID NO: 19169 - RNA, 20 nt, synthetic construct
  source 1..20: mol_type = other RNA
ctcctctctcatccaattgc

SEQ ID NO: 19170 - RNA, 20 nt, synthetic construct
  source 1..20: mol_type = other RNA
ctctagaaacacttccctcc

SEQ ID NO: 19171 - RNA, 20 nt, synthetic construct
  source 1..20: mol_type = other RNA
ctctgcagattccctctaga

SEQ ID NO: 19172 - RNA, 20 nt, synthetic construct
  source 1..20: mol_type = other RNA
agagggaatctgcagaggga

SEQ ID NO: 19173 - RNA, 20 nt, synthetic construct
  source 1..20: mol_type = other RNA
ctaccagaggcatcaatctg

SEQ ID NO: 19174 - RNA, 20 nt, synthetic construct
  source 1..20: mol_type = other RNA
gcctcagatattgctctaga

SEQ ID NO: 19175 - RNA, 20 nt, synthetic construct
  source 1..20: mol_type = other RNA
ttataaattattcagcctca

SEQ ID NO: 19176 - RNA, 20 nt, synthetic construct
  source 1..20: mol_type = other RNA
tgtaaagcctgcagaaacat

SEQ ID NO: 19177 - RNA, 20 nt, synthetic construct
  source 1..20: mol_type = other RNA
gcaggctttacaggaagcag

SEQ ID NO: 19178 - RNA, 20 nt, synthetic construct
  source 1..20: mol_type = other RNA
ttaggcccacacagaagcag

SEQ ID NO: 19179 - RNA, 20 nt, synthetic construct
  source 1..20: mol_type = other RNA
gtgtgggcctaaggaagatt

SEQ ID NO: 19180 - RNA, 20 nt, synthetic construct
  source 1..20: mol_type = other RNA
tgcaaagtctggtcatttgg

SEQ ID NO: 19181 - RNA, 20 nt, synthetic construct
  source 1..20: mol_type = other RNA
tggtgatcagtgagctctca

SEQ ID NO: 19182 - RNA, 20 nt, synthetic construct
  source 1..20: mol_type = other RNA
agagggatgcacctctatga

SEQ ID NO: 19183 - RNA, 20 nt, synthetic construct
  source 1..20: mol_type = other RNA
caggccatagctccatcact

SEQ ID NO: 19184 - RNA, 20 nt, synthetic construct
  source 1..20: mol_type = other RNA
actgtagtccccagtgatgg

SEQ ID NO: 19185 - RNA, 20 nt, synthetic construct
  source 1..20: mol_type = other RNA
tcagagactgtgatatagtt

SEQ ID NO: 19186 - RNA, 20 nt, synthetic construct
  source 1..20: mol_type = other RNA
caatctgtttcatcagagac

SEQ ID NO: 19187 - RNA, 20 nt, synthetic construct
  source 1..20: mol_type = other RNA
caatttgctggaaactgaca

SEQ ID NO: 19188 - RNA, 20 nt, synthetic construct
  source 1..20: mol_type = other RNA
agcaaattgtgaattttgtt

SEQ ID NO: 19189 - RNA, 20 nt, synthetic construct
  source 1..20: mol_type = other RNA
tgccactcataagtcactga

SEQ ID NO: 19190 - RNA, 20 nt, synthetic construct
  source 1..20: mol_type = other RNA
gggtggccgagggtgtcaga

SEQ ID NO: 19191 - RNA, 20 nt, synthetic construct
  source 1..20: mol_type = other RNA
ggtatcctctgtgccatgaa

SEQ ID NO: 19192 - RNA, 20 nt, synthetic construct
  source 1..20: mol_type = other RNA
tggcacagaggatacctgaa

SEQ ID NO: 19193 - RNA, 20 nt, synthetic construct
  source 1..20: mol_type = other RNA
cttgacatcctcatcttttc

SEQ ID NO: 19194 - RNA, 20 nt, synthetic construct
  source 1..20: mol_type = other RNA
aggtcctcaaggccttcatc

SEQ ID NO: 19195 - RNA, 20 nt, synthetic construct
  source 1..20: mol_type = other RNA
tcctacaaggtcatcctggg

SEQ ID NO: 19196 - RNA, 20 nt, synthetic construct
  source 1..20: mol_type = other RNA
tggtgtgcacccaggatgac

SEQ ID NO: 19197 - RNA, 20 nt, synthetic construct
  source 1..20: mol_type = other RNA
cttcttggtgtgcacccagg

SEQ ID NO: 19198 - RNA, 20 nt, synthetic construct
  source 1..20: mol_type = other RNA
aggttcacttcttggtgtgc

SEQ ID NO: 19199 - RNA, 20 nt, synthetic construct
  source 1..20: mol_type = other RNA
ggaaatagaagtgtctaggc

SEQ ID NO: 19200 - RNA, 20 nt, synthetic construct
  source 1..20: mol_type = other RNA
ccagcgtggggtgaagacca

SEQ ID NO: 19201 - RNA, 20 nt, synthetic construct
  source 1..20: mol_type = other RNA
ccccacgctggtgaagatat

SEQ ID NO: 19202 - RNA, 20 nt, synthetic construct
  source 1..20: mol_type = other RNA
tccccactgccatgcagtgg

SEQ ID NO: 19203 - RNA, 20 nt, synthetic construct
  source 1..20: mol_type = other RNA
tgtgatagacagttcctccc

SEQ ID NO: 19204 - RNA, 20 nt, synthetic construct
  source 1..20: mol_type = other RNA
accccagccctgccacatgt

SEQ ID NO: 19205 - RNA, 20 nt, synthetic construct
  source 1..20: mol_type = other RNA
gcctttttaaagagcacaac

SEQ ID NO: 19206 - RNA, 20 nt, synthetic construct
  source 1..20: mol_type = other RNA
acgtgaggaaacgaatcctt

SEQ ID NO: 19207 - RNA, 20 nt, synthetic construct
  source 1..20: mol_type = other RNA
tttcctcacgtggaaaaaga

SEQ ID NO: 19208 - RNA, 20 nt, synthetic construct
  source 1..20: mol_type = other RNA
tcacgtggaaaaagagatac

SEQ ID NO: 19209 - RNA, 20 nt, synthetic construct
  source 1..20: mol_type = other RNA
ccagttcatccacattcatg

SEQ ID NO: 19210 - RNA, 20 nt, synthetic construct
  source 1..20: mol_type = other RNA
ctgatcatgaatgtggatga

SEQ ID NO: 19211 - RNA, 20 nt, synthetic construct
  source 1..20: mol_type = other RNA
tccacattcatgatcaggga

SEQ ID NO: 19212 - RNA, 20 nt, synthetic construct
  source 1..20: mol_type = other RNA
tgatcagggaaaggttgtta

SEQ ID NO: 19213 - RNA, 20 nt, synthetic construct
  source 1..20: mol_type = other RNA
aggctaactattctcctttc

SEQ ID NO: 19214 - RNA, 20 nt, synthetic construct
  source 1..20: mol_type = other RNA
cctttcataataatatgctg

SEQ ID NO: 19215 - RNA, 20 nt, synthetic construct
  source 1..20: mol_type = other RNA
ctccagcatattattatgaa

SEQ ID NO: 19216 - RNA, 20 nt, synthetic construct
  source 1..20: mol_type = other RNA
taataatatgctggagagaa

SEQ ID NO: 19217 - RNA, 20 nt, synthetic construct
  source 1..20: mol_type = other RNA
agcgctttgaaatgcaatct

SEQ ID NO: 19218 - RNA, 20 nt, synthetic construct
  source 1..20: mol_type = other RNA
aagcgcttgaaaaaccacca

SEQ ID NO: 19219 - RNA, 20 nt, synthetic construct
  source 1..20: mol_type = other RNA
tcgtcagcctcctgaatagc

SEQ ID NO: 19220 - RNA, 20 nt, synthetic construct
  source 1..20: mol_type = other RNA
tcctcgtcagcctcctgaat

SEQ ID NO: 19221 - RNA, 20 nt, synthetic construct
  source 1..20: mol_type = other RNA
ggaggctgacgaggaagaat

SEQ ID NO: 19222 - RNA, 20 nt, synthetic construct
  source 1..20: mol_type = other RNA
aggctgtaggcagctatgat

SEQ ID NO: 19223 - RNA, 20 nt, synthetic construct
  source 1..20: mol_type = other RNA
tttgttgagacagggtcttg

SEQ ID NO: 19224 - RNA, 20 nt, synthetic construct
  source 1..20: mol_type = other RNA
tttcttttgttgagacaggg

SEQ ID NO: 19225 - RNA, 20 nt, synthetic construct
  source 1..20: mol_type = other RNA
tttgttttgttttcttttct

SEQ ID NO: 19226 - RNA, 20 nt, synthetic construct
  source 1..20: mol_type = other RNA
gttcatttgttttgttttct

SEQ ID NO: 19227 - RNA, 20 nt, synthetic construct
  source 1..20: mol_type = other RNA
acaatgtcaaaaaaaaaaaa

SEQ ID NO: 19228 - RNA, 20 nt, synthetic construct
  source 1..20: mol_type = other RNA
ccaggaaagagaaaatcaaa

SEQ ID NO: 19229 - RNA, 20 nt, synthetic construct
  source 1..20: mol_type = other RNA
ttgattttctctttcctggt

SEQ ID NO: 19230 - RNA, 20 nt, synthetic construct
  source 1..20: mol_type = other RNA
ctttcctggtgaaattttgt

SEQ ID NO: 19231 - RNA, 20 nt, synthetic construct
  source 1..20: mol_type = other RNA
tggtgaaattttgttttatt

SEQ ID NO: 19232 - RNA, 20 nt, synthetic construct
  source 1..20: mol_type = other RNA
tagctgattgtactgtcacc

SEQ ID NO: 19233 - RNA, 20 nt, synthetic construct
  source 1..20: mol_type = other RNA
agagccaccagcacagcgag

SEQ ID NO: 19234 - RNA, 20 nt, synthetic construct
  source 1..20: mol_type = other RNA
caaccaggccatgctcatcc

SEQ ID NO: 19235 - RNA, 20 nt, synthetic construct
  source 1..20: mol_type = other RNA
cagacccagagaagctgcca

SEQ ID NO: 19236 - RNA, 20 nt, synthetic construct
  source 1..20: mol_type = other RNA
ctgggtctgtgaactgaggg

SEQ ID NO: 19237 - RNA, 20 nt, synthetic construct
  source 1..20: mol_type = other RNA
aggacatcacccctcagttc

SEQ ID NO: 19238 - RNA, 20 nt, synthetic construct
  source 1..20: mol_type = other RNA
tagagtgtcagaggattcca

SEQ ID NO: 19239 - RNA, 20 nt, synthetic construct
  source 1..20: mol_type = other RNA
ctccttcctagagtgtcaga

SEQ ID NO: 19240 - RNA, 20 nt, synthetic construct
  source 1..20: mol_type = other RNA
ggctcagcctttataaacag

SEQ ID NO: 19241 - RNA, 20 nt, synthetic construct
  source 1..20: mol_type = other RNA
agccatcagaacaccccagc

SEQ ID NO: 19242 - RNA, 20 nt, synthetic construct
  source 1..20: mol_type = other RNA
gatggcttgaacaagtcact

SEQ ID NO: 19243 - RNA, 20 nt, synthetic construct
  source 1..20: mol_type = other RNA
taagtgacttgttcaagcca

SEQ ID NO: 19244 - RNA, 20 nt, synthetic construct
  source 1..20: mol_type = other RNA
ctgataggctgatacgtttt

SEQ ID NO: 19245 - RNA, 20 nt, synthetic construct
  source 1..20: mol_type = other RNA
caccgcacatccccacaccc

SEQ ID NO: 19246 - RNA, 20 nt, synthetic construct
  source 1..20: mol_type = other RNA
ctcatggagcactaaatgcc

SEQ ID NO: 19247 - RNA, 20 nt, synthetic construct
  source 1..20: mol_type = other RNA
ggacactagaaggcccagcc

SEQ ID NO: 19248 - RNA, 20 nt, synthetic construct
  source 1..20: mol_type = other RNA
gcttctggacactagaaggc

SEQ ID NO: 19249 - RNA, 20 nt, synthetic construct
  source 1..20: mol_type = other RNA
agtgtccagaagcagaaagt

SEQ ID NO: 19250 - RNA, 20 nt, synthetic construct
  source 1..20: mol_type = other RNA
aagttggtgctaatgatgat

SEQ ID NO: 19251 - RNA, 20 nt, synthetic construct
  source 1..20: mol_type = other RNA
gaccaaaaatcatcattagc

SEQ ID NO: 19252 - RNA, 20 nt, synthetic construct
  source 1..20: mol_type = other RNA
catttccattcctttatccc

SEQ ID NO: 19253 - RNA, 20 nt, synthetic construct
  source 1..20: mol_type = other RNA
aggggataaaggaatggaaa

SEQ ID NO: 19254 - RNA, 20 nt, synthetic construct
  source 1..20: mol_type = other RNA
attcctttatccccttgaac

SEQ ID NO: 19255 - RNA, 20 nt, synthetic construct
  source 1..20: mol_type = other RNA
tttatccccttgaacttact

SEQ ID NO: 19256 - RNA, 20 nt, synthetic construct
  source 1..20: mol_type = other RNA
actttagtaagttcaagggg

SEQ ID NO: 19257 - RNA, 20 nt, synthetic construct
  source 1..20: mol_type = other RNA
aatctttaagagtccctggg

SEQ ID NO: 19258 - RNA, 20 nt, synthetic construct
  source 1..20: mol_type = other RNA
tataccttagaatcccaggg

SEQ ID NO: 19259 - RNA, 20 nt, synthetic construct
  source 1..20: mol_type = other RNA
aaggacattcatatacctta

SEQ ID NO: 19260 - RNA, 20 nt, synthetic construct
  source 1..20: mol_type = other RNA
aaggtatatgaatgtccttg

SEQ ID NO: 19261 - RNA, 20 nt, synthetic construct
  source 1..20: mol_type = other RNA
tgcaaggtgcttatttccca

SEQ ID NO: 19262 - RNA, 20 nt, synthetic construct
  source 1..20: mol_type = other RNA
catcctctttcatttgatgt

SEQ ID NO: 19263 - RNA, 20 nt, synthetic construct
  source 1..20: mol_type = other RNA
tttgatgtctagcattttac

SEQ ID NO: 19264 - RNA, 20 nt, synthetic construct
  source 1..20: mol_type = other RNA
taccaccacggtttagtaac

SEQ ID NO: 19265 - RNA, 20 nt, synthetic construct
  source 1..20: mol_type = other RNA
tcctcgtgaatgttactaaa

SEQ ID NO: 19266 - RNA, 20 nt, synthetic construct
  source 1..20: mol_type = other RNA
cgaggaggaagtggaggatc

SEQ ID NO: 19267 - RNA, 20 nt, synthetic construct
  source 1..20: mol_type = other RNA
gcccagtcatcaatgccctc

SEQ ID NO: 19268 - RNA, 20 nt, synthetic construct
  source 1..20: mol_type = other RNA
tattaattgaagagggcatt

SEQ ID NO: 19269 - RNA, 20 nt, synthetic construct
  source 1..20: mol_type = other RNA
attaatatgaaaggacacac

SEQ ID NO: 19270 - RNA, 20 nt, synthetic construct
  source 1..20: mol_type = other RNA
gtgcacgattggaatctcat

SEQ ID NO: 19271 - RNA, 20 nt, synthetic construct
  source 1..20: mol_type = other RNA
aatcgtgcacagaatataca

SEQ ID NO: 19272 - RNA, 20 nt, synthetic construct
  source 1..20: mol_type = other RNA
catgtatattctgtgcacga

SEQ ID NO: 19273 - RNA, 20 nt, synthetic construct
  source 1..20: mol_type = other RNA
aaggctaaggccaccctcag

SEQ ID NO: 19274 - RNA, 20 nt, synthetic construct
  source 1..20: mol_type = other RNA
tgcatgcaactgatgccttt

SEQ ID NO: 19275 - RNA, 20 nt, synthetic construct
  source 1..20: mol_type = other RNA
tttgaaaggcatcagttgca

SEQ ID NO: 19276 - RNA, 20 nt, synthetic construct
  source 1..20: mol_type = other RNA
aatgaaaccttacatctgtg

SEQ ID NO: 19277 - RNA, 20 nt, synthetic construct
  source 1..20: mol_type = other RNA
ccctcacatttgcctgtggt

SEQ ID NO: 19278 - RNA, 20 nt, synthetic construct
  source 1..20: mol_type = other RNA
ctgacacagaacaatgtaga

SEQ ID NO: 19279 - RNA, 20 nt, synthetic construct
  source 1..20: mol_type = other RNA
acattgttctgtgtcagtga

SEQ ID NO: 19280 - RNA, 20 nt, synthetic construct
  source 1..20: mol_type = other RNA
gtgtcagtgaagcaaggcag

SEQ ID NO: 19281 - RNA, 20 nt, synthetic construct
  source 1..20: mol_type = other RNA
aggcagggatgcctggttgt

SEQ ID NO: 19282 - RNA, 20 nt, synthetic construct
  source 1..20: mol_type = other RNA
ctgcccagctggaagtggca

SEQ ID NO: 19283 - RNA, 20 nt, synthetic construct
  source 1..20: mol_type = other RNA
agctgggcagtgaaacataa

SEQ ID NO: 19284 - RNA, 20 nt, synthetic construct
  source 1..20: mol_type = other RNA
ccccagccagtgatgtaaca

SEQ ID NO: 19285 - RNA, 20 nt, synthetic construct
  source 1..20: mol_type = other RNA
attgcccacgtaacaaattg

SEQ ID NO: 19286 - RNA, 20 nt, synthetic construct
  source 1..20: mol_type = other RNA
gtgcatgttacaaaatgagc

SEQ ID NO: 19287 - RNA, 20 nt, synthetic construct
  source 1..20: mol_type = other RNA
tgggtaggaatttgtacaac

SEQ ID NO: 19288 - RNA, 20 nt, synthetic construct
  source 1..20: mol_type = other RNA
tacccatgaatgtggtctac

SEQ ID NO: 19289 - RNA, 20 nt, synthetic construct
  source 1..20: mol_type = other RNA
agggacttgggcaaggggag

SEQ ID NO: 19290 - RNA, 20 nt, synthetic construct
  source 1..20: mol_type = other RNA
ttgagtctctctcttttttg

SEQ ID NO: 19291 - RNA, 20 nt, synthetic construct
  source 1..20: mol_type = other RNA
gaaaacaaaaaagagagaga

SEQ ID NO: 19292 - RNA, 20 nt, synthetic construct
  source 1..20: mol_type = other RNA
gaatcttttaattttttttg

SEQ ID NO: 19293 - RNA, 20 nt, synthetic construct
  source 1..20: mol_type = other RNA
cttacaacaaaaacaaacac

SEQ ID NO: 19294 - RNA, 20 nt, synthetic construct
  source 1..20: mol_type = other RNA
gcattcatattgcttcccca

SEQ ID NO: 19295 - RNA, 20 nt, synthetic construct
  source 1..20: mol_type = other RNA
tattgcttccccaggtaagt

SEQ ID NO: 19296 - RNA, 20 nt, synthetic construct
  source 1..20: mol_type = other RNA
ccaggtaagtggggttttga

SEQ ID NO: 19297 - RNA, 20 nt, synthetic construct
  source 1..20: mol_type = other RNA
catgaaaaataatctaacac

SEQ ID NO: 19298 - RNA, 20 nt, synthetic construct
  source 1..20: mol_type = other RNA
tgtgaaattagacagactgc

SEQ ID NO: 19299 - RNA, 20 nt, synthetic construct
  source 1..20: mol_type = other RNA
aaacatggtgcaaaacagta

SEQ ID NO: 19300 - RNA, 20 nt, synthetic construct
  source 1..20: mol_type = other RNA
tcttcccaaatacccacatg

SEQ ID NO: 19301 - RNA, 20 nt, synthetic construct
  source 1..20: mol_type = other RNA
tcccaaatacccacatgtct

SEQ ID NO: 19302 - RNA, 20 nt, synthetic construct
  source 1..20: mol_type = other RNA
caaatacccacatgtctaat

SEQ ID NO: 19303 - RNA, 20 nt, synthetic construct
  source 1..20: mol_type = other RNA
ggtcccctgcctaacaccct

SEQ ID NO: 19304 - RNA, 20 nt, synthetic construct
  source 1..20: mol_type = other RNA
catggccccaagtctaggat

SEQ ID NO: 19305 - RNA, 20 nt, synthetic construct
  source 1..20: mol_type = other RNA
ctctcttgctctcacccatc

SEQ ID NO: 19306 - RNA, 20 nt, synthetic construct
  source 1..20: mol_type = other RNA
ttcttctctttgcggtatgc

SEQ ID NO: 19307 - RNA, 20 nt, synthetic construct
  source 1..20: mol_type = other RNA
tctctttgcggtatgccctg

SEQ ID NO: 19308 - RNA, 20 nt, synthetic construct
  source 1..20: mol_type = other RNA
ctttgcggtatgccctgaca

SEQ ID NO: 19309 - RNA, 20 nt, synthetic construct
  source 1..20: mol_type = other RNA
tactgccaagggggtaaggc

SEQ ID NO: 19310 - RNA, 20 nt, synthetic construct
  source 1..20: mol_type = other RNA
gttttcctactgccaagggg

SEQ ID NO: 19311 - RNA, 20 nt, synthetic construct
  source 1..20: mol_type = other RNA
cagaggtgcaggcaagggca

SEQ ID NO: 19312 - RNA, 20 nt, synthetic construct
  source 1..20: mol_type = other RNA
agggccccagactcccagtg

SEQ ID NO: 19313 - RNA, 20 nt, synthetic construct
  source 1..20: mol_type = other RNA
gactctgccacttgccagat

SEQ ID NO: 19314 - RNA, 20 nt, synthetic construct
  source 1..20: mol_type = other RNA
ggtctatctggcaagtggca

SEQ ID NO: 19315 - RNA, 20 nt, synthetic construct
  source 1..20: mol_type = other RNA
aatggtgctttgcacatcag

SEQ ID NO: 19316 - RNA, 20 nt, synthetic construct
  source 1..20: mol_type = other RNA
aagtaggcttccctttttct

SEQ ID NO: 19317 - RNA, 20 nt, synthetic construct
  source 1..20: mol_type = other RNA
ctttttctgtcattttccta

SEQ ID NO: 19318 - RNA, 20 nt, synthetic construct
  source 1..20: mol_type = other RNA
gtcattttcctattattttt

SEQ ID NO: 19319 - RNA, 20 nt, synthetic construct
  source 1..20: mol_type = other RNA
tattatttttaaaacctcac

SEQ ID NO: 19320 - RNA, 20 nt, synthetic construct
  source 1..20: mol_type = other RNA
ctttttctgcactgctgagt

SEQ ID NO: 19321 - RNA, 20 nt, synthetic construct
  source 1..20: mol_type = other RNA
gcactgctgagtctgggagc

SEQ ID NO: 19322 - RNA, 20 nt, synthetic construct
  source 1..20: mol_type = other RNA
ttttacctggcctcagtgct

SEQ ID NO: 19323 - RNA, 20 nt, synthetic construct
  source 1..20: mol_type = other RNA
tcaatggtaaaataggaaca

SEQ ID NO: 19324 - RNA, 20 nt, synthetic construct
  source 1..20: mol_type = other RNA
tattttaccattgaggaagc

SEQ ID NO: 19325 - RNA, 20 nt, synthetic construct
  source 1..20: mol_type = other RNA
ctgagccccagcttcctcaa

SEQ ID NO: 19326 - RNA, 20 nt, synthetic construct
  source 1..20: mol_type = other RNA
ggtttgtctgtaccaccctc

SEQ ID NO: 19327 - RNA, 20 nt, synthetic construct
  source 1..20: mol_type = other RNA
aattcaggtttgtctgtacc

SEQ ID NO: 19328 - RNA, 20 nt, synthetic construct
  source 1..20: mol_type = other RNA
aagtcctgacagcccatagg

SEQ ID NO: 19329 - RNA, 20 nt, synthetic construct
  source 1..20: mol_type = other RNA
tcagctgatgtgggctgcag

SEQ ID NO: 19330 - RNA, 20 nt, synthetic construct
  source 1..20: mol_type = other RNA
cccataacagccctgcagcc

SEQ ID NO: 19331 - RNA, 20 nt, synthetic construct
  source 1..20: mol_type = other RNA
tattatttcccccataacag

SEQ ID NO: 19332 - RNA, 20 nt, synthetic construct
  source 1..20: mol_type = other RNA
ttattagtagtaggagctgc

SEQ ID NO: 19333 - RNA, 20 nt, synthetic construct
  source 1..20: mol_type = other RNA
attctttattagtagtagga

SEQ ID NO: 19334 - RNA, 20 nt, synthetic construct
  source 1..20: mol_type = other RNA
gtcacttgcaagaaagaatc

SEQ ID NO: 19335 - RNA, 20 nt, synthetic construct
  source 1..20: mol_type = other RNA
ttcttgcaagtgacagaaaa

SEQ ID NO: 19336 - RNA, 20 nt, synthetic construct
  source 1..20: mol_type = other RNA
tgcaagtgacagaaaatcca

SEQ ID NO: 19337 - RNA, 20 nt, synthetic construct
  source 1..20: mol_type = other RNA
cttgttttgcttaatccaat

SEQ ID NO: 19338 - RNA, 20 nt, synthetic construct
  source 1..20: mol_type = other RNA
tagtgagctgcaaagttttc

SEQ ID NO: 19339 - RNA, 20 nt, synthetic construct
  source 1..20: mol_type = other RNA
ggctcacatgatggccccaa

SEQ ID NO: 19340 - RNA, 20 nt, synthetic construct
  source 1..20: mol_type = other RNA
catggctgcagatgctgtgg

SEQ ID NO: 19341 - RNA, 20 nt, synthetic construct
  source 1..20: mol_type = other RNA
cggtacagccacagcaccac

SEQ ID NO: 19342 - RNA, 20 nt, synthetic construct
  source 1..20: mol_type = other RNA
ttcccggtacagccacagca

SEQ ID NO: 19343 - RNA, 20 nt, synthetic construct
  source 1..20: mol_type = other RNA
tattctttcccggtacagcc

SEQ ID NO: 19344 - RNA, 20 nt, synthetic construct
  source 1..20: mol_type = other RNA
cataattgggagagtggcct

SEQ ID NO: 19345 - RNA, 20 nt, synthetic construct
  source 1..20: mol_type = other RNA
cagagtgggcagactattgt

SEQ ID NO: 19346 - RNA, 20 nt, synthetic construct
  source 1..20: mol_type = other RNA
ggggcaggactgtgacccaa

SEQ ID NO: 19347 - RNA, 20 nt, synthetic construct
  source 1..20: mol_type = other RNA
cctccaacatggaacaattg

SEQ ID NO: 19348 - RNA, 20 nt, synthetic construct
  source 1..20: mol_type = other RNA
atgttggaggtgaaggcaag

SEQ ID NO: 19349 - RNA, 20 nt, synthetic construct
  source 1..20: mol_type = other RNA
agaggattatgggaggtagg

SEQ ID NO: 19350 - RNA, 20 nt, synthetic construct
  source 1..20: mol_type = other RNA
ggctgcccagcagctttttg

SEQ ID NO: 19351 - RNA, 20 nt, synthetic construct
  source 1..20: mol_type = other RNA
tcagttgaggtatcatagag

SEQ ID NO: 19352 - RNA, 20 nt, synthetic construct
  source 1..20: mol_type = other RNA
tgctttcatcagttgaggta

SEQ ID NO: 19353 - RNA, 20 nt, synthetic construct
  source 1..20: mol_type = other RNA
ggctctcccatcttccatgt

SEQ ID NO: 19354 - RNA, 20 nt, synthetic construct
  source 1..20: mol_type = other RNA
atgtgacattgggcagttat

SEQ ID NO: 19355 - RNA, 20 nt, synthetic construct
  source 1..20: mol_type = other RNA
catcttacatatgagataat

SEQ ID NO: 19356 - RNA, 20 nt, synthetic construct
  source 1..20: mol_type = other RNA
tactggcactaccatcacca

SEQ ID NO: 19357 - RNA, 20 nt, synthetic construct
  source 1..20: mol_type = other RNA
accaccatcaccaatatcat

SEQ ID NO: 19358 - RNA, 20 nt, synthetic construct
  source 1..20: mol_type = other RNA
accaccatcaccaatatcat

SEQ ID NO: 19359 - RNA, 20 nt, synthetic construct
  source 1..20: mol_type = other RNA
actgccatcaccattaacat

SEQ ID NO: 19360 - RNA, 20 nt, synthetic construct
  source 1..20: mol_type = other RNA
tcatctgtattatcattact

SEQ ID NO: 19361 - RNA, 20 nt, synthetic construct
  source 1..20: mol_type = other RNA
tctctcccacccccatccac

SEQ ID NO: 19362 - RNA, 20 nt, synthetic construct
  source 1..20: mol_type = other RNA
aaccaccatcctgcactggg

SEQ ID NO: 19363 - RNA, 20 nt, synthetic construct
  source 1..20: mol_type = other RNA
cagtggacatgtgggtgaga

SEQ ID NO: 19364 - RNA, 20 nt, synthetic construct
  source 1..20: mol_type = other RNA
gaaaatccttttctcagtgg

SEQ ID NO: 19365 - RNA, 20 nt, synthetic construct
  source 1..20: mol_type = other RNA
gaacaccaactagaccagga

SEQ ID NO: 19366 - RNA, 20 nt, synthetic construct
  source 1..20: mol_type = other RNA
acatgttaataatgacatca

SEQ ID NO: 19367 - RNA, 20 nt, synthetic construct
  source 1..20: mol_type = other RNA
gagaagctgagaacacccat

SEQ ID NO: 19368 - RNA, 20 nt, synthetic construct
  source 1..20: mol_type = other RNA
cagcttctcagaaggaggtc

SEQ ID NO: 19369 - RNA, 20 nt, synthetic construct
  source 1..20: mol_type = other RNA
cagaaggaggtcaaaattct

SEQ ID NO: 19370 - RNA, 20 nt, synthetic construct
  source 1..20: mol_type = other RNA
ccccctctccccttcatgtg

SEQ ID NO: 19371 - RNA, 20 nt, synthetic construct
  source 1..20: mol_type = other RNA
tgtgtccagaccttcccgga

SEQ ID NO: 19372 - RNA, 20 nt, synthetic construct
  source 1..20: mol_type = other RNA
cggatttggatgtaccaagt

SEQ ID NO: 19373 - RNA, 20 nt, synthetic construct
  source 1..20: mol_type = other RNA
atcctcaggttacctgtggc

SEQ ID NO: 19374 - RNA, 20 nt, synthetic construct
  source 1..20: mol_type = other RNA
cagcaactcctggtgggttt

SEQ ID NO: 19375 - RNA, 20 nt, synthetic construct
  source 1..20: mol_type = other RNA
gcaaaatattttgagaaggg

SEQ ID NO: 19376 - RNA, 20 nt, synthetic construct
  source 1..20: mol_type = other RNA
acgctgctcatgtaaactcc

SEQ ID NO: 19377 - RNA, 20 nt, synthetic construct
  source 1..20: mol_type = other RNA
ccaaagcccttgactgcact

SEQ ID NO: 19378 - RNA, 20 nt, synthetic construct
  source 1..20: mol_type = other RNA
agcctgtgccatgcttgcaa

SEQ ID NO: 19379 - RNA, 20 nt, synthetic construct
  source 1..20: mol_type = other RNA
aatgagagctgggcttgcaa

SEQ ID NO: 19380 - RNA, 20 nt, synthetic construct
  source 1..20: mol_type = other RNA
aatgttgcaagcccagctct

SEQ ID NO: 19381 - RNA, 20 nt, synthetic construct
  source 1..20: mol_type = other RNA
cagtgctctcacaaataatc

SEQ ID NO: 19382 - RNA, 20 nt, synthetic construct
  source 1..20: mol_type = other RNA
agatggacatgcccagggat

SEQ ID NO: 19383 - RNA, 20 nt, synthetic construct
  source 1..20: mol_type = other RNA
tctggcactttagcagaggt

SEQ ID NO: 19384 - RNA, 20 nt, synthetic construct
  source 1..20: mol_type = other RNA
ccaaattgaaacagaacctc

SEQ ID NO: 19385 - RNA, 20 nt, synthetic construct
  source 1..20: mol_type = other RNA
ttcgccaaattgaaacagaa

SEQ ID NO: 19386 - RNA, 20 nt, synthetic construct
  source 1..20: mol_type = other RNA
gtttcaatttggcgaaggaa

SEQ ID NO: 19387 - RNA, 20 nt, synthetic construct
  source 1..20: mol_type = other RNA
atttggcgaaggaaattaag

SEQ ID NO: 19388 - RNA, 20 nt, synthetic construct
  source 1..20: mol_type = other RNA
tttgtgaaaaactgcttaat

SEQ ID NO: 19389 - RNA, 20 nt, synthetic construct
  source 1..20: mol_type = other RNA
tcttttgtgaaaaactgctt

SEQ ID NO: 19390 - RNA, 20 nt, synthetic construct
  source 1..20: mol_type = other RNA
caaaagaagaactacaacga

SEQ ID NO: 19391 - RNA, 20 nt, synthetic construct
  source 1..20: mol_type = other RNA
cctcgttgtagttcttcttt

SEQ ID NO: 19392 - RNA, 20 nt, synthetic construct
  source 1..20: mol_type = other RNA
ttgacaattagggagaagaa

SEQ ID NO: 19393 - RNA, 20 nt, synthetic construct
  source 1..20: mol_type = other RNA
tctccctaattgtcaaggaa

SEQ ID NO: 19394 - RNA, 20 nt, synthetic construct
  source 1..20: mol_type = other RNA
ccctaattgtcaaggaagtg

SEQ ID NO: 19395 - RNA, 20 nt, synthetic construct
  source 1..20: mol_type = other RNA
aatttacacttccttgacaa

SEQ ID NO: 19396 - RNA, 20 nt, synthetic construct
  source 1..20: mol_type = other RNA
ttttctaatttacacttcct

SEQ ID NO: 19397 - RNA, 20 nt, synthetic construct
  source 1..20: mol_type = other RNA
acctactatgttagctaata

SEQ ID NO: 19398 - RNA, 20 nt, synthetic construct
  source 1..20: mol_type = other RNA
atttttaaaatattagctaa

SEQ ID NO: 19399 - RNA, 20 nt, synthetic construct
  source 1..20: mol_type = other RNA
agtgacattttccactgtca

SEQ ID NO: 19400 - RNA, 20 nt, synthetic construct
  source 1..20: mol_type = other RNA
ctaaaagggtgtgacagtgg

SEQ ID NO: 19401 - RNA, 20 nt, synthetic construct
  source 1..20: mol_type = other RNA
actgtcacacccttttagag

SEQ ID NO: 19402 - RNA, 20 nt, synthetic construct
  source 1..20: mol_type = other RNA
atctcacagtaacattgcca

SEQ ID NO: 19403 - RNA, 20 nt, synthetic construct
  source 1..20: mol_type = other RNA
cataattatatagacatatt

SEQ ID NO: 19404 - RNA, 20 nt, synthetic construct
  source 1..20: mol_type = other RNA
gaagtctcagttcccataat

SEQ ID NO: 19405 - RNA, 20 nt, synthetic construct
  source 1..20: mol_type = other RNA
ttattactttctgaagtctc

SEQ ID NO: 19406 - RNA, 20 nt, synthetic construct
  source 1..20: mol_type = other RNA
tattccttattactttctga

SEQ ID NO: 19407 - RNA, 20 nt, synthetic construct
  source 1..20: mol_type = other RNA
gaaagtaataaggaataaga

SEQ ID NO: 19408 - RNA, 20 nt, synthetic construct
  source 1..20: mol_type = other RNA
ttcttattccttattacttt

SEQ ID NO: 19409 - RNA, 20 nt, synthetic construct
  source 1..20: mol_type = other RNA
taaatttcattcttattcct

SEQ ID NO: 19410 - RNA, 20 nt, synthetic construct
  source 1..20: mol_type = other RNA
acatgtttgttcataaattt

SEQ ID NO: 19411 - RNA, 20 nt, synthetic construct
  source 1..20: mol_type = other RNA
aaccttccacatgtttgttc

SEQ ID NO: 19412 - RNA, 20 nt, synthetic construct
  source 1..20: mol_type = other RNA
tccccatgcgtgttggcccc

SEQ ID NO: 19413 - RNA, 20 nt, synthetic construct
  source 1..20: mol_type = other RNA
gttgaggaaactgaggcgta

SEQ ID NO: 19414 - RNA, 20 nt, synthetic construct
  source 1..20: mol_type = other RNA
tcagttgaggaaactgaggc

SEQ ID NO: 19415 - RNA, 20 nt, synthetic construct
  source 1..20: mol_type = other RNA
tgttcttcagttgaggaaac

SEQ ID NO: 19416 - RNA, 20 nt, synthetic construct
  source 1..20: mol_type = other RNA
tcaactgaagaacaggaatg

SEQ ID NO: 19417 - RNA, 20 nt, synthetic construct
  source 1..20: mol_type = other RNA
taggaccgttgtgaggatta

SEQ ID NO: 19418 - RNA, 20 nt, synthetic construct
  source 1..20: mol_type = other RNA
aggcacaagctcataatgtg

SEQ ID NO: 19419 - RNA, 20 nt, synthetic construct
  source 1..20: mol_type = other RNA
tagtaaatgatgactattct

SEQ ID NO: 19420 - RNA, 20 nt, synthetic construct
  source 1..20: mol_type = other RNA
tttttattgcaataaaattt

SEQ ID NO: 19421 - RNA, 20 nt, synthetic construct
  source 1..20: mol_type = other RNA
gtacattcacaatggtgtgc

SEQ ID NO: 19422 - RNA, 20 nt, synthetic construct
  source 1..20: mol_type = other RNA
caatggtgtgcaaccgtcac

SEQ ID NO: 19423 - RNA, 20 nt, synthetic construct
  source 1..20: mol_type = other RNA
aggacatttttctcatcccc

SEQ ID NO: 19424 - RNA, 20 nt, synthetic construct
  source 1..20: mol_type = other RNA
tttggggatgagaaaaatgt

SEQ ID NO: 19425 - RNA, 20 nt, synthetic construct
  source 1..20: mol_type = other RNA
catccccaaaggaaacctca

SEQ ID NO: 19426 - RNA, 20 nt, synthetic construct
  source 1..20: mol_type = other RNA
taactaatattttaatgagg

SEQ ID NO: 19427 - RNA, 20 nt, synthetic construct
  source 1..20: mol_type = other RNA
atcaatgttatatcatgagt

SEQ ID NO: 19428 - RNA, 20 nt, synthetic construct
  source 1..20: mol_type = other RNA
tatactgattttttcaatca

SEQ ID NO: 19429 - RNA, 20 nt, synthetic construct
  source 1..20: mol_type = other RNA
tttactattacatcataatg

SEQ ID NO: 19430 - RNA, 20 nt, synthetic construct
  source 1..20: mol_type = other RNA
gatttttatatgcttctttt

SEQ ID NO: 19431 - RNA, 20 nt, synthetic construct
  source 1..20: mol_type = other RNA
ttttatatacttttttcaga

SEQ ID NO: 19432 - RNA, 20 nt, synthetic construct
  source 1..20: mol_type = other RNA
cagactctctttacattgta

SEQ ID NO: 19433 - RNA, 20 nt, synthetic construct
  source 1..20: mol_type = other RNA
tttgaagctatcaaaatgat

SEQ ID NO: 19434 - RNA, 20 nt, synthetic construct
  source 1..20: mol_type = other RNA
aaagaaaagcaaaaagtaca

SEQ ID NO: 19435 - RNA, 20 nt, synthetic construct
  source 1..20: mol_type = other RNA
acaatctgggctttgtcatg

SEQ ID NO: 19436 - RNA, 20 nt, synthetic construct
  source 1..20: mol_type = other RNA
caagacctggattcaacaat

SEQ ID NO: 19437 - RNA, 20 nt, synthetic construct
  source 1..20: mol_type = other RNA
gcagcctcacggacagacag

SEQ ID NO: 19438 - RNA, 20 nt, synthetic construct
  source 1..20: mol_type = other RNA
agaagaacagagcagtggag

SEQ ID NO: 19439 - RNA, 20 nt, synthetic construct
  source 1..20: mol_type = other RNA
cgaggaaattccagaagaac

SEQ ID NO: 19440 - RNA, 20 nt, synthetic construct
  source 1..20: mol_type = other RNA
tctggaatttcctcgtgaac

SEQ ID NO: 19441 - RNA, 20 nt, synthetic construct
  source 1..20: mol_type = other RNA
ggaatttcctcgtgaacaag

SEQ ID NO: 19442 - RNA, 20 nt, synthetic construct
  source 1..20: mol_type = other RNA
tcgtgaacaagctttggcct

SEQ ID NO: 19443 - RNA, 20 nt, synthetic construct
  source 1..20: mol_type = other RNA
ttcatctttttaaacacagg

SEQ ID NO: 19444 - RNA, 20 nt, synthetic construct
  source 1..20: mol_type = other RNA
tctttttaaacacaggtacc

SEQ ID NO: 19445 - RNA, 20 nt, synthetic construct
  source 1..20: mol_type = other RNA
ttgagaaggccagtcccaaa

SEQ ID NO: 19446 - RNA, 20 nt, synthetic construct
  source 1..20: mol_type = other RNA
caaggaagcccagctccttg

SEQ ID NO: 19447 - RNA, 20 nt, synthetic construct
  source 1..20: mol_type = other RNA
tacctggcaactgtcagtgc

SEQ ID NO: 19448 - RNA, 20 nt, synthetic construct
  source 1..20: mol_type = other RNA
tgaatttgccactttgggac

SEQ ID NO: 19449 - RNA, 20 nt, synthetic construct
  source 1..20: mol_type = other RNA
actgacaaaaccttcctgaa

SEQ ID NO: 19450 - RNA, 20 nt, synthetic construct
  source 1..20: mol_type = other RNA
ggaaggttttgtcagtggaa

SEQ ID NO: 19451 - RNA, 20 nt, synthetic construct
  source 1..20: mol_type = other RNA
gagcaacacttagactgggg

SEQ ID NO: 19452 - RNA, 20 nt, synthetic construct
  source 1..20: mol_type = other RNA
gggacagatctggggagttt

SEQ ID NO: 19453 - RNA, 20 nt, synthetic construct
  source 1..20: mol_type = other RNA
gatcatctaaggagacgtct

SEQ ID NO: 19454 - RNA, 20 nt, synthetic construct
  source 1..20: mol_type = other RNA
agatccatagcaagggagcc

SEQ ID NO: 19455 - RNA, 20 nt, synthetic construct
  source 1..20: mol_type = other RNA
tggtgtgtgctggtcaccag

SEQ ID NO: 19456 - RNA, 20 nt, synthetic construct
  source 1..20: mol_type = other RNA
gtcactggtgaccagcacac

SEQ ID NO: 19457 - RNA, 20 nt, synthetic construct
  source 1..20: mol_type = other RNA
tctctactggaaaagccacc

SEQ ID NO: 19458 - RNA, 20 nt, synthetic construct
  source 1..20: mol_type = other RNA
agtagagaggaaggtagagg

SEQ ID NO: 19459 - RNA, 20 nt, synthetic construct
  source 1..20: mol_type = other RNA
tttagactgggctagcctgg

SEQ ID NO: 19460 - RNA, 20 nt, synthetic construct
  source 1..20: mol_type = other RNA
taacttggtgtttcctttag

SEQ ID NO: 19461 - RNA, 20 nt, synthetic construct
  source 1..20: mol_type = other RNA
caagggattattttttttcc

SEQ ID NO: 19462 - RNA, 20 nt, synthetic construct
  source 1..20: mol_type = other RNA
tgggaaaaaaaataatccct

SEQ ID NO: 19463 - RNA, 20 nt, synthetic construct
  source 1..20: mol_type = other RNA
caggaaaaaactaagtgatg

SEQ ID NO: 19464 - RNA, 20 nt, synthetic construct
  source 1..20: mol_type = other RNA
acaaaaccacatcacttagt

SEQ ID NO: 19465 - RNA, 20 nt, synthetic construct
  source 1..20: mol_type = other RNA
aatcagaaaggaacttatga

SEQ ID NO: 19466 - RNA, 20 nt, synthetic construct
  source 1..20: mol_type = other RNA
cagtaattcaaatcagaaag

SEQ ID NO: 19467 - RNA, 20 nt, synthetic construct
  source 1..20: mol_type = other RNA
tttctgatttgaattactgg

SEQ ID NO: 19468 - RNA, 20 nt, synthetic construct
  source 1..20: mol_type = other RNA
gatttgaattactgggaaaa

SEQ ID NO: 19469 - RNA, 20 nt, synthetic construct
  source 1..20: mol_type = other RNA
cttatccatatgtacatttt

SEQ ID NO: 19470 - RNA, 20 nt, synthetic construct
  source 1..20: mol_type = other RNA
tgtgagctttaagctgccaa

SEQ ID NO: 19471 - RNA, 20 nt, synthetic construct
  source 1..20: mol_type = other RNA
cgaagcaaaccagaggccct

SEQ ID NO: 19472 - RNA, 20 nt, synthetic construct
  source 1..20: mol_type = other RNA
agaaggacaaatacatttta

SEQ ID NO: 19473 - RNA, 20 nt, synthetic construct
  source 1..20: mol_type = other RNA
tggggtcttggctgtgcacg

SEQ ID NO: 19474 - RNA, 20 nt, synthetic construct
  source 1..20: mol_type = other RNA
aggtttgttacttggattga

SEQ ID NO: 19475 - RNA, 20 nt, synthetic construct
  source 1..20: mol_type = other RNA
catcattccctcaatccaag

SEQ ID NO: 19476 - RNA, 20 nt, synthetic construct
  source 1..20: mol_type = other RNA
agcatgctaaatccttaccc

SEQ ID NO: 19477 - RNA, 20 nt, synthetic construct
  source 1..20: mol_type = other RNA
aaattttcatgctcttttca

SEQ ID NO: 19478 - RNA, 20 nt, synthetic construct
  source 1..20: mol_type = other RNA
tgctcttttcatcccatcta

SEQ ID NO: 19479 - RNA, 20 nt, synthetic construct
  source 1..20: mol_type = other RNA
tcccatctatttttattttt

SEQ ID NO: 19480 - RNA, 20 nt, synthetic construct
  source 1..20: mol_type = other RNA
gcacatgtaccccaggacgt

SEQ ID NO: 19481 - RNA, 20 nt, synthetic construct
  source 1..20: mol_type = other RNA
gtatttcttttagttctatc

SEQ ID NO: 19482 - RNA, 20 nt, synthetic construct
  source 1..20: mol_type = other RNA
tttagttctatccctcccct

SEQ ID NO: 19483 - RNA, 20 nt, synthetic construct
  source 1..20: mol_type = other RNA
atccctcccctagccctcca

SEQ ID NO: 19484 - RNA, 20 nt, synthetic construct
  source 1..20: mol_type = other RNA
cattgttcaactcacactta

SEQ ID NO: 19485 - RNA, 20 nt, synthetic construct
  source 1..20: mol_type = other RNA
cactcataagtgtgagttga

SEQ ID NO: 19486 - RNA, 20 nt, synthetic construct
  source 1..20: mol_type = other RNA
actcacacttatgagtgaga

SEQ ID NO: 19487 - RNA, 20 nt, synthetic construct
  source 1..20: mol_type = other RNA
cagcaaactaacacaagaac

SEQ ID NO: 19488 - RNA, 20 nt, synthetic construct
  source 1..20: mol_type = other RNA
gttcttgtgttagtttgctg

SEQ ID NO: 19489 - RNA, 20 nt, synthetic construct
  source 1..20: mol_type = other RNA
tgtgttagtttgctgagaat

SEQ ID NO: 19490 - RNA, 20 nt, synthetic construct
  source 1..20: mol_type = other RNA
agcttcatccatgtccctgc

SEQ ID NO: 19491 - RNA, 20 nt, synthetic construct
  source 1..20: mol_type = other RNA
tccatgtccctgcaaaggac

SEQ ID NO: 19492 - RNA, 20 nt, synthetic construct
  source 1..20: mol_type = other RNA
tgtcctttgcagggacatgg

SEQ ID NO: 19493 - RNA, 20 nt, synthetic construct
  source 1..20: mol_type = other RNA
atgcagccataaaaaaggat

SEQ ID NO: 19494 - RNA, 20 nt, synthetic construct
  source 1..20: mol_type = other RNA
atggtgtatatgtgccacat

SEQ ID NO: 19495 - RNA, 20 nt, synthetic construct
  source 1..20: mol_type = other RNA
caatagcaaagagttggaac

SEQ ID NO: 19496 - RNA, 20 nt, synthetic construct
  source 1..20: mol_type = other RNA
aactctttgctattgtgaat

SEQ ID NO: 19497 - RNA, 20 nt, synthetic construct
  source 1..20: mol_type = other RNA
gctatgaaaacacatgcaca

SEQ ID NO: 19498 - RNA, 20 nt, synthetic construct
  source 1..20: mol_type = other RNA
tagcagaatgatttataatc

SEQ ID NO: 19499 - RNA, 20 nt, synthetic construct
  source 1..20: mol_type = other RNA
tcaaagatctagcaccagaa

SEQ ID NO: 19500 - RNA, 20 nt, synthetic construct
  source 1..20: mol_type = other RNA
ggtgctagatctttgaggaa

SEQ ID NO: 19501 - RNA, 20 nt, synthetic construct
  source 1..20: mol_type = other RNA
accattgtggaagacagtgt

SEQ ID NO: 19502 - RNA, 20 nt, synthetic construct
  source 1..20: mol_type = other RNA
acaatggttgaactaattta

SEQ ID NO: 19503 - RNA, 20 nt, synthetic construct
  source 1..20: mol_type = other RNA
tatttctccacatcctctcc

SEQ ID NO: 19504 - RNA, 20 nt, synthetic construct
  source 1..20: mol_type = other RNA
ccacatcctctccagcatct

SEQ ID NO: 19505 - RNA, 20 nt, synthetic construct
  source 1..20: mol_type = other RNA
tgactttttaatgatcgcca

SEQ ID NO: 19506 - RNA, 20 nt, synthetic construct
  source 1..20: mol_type = other RNA
aactggcatgagatggtatc

SEQ ID NO: 19507 - RNA, 20 nt, synthetic construct
  source 1..20: mol_type = other RNA
ctaatgatcagtgatgatga

SEQ ID NO: 19508 - RNA, 20 nt, synthetic construct
  source 1..20: mol_type = other RNA
catatgtttgttggctgcat

SEQ ID NO: 19509 - RNA, 20 nt, synthetic construct
  source 1..20: mol_type = other RNA
ccaaaaaaggcatttatgca

SEQ ID NO: 19510 - RNA, 20 nt, synthetic construct
  source 1..20: mol_type = other RNA
tatcctttgcccactttttg

SEQ ID NO: 19511 - RNA, 20 nt, synthetic construct
  source 1..20: mol_type = other RNA
ggtaaatttgtttaagttct

SEQ ID NO: 19512 - RNA, 20 nt, synthetic construct
  source 1..20: mol_type = other RNA
ttgtagattctggatattag

SEQ ID NO: 19513 - RNA, 20 nt, synthetic construct
  source 1..20: mol_type = other RNA
ggatattagccttttgtcag

SEQ ID NO: 19514 - RNA, 20 nt, synthetic construct
  source 1..20: mol_type = other RNA
ctccgatgatagtttctttt

SEQ ID NO: 19515 - RNA, 20 nt, synthetic construct
  source 1..20: mol_type = other RNA
gcacagcaaaagaaactatc

SEQ ID NO: 19516 - RNA, 20 nt, synthetic construct
  source 1..20: mol_type = other RNA
tttgctgtgcagaagctctt

SEQ ID NO: 19517 - RNA, 20 nt, synthetic construct
  source 1..20: mol_type = other RNA
tgactaaaacactaaaagca

SEQ ID NO: 19518 - RNA, 20 nt, synthetic construct
  source 1..20: mol_type = other RNA
ggacatagcatgggagaaga

SEQ ID NO: 19519 - RNA, 20 nt, synthetic construct
  source 1..20: mol_type = other RNA
cccatgctatgtcctgaatg

SEQ ID NO: 19520 - RNA, 20 nt, synthetic construct
  source 1..20: mol_type = other RNA
tccagggtttttatggtttt

SEQ ID NO: 19521 - RNA, 20 nt, synthetic construct
  source 1..20: mol_type = other RNA
agggtttttatggttttagg

SEQ ID NO: 19522 - RNA, 20 nt, synthetic construct
  source 1..20: mol_type = other RNA
ttgtctcttttgatctttgt

SEQ ID NO: 19523 - RNA, 20 nt, synthetic construct
  source 1..20: mol_type = other RNA
agtctctgataaaatatact

SEQ ID NO: 19524 - RNA, 20 nt, synthetic construct
  source 1..20: mol_type = other RNA
ttttgctttccttttgcttg

SEQ ID NO: 19525 - RNA, 20 nt, synthetic construct
  source 1..20: mol_type = other RNA
ttttgcttggtaaatattct

SEQ ID NO: 19526 - RNA, 20 nt, synthetic construct
  source 1..20: mol_type = other RNA
tccatccctttattttgagc

SEQ ID NO: 19527 - RNA, 20 nt, synthetic construct
  source 1..20: mol_type = other RNA
atccctttattttgagccta

SEQ ID NO: 19528 - RNA, 20 nt, synthetic construct
  source 1..20: mol_type = other RNA
ggaaacctatctcatgtgca

SEQ ID NO: 19529 - RNA, 20 nt, synthetic construct
  source 1..20: mol_type = other RNA
tgaatacagcacaccaatgg

SEQ ID NO: 19530 - RNA, 20 nt, synthetic construct
  source 1..20: mol_type = other RNA
atttgccagtctgtgtcttt

SEQ ID NO: 19531 - RNA, 20 nt, synthetic construct
  source 1..20: mol_type = other RNA
cacataacaatattaacctt

SEQ ID NO: 19532 - RNA, 20 nt, synthetic construct
  source 1..20: mol_type = other RNA
tcatagtgtggatggccttt

SEQ ID NO: 19533 - RNA, 20 nt, synthetic construct
  source 1..20: mol_type = other RNA
tagtgtggatggcctttaca

SEQ ID NO: 19534 - RNA, 20 nt, synthetic construct
  source 1..20: mol_type = other RNA
tttccatgtttagtgcttcg

SEQ ID NO: 19535 - RNA, 20 nt, synthetic construct
  source 1..20: mol_type = other RNA
atgtttagtgcttcgttcag

SEQ ID NO: 19536 - RNA, 20 nt, synthetic construct
  source 1..20: mol_type = other RNA
ttcaggagctcttgtgaggc

SEQ ID NO: 19537 - RNA, 20 nt, synthetic construct
  source 1..20: mol_type = other RNA
ggagctcttgtgaggcaggc

SEQ ID NO: 19538 - RNA, 20 nt, synthetic construct
  source 1..20: mol_type = other RNA
gcatttgcttgtctgtaaag

SEQ ID NO: 19539 - RNA, 20 nt, synthetic construct
  source 1..20: mol_type = other RNA
taagcaaaggagaaataaaa

SEQ ID NO: 19540 - RNA, 20 nt, synthetic construct
  source 1..20: mol_type = other RNA
cctttgcttatgaagcttag

SEQ ID NO: 19541 - RNA, 20 nt, synthetic construct
  source 1..20: mol_type = other RNA
tacccagcgaaactaagctt

SEQ ID NO: 19542 - RNA, 20 nt, synthetic construct
  source 1..20: mol_type = other RNA
acccagaatttcatacccag

SEQ ID NO: 19543 - RNA, 20 nt, synthetic construct
  source 1..20: mol_type = other RNA
ctgggtatgaaattctgggt

SEQ ID NO: 19544 - RNA, 20 nt, synthetic construct
  source 1..20: mol_type = other RNA
gggttgaaaattattttctt

SEQ ID NO: 19545 - RNA, 20 nt, synthetic construct
  source 1..20: mol_type = other RNA
aaaagaaaataattttcaac

SEQ ID NO: 19546 - RNA, 20 nt, synthetic construct
  source 1..20: mol_type = other RNA
acattctaaaagaaaataat

SEQ ID NO: 19547 - RNA, 20 nt, synthetic construct
  source 1..20: mol_type = other RNA
tttagaatgttgaatattgg

SEQ ID NO: 19548 - RNA, 20 nt, synthetic construct
  source 1..20: mol_type = other RNA
ggcttgttgggtttctgcag

SEQ ID NO: 19549 - RNA, 20 nt, synthetic construct
  source 1..20: mol_type = other RNA
gcagagagatccactgttag

SEQ ID NO: 19550 - RNA, 20 nt, synthetic construct
  source 1..20: mol_type = other RNA
ctttccgggtaacccaacct

SEQ ID NO: 19551 - RNA, 20 nt, synthetic construct
  source 1..20: mol_type = other RNA
gggtaacccaacctttctct

SEQ ID NO: 19552 - RNA, 20 nt, synthetic construct
  source 1..20: mol_type = other RNA
aagggcagccagagagaaag

SEQ ID NO: 19553 - RNA, 20 nt, synthetic construct
  source 1..20: mol_type = other RNA
ctctggctgcccttagaaat

SEQ ID NO: 19554 - RNA, 20 nt, synthetic construct
  source 1..20: mol_type = other RNA
ccaaggttgaaatgaaggaa

SEQ ID NO: 19555 - RNA, 20 nt, synthetic construct
  source 1..20: mol_type = other RNA
ttcatttcaaccttggtgaa

SEQ ID NO: 19556 - RNA, 20 nt, synthetic construct
  source 1..20: mol_type = other RNA
tttcaaccttggtgaatctg

SEQ ID NO: 19557 - RNA, 20 nt, synthetic construct
  source 1..20: mol_type = other RNA
accttggtgaatctgacgat

SEQ ID NO: 19558 - RNA, 20 nt, synthetic construct
  source 1..20: mol_type = other RNA
cgaggagtatctttgtggtg

SEQ ID NO: 19559 - RNA, 20 nt, synthetic construct
  source 1..20: mol_type = other RNA
ggaaatacagagaacaccac

SEQ ID NO: 19560 - RNA, 20 nt, synthetic construct
  source 1..20: mol_type = other RNA
aattcaggaaatacagagaa

SEQ ID NO: 19561 - RNA, 20 nt, synthetic construct
  source 1..20: mol_type = other RNA
ctgtatttcctgaatttgaa

SEQ ID NO: 19562 - RNA, 20 nt, synthetic construct
  source 1..20: mol_type = other RNA
tgaatttgaatgttggtctg

SEQ ID NO: 19563 - RNA, 20 nt, synthetic construct
  source 1..20: mol_type = other RNA
ccaacctagcaagacagacc

SEQ ID NO: 19564 - RNA, 20 nt, synthetic construct
  source 1..20: mol_type = other RNA
ggatattatcaaggagagct

SEQ ID NO: 19565 - RNA, 20 nt, synthetic construct
  source 1..20: mol_type = other RNA
aacttggttctattctcccc

SEQ ID NO: 19566 - RNA, 20 nt, synthetic construct
  source 1..20: mol_type = other RNA
attctccccatcactttcag

SEQ ID NO: 19567 - RNA, 20 nt, synthetic construct
  source 1..20: mol_type = other RNA
ccccatcactttcaggtaca

SEQ ID NO: 19568 - RNA, 20 nt, synthetic construct
  source 1..20: mol_type = other RNA
ggtacatcaatcaaatgtag

SEQ ID NO: 19569 - RNA, 20 nt, synthetic construct
  source 1..20: mol_type = other RNA
catagtcccatatttcttgg

SEQ ID NO: 19570 - RNA, 20 nt, synthetic construct
  source 1..20: mol_type = other RNA
tggagcctttgtttattcct

SEQ ID NO: 19571 - RNA, 20 nt, synthetic construct
  source 1..20: mol_type = other RNA
ttttcattctttatcctcta

SEQ ID NO: 19572 - RNA, 20 nt, synthetic construct
  source 1..20: mol_type = other RNA
ttctttatcctctattcttg

SEQ ID NO: 19573 - RNA, 20 nt, synthetic construct
  source 1..20: mol_type = other RNA
ttatcctctattcttgtctt

SEQ ID NO: 19574 - RNA, 20 nt, synthetic construct
  source 1..20: mol_type = other RNA
tgtcttcttgctttatttca

SEQ ID NO: 19575 - RNA, 20 nt, synthetic construct
  source 1..20: mol_type = other RNA
tgctttatttcattaagttg

SEQ ID NO: 19576 - RNA, 20 nt, synthetic construct
  source 1..20: mol_type = other RNA
ttaagttgatcttcaatctc

SEQ ID NO: 19577 - RNA, 20 nt, synthetic construct
  source 1..20: mol_type = other RNA
atctctgatatcctttcttt

SEQ ID NO: 19578 - RNA, 20 nt, synthetic construct
  source 1..20: mol_type = other RNA
tttgcttgatcgatttggct

SEQ ID NO: 19579 - RNA, 20 nt, synthetic construct
  source 1..20: mol_type = other RNA
caaagttcttatgctgtgtt

SEQ ID NO: 19580 - RNA, 20 nt, synthetic construct
  source 1..20: mol_type = other RNA
tatgctgtgtttttcagtca

SEQ ID NO: 19581 - RNA, 20 nt, synthetic construct
  source 1..20: mol_type = other RNA
gtcagatcaggtcatttatg

SEQ ID NO: 19582 - RNA, 20 nt, synthetic construct
  source 1..20: mol_type = other RNA
tctctaaactggttattcta

SEQ ID NO: 19583 - RNA, 20 nt, synthetic construct
  source 1..20: mol_type = other RNA
ctaaactggttattctactt

SEQ ID NO: 19584 - RNA, 20 nt, synthetic construct
  source 1..20: mol_type = other RNA
acttagcaattcatgtaacc

SEQ ID NO: 19585 - RNA, 20 nt, synthetic construct
  source 1..20: mol_type = other RNA
tgtaaccttttttcaaggtt

SEQ ID NO: 19586 - RNA, 20 nt, synthetic construct
  source 1..20: mol_type = other RNA
aggttcttagcttctttgca

SEQ ID NO: 19587 - RNA, 20 nt, synthetic construct
  source 1..20: mol_type = other RNA
aacccaatgcaaagaagcta

SEQ ID NO: 19588 - RNA, 20 nt, synthetic construct
  source 1..20: mol_type = other RNA
tagcttctttgcattgggtt

SEQ ID NO: 19589 - RNA, 20 nt, synthetic construct
  source 1..20: mol_type = other RNA
ttgcattgggttagaacatg

SEQ ID NO: 19590 - RNA, 20 nt, synthetic construct
  source 1..20: mol_type = other RNA
tttttatcttttgtatatct

SEQ ID NO: 19591 - RNA, 20 nt, synthetic construct
  source 1..20: mol_type = other RNA
ctagtggtatgctttgattc

SEQ ID NO: 19592 - RNA, 20 nt, synthetic construct
  source 1..20: mol_type = other RNA
tatctttatttgtgattaag

SEQ ID NO: 19593 - RNA, 20 nt, synthetic construct
  source 1..20: mol_type = other RNA
actcttcgtatctttatttg

SEQ ID NO: 19594 - RNA, 20 nt, synthetic construct
  source 1..20: mol_type = other RNA
tttattccactcttcgtatc

SEQ ID NO: 19595 - RNA, 20 nt, synthetic construct
  source 1..20: mol_type = other RNA
ttcctttattccactcttcg

SEQ ID NO: 19596 - RNA, 20 nt, synthetic construct
  source 1..20: mol_type = other RNA
ggttgttttgtagacccttc

SEQ ID NO: 19597 - RNA, 20 nt, synthetic construct
  source 1..20: mol_type = other RNA
agataattatttataggtaa

SEQ ID NO: 19598 - RNA, 20 nt, synthetic construct
  source 1..20: mol_type = other RNA
attcaagataattatttata

SEQ ID NO: 19599 - RNA, 20 nt, synthetic construct
  source 1..20: mol_type = other RNA
aataaaaagacatacagtgg

SEQ ID NO: 19600 - RNA, 20 nt, synthetic construct
  source 1..20: mol_type = other RNA
cctgtaaggactcaaacaga

SEQ ID NO: 19601 - RNA, 20 nt, synthetic construct
  source 1..20: mol_type = other RNA
gtctgtttgagtccttacag

SEQ ID NO: 19602 - RNA, 20 nt, synthetic construct
  source 1..20: mol_type = other RNA
atccctttactttcagtctg

SEQ ID NO: 19603 - RNA, 20 nt, synthetic construct
  source 1..20: mol_type = other RNA
atttgcatagaatatttttt

SEQ ID NO: 19604 - RNA, 20 nt, synthetic construct
  source 1..20: mol_type = other RNA
tgtttccatttgcatagaat

SEQ ID NO: 19605 - RNA, 20 nt, synthetic construct
  source 1..20: mol_type = other RNA
atgcaaatggaaacaagaag

SEQ ID NO: 19606 - RNA, 20 nt, synthetic construct
  source 1..20: mol_type = other RNA
gatgtttggattagtgatac

SEQ ID NO: 19607 - RNA, 20 nt, synthetic construct
  source 1..20: mol_type = other RNA
gatttcagatgtttggatta

SEQ ID NO: 19608 - RNA, 20 nt, synthetic construct
  source 1..20: mol_type = other RNA
tttgaacatcatgttggcac

SEQ ID NO: 19609 - RNA, 20 nt, synthetic construct
  source 1..20: mol_type = other RNA
aaggaaatgttcttcggagc

SEQ ID NO: 19610 - RNA, 20 nt, synthetic construct
  source 1..20: mol_type = other RNA
tcggagcattttggattttt

SEQ ID NO: 19611 - RNA, 20 nt, synthetic construct
  source 1..20: mol_type = other RNA
gagcattttggatttttgtg

SEQ ID NO: 19612 - RNA, 20 nt, synthetic construct
  source 1..20: mol_type = other RNA
ttatagcagtgtgagaatgg

SEQ ID NO: 19613 - RNA, 20 nt, synthetic construct
  source 1..20: mol_type = other RNA
cacactgctataaagaatac

SEQ ID NO: 19614 - RNA, 20 nt, synthetic construct
  source 1..20: mol_type = other RNA
tttataattactcagtctct

SEQ ID NO: 19615 - RNA, 20 nt, synthetic construct
  source 1..20: mol_type = other RNA
tgttaagcctgtggaactct

SEQ ID NO: 19616 - RNA, 20 nt, synthetic construct
  source 1..20: mol_type = other RNA
acaggcttaacaggaagcat

SEQ ID NO: 19617 - RNA, 20 nt, synthetic construct
  source 1..20: mol_type = other RNA
tgtggcctccttagccatgc

SEQ ID NO: 19618 - RNA, 20 nt, synthetic construct
  source 1..20: mol_type = other RNA
gccatgattataagtttcct

SEQ ID NO: 19619 - RNA, 20 nt, synthetic construct
  source 1..20: mol_type = other RNA
tcttccgccatgattataag

SEQ ID NO: 19620 - RNA, 20 nt, synthetic construct
  source 1..20: mol_type = other RNA
ccttcatcttccgccatgat

SEQ ID NO: 19621 - RNA, 20 nt, synthetic construct
  source 1..20: mol_type = other RNA
tcacaaggtggcaggacgga

SEQ ID NO: 19622 - RNA, 20 nt, synthetic construct
  source 1..20: mol_type = other RNA
caaggtggcaggacggagtg

SEQ ID NO: 19623 - RNA, 20 nt, synthetic construct
  source 1..20: mol_type = other RNA
cacactcacactccgtcctg

SEQ ID NO: 19624 - RNA, 20 nt, synthetic construct
  source 1..20: mol_type = other RNA
tccttcacacactcacactc

SEQ ID NO: 19625 - RNA, 20 nt, synthetic construct
  source 1..20: mol_type = other RNA
cacaagatctgatggtttta

SEQ ID NO: 19626 - RNA, 20 nt, synthetic construct
  source 1..20: mol_type = other RNA
tgtgagagtgagtgagttcc

SEQ ID NO: 19627 - RNA, 20 nt, synthetic construct
  source 1..20: mol_type = other RNA
ctatgctgttcttgtgagag

SEQ ID NO: 19628 - RNA, 20 nt, synthetic construct
  source 1..20: mol_type = other RNA
cgatgagatttgggtgggac

SEQ ID NO: 19629 - RNA, 20 nt, synthetic construct
  source 1..20: mol_type = other RNA
aaattcaaaacatttctggt

SEQ ID NO: 19630 - RNA, 20 nt, synthetic construct
  source 1..20: mol_type = other RNA
aaacatttctggtttcaggc

SEQ ID NO: 19631 - RNA, 20 nt, synthetic construct
  source 1..20: mol_type = other RNA
ggtttcaggcattttggata

SEQ ID NO: 19632 - RNA, 20 nt, synthetic construct
  source 1..20: mol_type = other RNA
cttatccaaaatgcctgaaa

SEQ ID NO: 19633 - RNA, 20 nt, synthetic construct
  source 1..20: mol_type = other RNA
ggcattttggataagggaaa

SEQ ID NO: 19634 - RNA, 20 nt, synthetic construct
  source 1..20: mol_type = other RNA
tctctttttacagtttttga

SEQ ID NO: 19635 - RNA, 20 nt, synthetic construct
  source 1..20: mol_type = other RNA
tcgtctctttttacagtttt

SEQ ID NO: 19636 - RNA, 20 nt, synthetic construct
  source 1..20: mol_type = other RNA
tcttcgtctctttttacagt

SEQ ID NO: 19637 - RNA, 20 nt, synthetic construct
  source 1..20: mol_type = other RNA
ttacaaatatatagcaatta

SEQ ID NO: 19638 - RNA, 20 nt, synthetic construct
  source 1..20: mol_type = other RNA
agtgtgctactatgattata

SEQ ID NO: 19639 - RNA, 20 nt, synthetic construct
  source 1..20: mol_type = other RNA
ctaatggacagatcatccag

SEQ ID NO: 19640 - RNA, 20 nt, synthetic construct
  source 1..20: mol_type = other RNA
ctgtctggatgatctgtcca

SEQ ID NO: 19641 - RNA, 20 nt, synthetic construct
  source 1..20: mol_type = other RNA
atattgattctctgtctgga

SEQ ID NO: 19642 - RNA, 20 nt, synthetic construct
  source 1..20: mol_type = other RNA
gttaggtctacttggctaaa

SEQ ID NO: 19643 - RNA, 20 nt, synthetic construct
  source 1..20: mol_type = other RNA
atatatttctgttaggtcta

SEQ ID NO: 19644 - RNA, 20 nt, synthetic construct
  source 1..20: mol_type = other RNA
actgctgttggatggaatgt

SEQ ID NO: 19645 - RNA, 20 nt, synthetic construct
  source 1..20: mol_type = other RNA
atccaacagcagtagaatac

SEQ ID NO: 19646 - RNA, 20 nt, synthetic construct
  source 1..20: mol_type = other RNA
ctgtgcacttgagaataatg

SEQ ID NO: 19647 - RNA, 20 nt, synthetic construct
  source 1..20: mol_type = other RNA
caagtgcacagggaatattc

SEQ ID NO: 19648 - RNA, 20 nt, synthetic construct
  source 1..20: mol_type = other RNA
ggagaatattccctgtgcac

SEQ ID NO: 19649 - RNA, 20 nt, synthetic construct
  source 1..20: mol_type = other RNA
ccagaatagatcatatgtta

SEQ ID NO: 19650 - RNA, 20 nt, synthetic construct
  source 1..20: mol_type = other RNA
tacattttttgactagtttt

SEQ ID NO: 19651 - RNA, 20 nt, synthetic construct
  source 1..20: mol_type = other RNA
atcttcttacattttttgac

SEQ ID NO: 19652 - RNA, 20 nt, synthetic construct
  source 1..20: mol_type = other RNA
tacgattatgatctaaaaaa

SEQ ID NO: 19653 - RNA, 20 nt, synthetic construct
  source 1..20: mol_type = other RNA
agtttcatacgattatgatc

SEQ ID NO: 19654 - RNA, 20 nt, synthetic construct
  source 1..20: mol_type = other RNA
cccattattgatttctagtt

SEQ ID NO: 19655 - RNA, 20 nt, synthetic construct
  source 1..20: mol_type = other RNA
aatattcccccattattgat

SEQ ID NO: 19656 - RNA, 20 nt, synthetic construct
  source 1..20: mol_type = other RNA
atctatttgtggattttcca

SEQ ID NO: 19657 - RNA, 20 nt, synthetic construct
  source 1..20: mol_type = other RNA
ggagcatattgattaatttc

SEQ ID NO: 19658 - RNA, 20 nt, synthetic construct
  source 1..20: mol_type = other RNA
actcattgattgttcaggag

SEQ ID NO: 19659 - RNA, 20 nt, synthetic construct
  source 1..20: mol_type = other RNA
tcgactcattgattgttcag

SEQ ID NO: 19660 - RNA, 20 nt, synthetic construct
  source 1..20: mol_type = other RNA
tcttttaatatcttcttcga

SEQ ID NO: 19661 - RNA, 20 nt, synthetic construct
  source 1..20: mol_type = other RNA
tgtccctgcaaaggacatga

SEQ ID NO: 19662 - RNA, 20 nt, synthetic construct
  source 1..20: mol_type = other RNA
tgtcctttgcagggacatga

SEQ ID NO: 19663 - RNA, 20 nt, synthetic construct
  source 1..20: mol_type = other RNA
ttcatgtccctgcaaaggac

SEQ ID NO: 19664 - RNA, 20 nt, synthetic construct
  source 1..20: mol_type = other RNA
agcttcattcatgtccctgc

SEQ ID NO: 19665 - RNA, 20 nt, synthetic construct
  source 1..20: mol_type = other RNA
gtccttatgatagtttgctg

SEQ ID NO: 19666 - RNA, 20 nt, synthetic construct
  source 1..20: mol_type = other RNA
cagcaaactatcataaggac

SEQ ID NO: 19667 - RNA, 20 nt, synthetic construct
  source 1..20: mol_type = other RNA
tacctatgagtgagaacatg

SEQ ID NO: 19668 - RNA, 20 nt, synthetic construct
  source 1..20: mol_type = other RNA
attcctacctatgagtgaga

SEQ ID NO: 19669 - RNA, 20 nt, synthetic construct
  source 1..20: mol_type = other RNA
cactcataggtaggaattga

SEQ ID NO: 19670 - RNA, 20 nt, synthetic construct
  source 1..20: mol_type = other RNA
cattgttcaattcctaccta

SEQ ID NO: 19671 - RNA, 20 nt, synthetic construct
  source 1..20: mol_type = other RNA
ccgccctgtggccaagtgtt

SEQ ID NO: 19672 - RNA, 20 nt, synthetic construct
  source 1..20: mol_type = other RNA
caccccctgacaagccctgg

SEQ ID NO: 19673 - RNA, 20 nt, synthetic construct
  source 1..20: mol_type = other RNA
ccagcttcccaccccctgac

SEQ ID NO: 19674 - RNA, 20 nt, synthetic construct
  source 1..20: mol_type = other RNA
cctaatgctatcccttcacc

SEQ ID NO: 19675 - RNA, 20 nt, synthetic construct
  source 1..20: mol_type = other RNA
ggggtacatgtgcacaacgt

SEQ ID NO: 19676 - RNA, 20 nt, synthetic construct
  source 1..20: mol_type = other RNA
ttttttattattatacttta

SEQ ID NO: 19677 - RNA, 20 nt, synthetic construct
  source 1..20: mol_type = other RNA
cattttgtctgattggcata

SEQ ID NO: 19678 - RNA, 20 nt, synthetic construct
  source 1..20: mol_type = other RNA
gtagggcttttcacattttg

SEQ ID NO: 19679 - RNA, 20 nt, synthetic construct
  source 1..20: mol_type = other RNA
tggtgatacttaatttcagt

SEQ ID NO: 19680 - RNA, 20 nt, synthetic construct
  source 1..20: mol_type = other RNA
ggataattttttcaagtttt

SEQ ID NO: 19681 - RNA, 20 nt, synthetic construct
  source 1..20: mol_type = other RNA
agttttaacaatgtagcttt

SEQ ID NO: 19682 - RNA, 20 nt, synthetic construct
  source 1..20: mol_type = other RNA
ccaattaaagctacattgtt

SEQ ID NO: 19683 - RNA, 20 nt, synthetic construct
  source 1..20: mol_type = other RNA
aaatgatagctttctccaat

SEQ ID NO: 19684 - RNA, 20 nt, synthetic construct
  source 1..20: mol_type = other RNA
aaatcatatttattatgttt

SEQ ID NO: 19685 - RNA, 20 nt, synthetic construct
  source 1..20: mol_type = other RNA
attcaaaatcatatttatta

SEQ ID NO: 19686 - RNA, 20 nt, synthetic construct
  source 1..20: mol_type = other RNA
tttgtcttgagttgtttttg

SEQ ID NO: 19687 - RNA, 20 nt, synthetic construct
  source 1..20: mol_type = other RNA
ctcttaaaaccacttttgct

SEQ ID NO: 19688 - RNA, 20 nt, synthetic construct
  source 1..20: mol_type = other RNA
tttttaatggaagtgtttat

SEQ ID NO: 19689 - RNA, 20 nt, synthetic construct
  source 1..20: mol_type = other RNA
attaaaaaagaagatctcaa

SEQ ID NO: 19690 - RNA, 20 nt, synthetic construct
  source 1..20: mol_type = other RNA
ttgtctagtttgttgaggtg

SEQ ID NO: 19691 - RNA, 20 nt, synthetic construct
  source 1..20: mol_type = other RNA
actaacttttgggttagtta

SEQ ID NO: 19692 - RNA, 20 nt, synthetic construct
  source 1..20: mol_type = other RNA
ttctactaacttttgggtta

SEQ ID NO: 19693 - RNA, 20 nt, synthetic construct
  source 1..20: mol_type = other RNA
ttccttctactaacttttgg

SEQ ID NO: 19694 - RNA, 20 nt, synthetic construct
  source 1..20: mol_type = other RNA
gatgtgatctttattatttc

SEQ ID NO: 19695 - RNA, 20 nt, synthetic construct
  source 1..20: mol_type = other RNA
ttttggtatcagttttttag

SEQ ID NO: 19696 - RNA, 20 nt, synthetic construct
  source 1..20: mol_type = other RNA
ataaaataacaaaattgacc

SEQ ID NO: 19697 - RNA, 20 nt, synthetic construct
  source 1..20: mol_type = other RNA
taatctagctaaaagttggt

SEQ ID NO: 19698 - RNA, 20 nt, synthetic construct
  source 1..20: mol_type = other RNA
ctgtttttcttaatctagct

SEQ ID NO: 19699 - RNA, 2931 nt, synthetic construct
  source 1..2931: mol_type = other RNA
caggagatcaagcggattaataaaattcggagaagactggtgaaggattctaacacaaagaaggctggcaagacaggccctatgaagacactgctggtgagagtgatgacacccgacctgagagaaagactggaaaacctgagaaagaagcctgagaatatcccccagcccatcagcaacacaagccgggccaacctgaataagctgctgaccgactacaccgaaatgaagaaggccatcctgcacgtgtattgggaagagttccagaaagacccagtcggcctgatgagcagagtggctcagcctgccagcaagaagatcgatcagaacaagctgaagcccgaaatggacgagaaggggaacctgacaaccgccggctttgcctgtagccagtgcggccagcccctgtttgtgtacaaactggaacaggtgagcgaaaagggcaaggcttacacgaattacttcggcagatgcaacgtggccgagcacgagaagctgatcctgctggcccagctgaagcctgagaaggatagcgatgaggcagtgacatattccctgggcaagttcggacagcgggccctggatttttattccattcatgtgaccaaggaatccacccaccccgtcaagcctcttgcccaaattgccggcaacagatacgccagcggccccgtgggcaaggccctgagcgacgcctgtatgggcaccatcgccagcttcctgtctaagtaccaggacattatcatcgagcaccagaaggtggtgaagggcaaccagaagagactggagagcctgcgcgagctggccggcaaggaaaacctggagtatcctagcgtgaccctgcctcctcagcctcatacaaaggagggcgtggatgcctacaacgaagtgatcgcccgggtgcggatgtgggtgaacctgaatctgtggcagaagctgaagctgtctagagacgacgccaagcccctgctgagactgaagggcttccccagcttccctctggtggagagacaggcaaatgaagtggactggtgggacatggtgtgtaacgtgaagaagctgatcaatgagaagaaggaggacggcaaagtgttctggcagaatctggccggctacaagcgtcaggaggccctgcggccctacctgagcagcgaggaagacagaaagaagggcaagaagttcgcccggtatcagctgggggacctgctgctgcacctcgagaagaagcacggcgaagactgggggaaggtgtacgatgaggcctgggagcggatcgataagaaggtggagggcctgagcaagcacatcaagctggaggaggaacggagatctgaggacgcccagagcaaggccgccctgaccgactggctgagagccaaggccagcttcgtcatcgaggggctgaaggaggccgacaaggacgagttctgccggtgcgaactgaagctgcagaagtggtacggagatctgagaggcaaacctttcgccatcgaggccgagaacagcatcctggacatcagcggcttcagcaagcagtacaactgcgcctttatttggcagaaggacggagtgaagaagctgaacctgtacctgatcatcaactatttcaagggcggcaagctgagattcaagaagatcaagcctgaagccttcgaggccaacagattctacaccgtgattaacaagaaaagcggagagatcgtgccaatggaagtgaacttcaacttcgacgaccctaacctgatcatcctgcccctggcatttggcaagcggcagggcagagagttcatctggaacgacctgctgtctctggagaccggcagcctgaagctggccaacggcagagtgatcgagaagacactgtacaacagacgaaccagacaagacgagcccgccctgtttgtggccctgaccttcgagagaagagaggtgctggacagcagcaatatcaagcctatgaacctgatcggcgtggaccggggcgagaacatccctgccgtgatcgcccttaccgaccccgagggatgccctctgagccggtttaaagacagcctgggcaaccctacccacatcctgagaattggcgagtcctacaaggagaagcagagaaccatccaggccaagaaggaggtggagcagcggcgggctggcggctactcccggaagtacgccagcaaggccaagaacctggccgacgacatggttagaaataccgccagagacctcctgtactacgctgtgacccaggacgccatgctgatcttcgagaacctgagcagaggcttcggcagacagggcaagagaaccttcatggccgagagacagtacacccggatggaggactggctgaccgccaagctggcctacgagggcctgtctaagacctacctgtccaagaccttggcacagtacaccagcaagacatgctctaactgcggcttcacaatcacgagcgccgactacgaccgggtgctggagaaactgaagaagaccgccacaggctggatgaccaccattaacggcaaggagctgaaggtggagggccagatcacctactacaacaggtacaaacggcagaacgtggtgaaggacctgagcgtggaactggatagactgagcgaggaaagcgtaaacaatgacatcagcagctggaccaagggccggagcggcgaggccctgagcctgctgaagaagagattctcccacagaccagtgcaggagaagttcgtgtgtctgaactgcggcttcgagacccacgccgacgagcaagccgccctgaacatcgcccggtcttggcttttcctgcggagccaggagtacaagaagtaccagacaaacaagaccacaggcaacacagacaagagagccttcgtcgagacctggcagagcttctacagaaagaagctgaaggaggtgtggaagcctgccgtg

SEQ ID NO: 19700 - RNA, 2934 nt, synthetic construct
  source 1..2934: mol_type = other RNA
caggagatcaagcggattaataaaattcggagaagactggtgaaggattctaacacaaagaaggctggcaagacaggccctatgaagacactgctggtgagagtgatgacacccgacctgagagaaagactggaaaacctgagaaagaagcctgagaatatcccccagcccatcagcaacacaagccgggccaacctgaataagctgctgaccgactacaccgaaatgaagaaggccatcctgcacgtgtattgggaagagttccagaaagacccagtcggcctgatgagcagagtggctcagcctgccagcaagaagatcgatcagaacaagctgaagcccgaaatggacgagaaggggaacctgacaaccgccggctttgcctgtagccagtgcggccagcccctgtttgtgtacaaactggaacaggtgagcgaaaagggcaaggcttacacgaattacttcggcagatgcaacgtggccgagcacgagaagctgatcctgctggcccagctgaagcctgagaaggatagcgatgaggcagtgacatattccctgggcaagttcggacagcgggccctggatttttattccattcatgtgaccaaggaatccacccaccccgtcaagcctcttgcccaaattgccggcaacagatacgccagcggccccgtgggcaaggccctgagcgacgcctgtatgggcaccatcgccagcttcctgtctaagtaccaggacattatcatcgagcaccagaaggtggtgaagggcaaccagaagagactggagagcctgcgcgagctggccggcaaggaaaacctggagtatcctagcgtgaccctgcctcctcagcctcatacaaaggagggcgtggatgcctacaacgaagtgatcgcccgggtgcggatgtgggtgaacctgaatctgtggcagaagctgaagctgtctagagacgacgccaagcccctgctgagactgaagggcttccccagcttccctctggtggagagacaggcaaatgaagtggactggtgggacatggtgtgtaacgtgaagaagctgatcaatgagaagaaggaggacggcaaagtgttctggcagaatctggccggctacaagcgtcaggaggccctgcggccctacctgagcagcgaggaagacagaaagaagggcaagaagttcgcccggtatcagctgggggacctgctgctgcacctcgagaagaagcacggcgaagactgggggaaggtgtacgatgaggcctgggagcggatcgataagaaggtggagggcctgagcaagcacatcaagctggaggaggaacggagatctgaggacgcccagagcaaggccgccctgaccgactggctgagagccaaggccagcttcgtcatcgaggggctgaaggaggccgacaaggacgagttctgccggtgcgaactgaagctgcagaagtggtacggagatctgagaggcaaacctttcgccatcgaggccgagaacagcatcctggacatcagcggcttcagcaagcagtacaactgcgcctttatttggcagaaggacggagtgaagaagctgaacctgtacctgatcatcaactatttcaagggcggcaagctgagattcaagaagatcaagcctgaagccttcgaggccaacagattctacaccgtgattaacaagaaaagcggagagatcgtgccaatggaagtgaacttcaacttcgacgaccctaacctgatcatcctgcccctggcatttggcaagcggcagggcagagagttcatctggaacgacctgctgtctctggagaccggcagcctgaagctggccaacggcagagtgatcgagaagacactgtacaacagacgaaccagacaagacgagcccgccctgtttgtggccctgaccttcgagagaagagaggtgctggacagcagcaatatcaagcctatgaacctgatcggcgtggaccggggcgagaacatccctgccgtgatcgcccttaccgaccccgagggatgccctctgagccggtttaaagacagcctgggcaaccctacccacatcctgagaattggcgagtcctacaaggagaagcagagaaccatccaggccaagaaggaggtggagcagcggcgggctggcggctactcccggaagtacgccagcaaggccaagaacctggccgacgacatggttagaaataccgccagagacctcctgtactacgctgtgacccaggacgccatgctgatcttcgagaacctgagcagaggcttcggcagacagggcaagagaaccttcatggccgagagacagtacacccggatggaggactggctgaccgccaagctggcctacgagggcctgccctctaagacctacctgtccaagaccttggcacagtacaccagcaagacatgctctaactgcggcttcacaatcacgagcgccgactacgaccgggtgctggagaaactgaagaagaccgccacaggctggatgaccaccattaacggcaaggagctgaaggtggagggccagatcacctactacaacaggtacaaacggcagaacgtggtgaaggacctgagcgtggaactggatagactgagcgaggaaagcgtaaacaatgacatcagcagctggaccaagggccggagcggcgaggccctgagcctgctgaagaagagattctcccacagaccagtgcaggagaagttcgtgtgtctgaactgcggcttcgagacccacgccgacgagcaagccgccctgaacatcgcccggtcttggcttttcctgcggagccaggagtacaagaagtaccagacaaacaagaccacaggcaacacagacaagagagccttcgtcgagacctggcagagcttctacagaaagaagctgaaggaggtgtggaagcctgccgtg

SEQ ID NO: 19701 - RNA, 2937 nt, synthetic construct
  source 1..2937: mol_type = other RNA
caggagatcaagcggattaataaaattcggagaagactggtgaaggattctaacacaaagaaggctggcaagacacggggccctatgaagacactgctggtgagagtgatgacacccgacctgagagaaagactggaaaacctgagaaagaagcctgagaatatcccccagcccatcagcaacacaagccgggccaacctgaataagctgctgaccgactacaccgaaatgaagaaggccatcctgcacgtgtattgggaagagttccagaaagacccagtcggcctgatgagcagagtggctcagcctgccagcaagaagatcgatcagaacaagctgaagcccgaaatggacgagaaggggaacctgacaaccgccggctttgcctgtagccagtgcggccagcccctgtttgtgtacaaactggaacaggtgagcgaaaagggcaaggcttacacgaattacttcggcagatgcaacgtggccgagcacgagaagctgatcaagctggcccagctgaagcctgagaaggatagcgatgaggcagtgacatattccctgggcaagttcggacagcgggccctggatttttattccattcatgtgaccaaggaatccacccaccccgtcaagcctcttgcccaaattgccggcaacagatacgcctccagccccgtgggcaaggccctgagcgacgcctgtatgggcaccatcgccagcttcctgtctaagtaccaggacattatcatcgagcaccagaaggtggtgaagggcaaccagaagagactggagagcctgcgcgagctggccggcaaggaaaacctggagtatcctagcgtgaccctgcctcctcagcctcatacaaaggagggcgtggatgcctacaacgaagtgatcgcccgggtgcggatgtgggtgaacctgaatctgtggcagaagctgaagctgtctagagacgacgccaagcccctgctgagactgaagggcttccccagcttccctctggtggagagacaggcaaatgaagtggactggtgggacatggtgtgtaacgtgaagaagctgatcaatgagaagaaggaggacggcaaagtgttctggcagaatctggccggctacaagcgtcaggaggccctgcggccctacctgagcagcgaggaagacagaaagaagggcaagaagttcgcccggtatcagctgggggacctgctgctgcacctcgagaagaagcacggcgaagactgggggaaggtgtacgatgaggcctgggagcggatcgataagaaggtggagggcctgagcaagcacatcaagctggaggaggaacggagatctgaggacgcccagagcaaggccgccctgaccgactggctgagagccaaggccagcttcgtcatcgaggggctgaaggaggccgacaaggacgagttctgccggtgcgaactgaagctgcagaagtggtacggagatctgagaggcaaacctttcgccatcgaggccgagaacagcatcctggacatcagcggcttcagcaagcagtacaactgcgcctttatttggcagaaggacggagtgaagaagctgaacctgtacctgatcatcaactatttcaagggcggcaagctgagattcaagaagatcaagcctgaagccttcgaggccaacagattctacaccgtgattaacaagaaaagcggagagatcgtgccaatggaagtgaacttcaacttcgacgaccctaacctgatcatcctgcccctggcatttggcaagcggcagggcagagagttcatctggaacgacctgctgtctctggagaccggcagcctgaagctggccaacggcagagtgatcgagaagacactgtacaacagacgaaccagacaagacgagcccgccctgtttgtggccctgaccttcgagagaagagaggtgctggacagcagcaatatcaagcctatgaacctgatcggcgtggaccggggcgagaacatccctgccgtgatcgcccttaccgaccccgagggatgccctctgagccggtttaaagacagcctgggcaaccctacccacatcctgagaattggcgagtcctacaaggagaagcagagaaccatccaggccaagaaggaggtggagcagcggcgggctggcggctactcccggaagtacgccagcaaggccaagaacctggccgacgacatggttagaaataccgccagagacctcctgtactacgctgtgacccaggacgccatgctgatcttcgagaacctgagcagaggcttcggcagacagggcaagagaaccttcatggccgagagacagtacacccggatggaggactggctgaccgccaagctggcctacgagggcctgccctctaagacctacctgtccaagaccttggcacagtacaccagcaagacatgctctaactgcggcttcacaatcacgagcgccgactacgaccgggtgctggagaaactgaagaagaccgccacaggctggatgaccaccattaacggcaaggagctgaaggtggagggccagatcacctactacaacaggtacaaacggcagaacgtggtgaaggacctgagcgtggaactggatagactgagcgaggaaagcgtaaacaatgacatcagcagctggaccaagggccggagcggcgaggccctgagcctgctgaagaagagattctcccacagaccagtgcaggagaagttcgtgtgtctgaactgcggcttcgagacccacgccgacgagcaagccgccctgaacatcgcccggtcttggcttttcctgcggagccaggagtacaagaagtaccagacaaacaagaccacaggcaacacagacaagagagccttcgtcgagacctggcagagcttctacagaaagaagctgaaggaggtgtggaagcctgccgtg

SEQ ID NO: 19702 - RNA, 2934 nt, synthetic construct
  source 1..2934: mol_type = other RNA
caggagatcaagcggattaataaaattcggagaagactggtgaaggattctaacacaaagaaggctggcaagacaggccctatgaagacactgctggtgagagtgatgacacccgacctgagagaaagactggaaaacctgagaaagaagcctgagaatatcccccagcccatcagcaacacaagccgggccaacctgaataagctgctgaccgactacaccgaaatgaagaaggccatcctgcacgtgtattgggaagagttccagaaagacccagtcggcctgatgagcagagtggctcagcctgccagcaagaagatcgatcagaacaagctgaagcccgaaatggacgagaaggggaacctgacaaccgccggctttgcctgtagccagtgcggccagcccctgtttgtgtacaaactggaacaggtgagcgaaaagggcaaggcttacacgaattacttcggcagatgcaacgtggccgagcacgagaagctgatcctgctggcccagctgaagcctgagaaggatagcgatgaggcagtgacatattccctgggcaagttcggacagcgggccctggatttttattccattcatgtgaccaaggaatccacccaccccgtcaagcctcttgcccaaattgccggcaacagatacgccagcggccccgtgggcaaggccctgagcgacgcctgtatgggcaccatcgccagcttcctgtctaagtaccaggacattatcatcgagcaccagaaggtggtgaagggcaaccagaagagactggagagcctgcgcgagctggccggcaaggaaaacctggagtatcctagcgtgaccctgcctcctcagcctcatacaaaggagggcgtggatgcctacaacgaagtgatcgcccgggtgcggatgtgggtgaacctgaatctgtggcagaagctgaagctgtctagagacgacgccaagcccctgctgagactgaagaagttccccagcttccctctggtggagagacaggcaaatgaagtggactggtgggacatggtgtgtaacgtgaagaagctgatcaatgagaagaaggaggacggcaaagtgttctggcagaatctggccggctacaagcgtcaggaggccctgcggccctacctgagcagcgaggaagacagaaagaagggcaagaagttcgcccggtatcagctgggggacctgctgctgcacctcgagaagaagcacggcgaagactgggggaaggtgtacgatgaggcctgggagcggatcgataagaaggtggagggcctgagcaagcacatcaagctggaggaggaacggagatctgaggacgcccagagcaaggccgccctgaccgactggctgagagccaaggccagcttcgtcatcgaggggctgaaggaggccgacaaggacgagttctgccggtgcgaactgaagctgcagaagtggtacggagatctgagaggcaaacctttcgccatcgaggccgagaacagcatcctggacatcagcggcttcagcaagcagtacaactgcgcctttatttggcagaaggacggagtgaagaagctgaacctgtacctgatcatcaactatttcaagggcggcaagctgagattcaagaagatcaagcctgaagccttcgaggccaacagattctacaccgtgattaacaagaaaagcggagagatcgtgccaatggaagtgaacttcaacttcgacgaccctaacctgatcatcctgcccctggcatttggcaagcggcagggcagagagttcatctggaacgacctgctgtctctggagaccggcagcctgaagctggccaacggcagagtgatcgagaagacactgtacaacagacgaaccagacaagacgagcccgccctgtttgtggccctgaccttcgagagaagagaggtgctggacagcagcaatatcaagcctatgaacctgatcggcgtggaccggggcgagaacatccctgccgtgatcgcccttaccgaccccgagggatgccctctgagccggtttaaagacagcctgggcaaccctacccacatcctgagaattggcgagtcctacaaggagaagcagagaaccatccaggccaagaaggaggtggagcagcggcgggctggcggctactcccggaagtacgccagcaaggccaagaacctggccgacgacatggttagaaataccgccagagacctcctgtactacgctgtgacccaggacgccatgctgatcttcgagaacctgagcagaggcttcggcagacagggcaagagaaccttcatggccgagagacagtacacccggatggaggactggctgaccgccaagctggcctacgagggcctgccctctaagacctacctgtccaagaccttggcacagtacaccagcaagacatgctctaactgcggcttcacaatcacgagcgccgactacgaccgggtgctggagaaactgaagaagaccgccacaggctggatgaccaccattaacggcaaggagctgaaggtggagggccagatcacctactacaacaggtacaaacggcagaacgtggtgaaggacctgagcgtggaactggatagactgagcgaggaaagcgtaaacaatgacatcagcagctggaccaagggccggagcggcgaggccctgagcctgctgaagaagagattctcccacagaccagtgcaggagaagttcgtgtgtctgaactgcggcttcgagacccacgccgacgagcaagccgccctgaacatcgcccggtcttggcttttcctgcggagccaggagtacaagaagtaccagacaaacaagaccacaggcaacacagacaagagagccttcgtcgagacctggcagagcttctacagaaagaagctgaaggaggtgtggaagcctgccgtg

SEQ ID NO: 19703 - RNA, 109 nt, synthetic construct
  source 1..109: mol_type = other RNA
actggcgcttttatctgattactttgagagccatcaccagcgactatgtcgtagtgggtaaagctccctcttcggagggagcatcaaagnnnnnnnnnnnnnnnnnnnn

SEQ ID NO: 19704 - RNA, 109 nt, synthetic construct; identical to SEQ ID NO: 19703
  modified_base 1..4: mod_base = OTHER; note = linked via phosphorothioate bond
  modified_base 1: mod_base = OTHER; note = 2'-O-methyladenosine
  modified_base 2: mod_base = cm
  modified_base 3: mod_base = um
  modified_base 107..109: mod_base = OTHER; note = linked via phosphorothioate bond
  modified_base 107: mod_base = OTHER; note = any 2'-O-methyl ribonucelotide
  modified_base 108: mod_base = OTHER; note = any 2'-O-methyl ribonucelotide
  modified_base 109: mod_base = OTHER; note = any 2'-O-methyl ribonucelotide
  source 1..109: mol_type = other RNA

SEQ ID NO: 19705 - RNA, 112 nt, synthetic construct
  modified_base 1..4: mod_base = OTHER; note = linked via phosphorothioate bond
  modified_base 1: mod_base = OTHER; note = 2'-O-methyladenosine
  modified_base 2: mod_base = cm
  modified_base 3: mod_base = um
  modified_base 109..112: mod_base = OTHER; note = linked via phosphorothioate bond
  modified_base 110: mod_base = um
  modified_base 111: mod_base = um
  modified_base 112: mod_base = um
  source 1..112: mol_type = other RNA
actggcgcttttatctgattactttgagagccatcaccagcgactatgtcgtagtgggtaaagctccctcttcggagggagcatcaaagnnnnnnnnnnnnnnnnnnnnttt

SEQ ID NO: 19706 - RNA, 109 nt, synthetic construct; identical to SEQ ID NO: 19703
  modified_base 1..4: mod_base = OTHER; note = linked via phosphorothioate bond
  modified_base 1: mod_base = OTHER; note = 2'-O-methyladenosine
  modified_base 2: mod_base = cm
  modified_base 3: mod_base = um
  modified_base 4: mod_base = gm
  modified_base 5: mod_base = gm
  modified_base 6: mod_base = cm
  modified_base 7: mod_base = gm
  modified_base 8: mod_base = cm
  modified_base 9: mod_base = um
  modified_base 10: mod_base = um
  modified_base 11: mod_base = um
  modified_base 12: mod_base = um
  modified_base 13: mod_base = OTHER; note = 2'-O-methyladenosine
  modified_base 14: mod_base = um
  modified_base 15: mod_base = cm
  modified_base 16: mod_base = um
  modified_base 17: mod_base = gm
  modified_base 18: mod_base = OTHER; note = 2'-O-methyladenosine
  modified_base 19: mod_base = um
  modified_base 27: mod_base = OTHER; note = 2'-O-methyladenosine
  modified_base 28: mod_base = gm
  modified_base 29: mod_base = OTHER; note = 2'-O-methyladenosine
  modified_base 30: mod_base = gm
  modified_base 31: mod_base = cm
  modified_base 32: mod_base = cm
  modified_base 33: mod_base = OTHER; note = 2'-O-methyladenosine
  modified_base 34: mod_base = um
  modified_base 35: mod_base = cm
  modified_base 36: mod_base = OTHER; note = 2'-O-methyladenosine
  modified_base 37: mod_base = cm
  modified_base 38: mod_base = cm
  modified_base 44: mod_base = cm
  modified_base 45: mod_base = um
  modified_base 48: mod_base = gm
  modified_base 49: mod_base = um
  modified_base 50: mod_base = cm
  modified_base 51: mod_base = gm
  modified_base 57: mod_base = gm
  modified_base 58: mod_base = gm
  modified_base 59: mod_base = um
  modified_base 60: mod_base = OTHER; note = 2'-O-methyladenosine
  modified_base 61: mod_base = OTHER; note = 2'-O-methyladenosine
  modified_base 62: mod_base = OTHER; note = 2'-O-methyladenosine
  modified_base 63: mod_base = gm
  modified_base 64: mod_base = cm
  modified_base 65: mod_base = um
  modified_base 66: mod_base = cm
  modified_base 67: mod_base = cm
  modified_base 68: mod_base = cm
  modified_base 69: mod_base = um
  modified_base 70: mod_base = cm
  modified_base 71: mod_base = um
  modified_base 72: mod_base = um
  modified_base 73: mod_base = cm
  modified_base 74: mod_base = gm
  modified_base 75: mod_base = gm
  modified_base 76: mod_base = OTHER; note = 2'-O-methyladenosine
  modified_base 77: mod_base = gm
  modified_base 78: mod_base = gm
  modified_base 79: mod_base = gm
  modified_base 80: mod_base = OTHER; note = 2'-O-methyladenosine
  modified_base 81: mod_base = gm
  modified_base 82: mod_base = cm
  modified_base 83: mod_base = OTHER; note = 2'-O-methyladenosine
  modified_base 84: mod_base = um
  modified_base 85: mod_base = cm
  modified_base 86: mod_base = OTHER; note = 2'-O-methyladenosine
  modified_base 107: mod_base = OTHER; note = any 2'-O-methyl ribonucelotide
  modified_base 107..109: mod_base = OTHER; note = linked via phosphorothioate bond
  modified_base 108: mod_base = OTHER; note = any 2'-O-methyl ribonucelotide
  modified_base 109: mod_base = OTHER; note = any 2'-O-methyl ribonucelotide
  source 1..109: mol_type = other RNA

SEQ ID NO: 19707 - RNA, 109 nt, synthetic construct; identical to SEQ ID NO: 19703
  modified_base 1..4: mod_base = OTHER; note = linked via phosphorothioate bond
  modified_base 1: mod_base = OTHER; note = 2'-O-methyladenosine
  modified_base 2: mod_base = cm
  modified_base 3: mod_base = um
  modified_base 4: mod_base = gm
  modified_base 5: mod_base = gm
  modified_base 6: mod_base = cm
  modified_base 7: mod_base = gm
  modified_base 8: mod_base = cm
  modified_base 13: mod_base = OTHER; note = 2'-O-methyladenosine
  modified_base 14: mod_base = um
  modified_base 15: mod_base = cm
  modified_base 16: mod_base = um
  modified_base 17: mod_base = gm
  modified_base 18: mod_base = OTHER; note = 2'-O-methyladenosine
  modified_base 19: mod_base = um
  modified_base 27: mod_base = OTHER; note = 2'-O-methyladenosine
  modified_base 28: mod_base = gm
  modified_base 29: mod_base = OTHER; note = 2'-O-methyladenosine
  modified_base 30: mod_base = gm
  modified_base 31: mod_base = cm
  modified_base 32: mod_base = cm
  modified_base 33: mod_base = OTHER; note = 2'-O-methyladenosine
  modified_base 34: mod_base = um
  modified_base 35: mod_base = cm
  modified_base 36: mod_base = OTHER; note = 2'-O-methyladenosine
  modified_base 37: mod_base = cm
  modified_base 38: mod_base = cm
  modified_base 44: mod_base = cm
  modified_base 45: mod_base = um
  modified_base 48: mod_base = gm
  modified_base 49: mod_base = um
  modified_base 50: mod_base = cm
  modified_base 51: mod_base = gm
  modified_base 57: mod_base = gm
  modified_base 58: mod_base = gm
  modified_base 59: mod_base = um
  modified_base 60: mod_base = OTHER; note = 2'-O-methyladenosine
  modified_base 61: mod_base = OTHER; note = 2'-O-methyladenosine
  modified_base 62: mod_base = OTHER; note = 2'-O-methyladenosine
  modified_base 63: mod_base = gm
  modified_base 64: mod_base = cm
  modified_base 65: mod_base = um
  modified_base 66: mod_base = cm
  modified_base 67: mod_base = cm
  modified_base 68: mod_base = cm
  modified_base 69: mod_base = um
  modified_base 70: mod_base = cm
  modified_base 71: mod_base = um
  modified_base 72: mod_base = um
  modified_base 73: mod_base = cm
  modified_base 74: mod_base = gm
  modified_base 75: mod_base = gm
  modified_base 76: mod_base = OTHER; note = 2'-O-methyladenosine
  modified_base 77: mod_base = gm
  modified_base 78: mod_base = gm
  modified_base 79: mod_base = gm
  modified_base 80: mod_base = OTHER; note = 2'-O-methyladenosine
  modified_base 81: mod_base = gm
  modified_base 82: mod_base = cm
  modified_base 83: mod_base = OTHER; note = 2'-O-methyladenosine
  modified_base 84: mod_base = um
  modified_base 107: mod_base = OTHER; note = any 2'-O-methyl ribonucelotide
  modified_base 107..109: mod_base = OTHER; note = linked via phosphorothioate bond
  modified_base 108: mod_base = OTHER; note = any 2'-O-methyl ribonucelotide
  modified_base 109: mod_base = OTHER; note = any 2'-O-methyl ribonucelotide
  source 1..109: mol_type = other RNA

SEQ ID NO: 19708 - RNA, 109 nt, synthetic construct; identical to SEQ ID NO: 19703
  modified_base 1..4: mod_base = OTHER; note = linked via phosphorothioate bond
  modified_base 1: mod_base = OTHER; note = 2'-O-methyladenosine
  modified_base 2: mod_base = cm
  modified_base 3: mod_base = um
  modified_base 44: mod_base = cm
  modified_base 45: mod_base = um
  modified_base 48: mod_base = gm
  modified_base 49: mod_base = um
  modified_base 50: mod_base = cm
  modified_base 51: mod_base = gm
  modified_base 63: mod_base = gm
  modified_base 64: mod_base = cm
  modified_base 65: mod_base = um
  modified_base 66: mod_base = cm
  modified_base 67: mod_base = cm
  modified_base 68: mod_base = cm
  modified_base 69: mod_base = um
  modified_base 70: mod_base = cm
  modified_base 71: mod_base = um
  modified_base 72: mod_base = um
  modified_base 73: mod_base = cm
  modified_base 74: mod_base = gm
  modified_base 75: mod_base = gm
  modified_base 76: mod_base = OTHER; note = 2'-O-methyladenosine
  modified_base 77: mod_base = gm
  modified_base 78: mod_base = gm
  modified_base 79: mod_base = gm
  modified_base 80: mod_base = OTHER; note = 2'-O-methyladenosine
  modified_base 81: mod_base = gm
  modified_base 82: mod_base = cm
  modified_base 107: mod_base = OTHER; note = any 2'-O-methyl ribonucelotide
  modified_base 107..109: mod_base = OTHER; note = linked via phosphorothioate bond
  modified_base 108: mod_base = OTHER; note = any 2'-O-methyl ribonucelotide
  modified_base 109: mod_base = OTHER; note = any 2'-O-methyl ribonucelotide
  source 1..109: mol_type = other RNA

SEQ ID NO: 19709 - RNA, 109 nt, synthetic construct; identical to SEQ ID NO: 19703
  modified_base 1..4: mod_base = OTHER; note = linked via phosphorothioate bond
  modified_base 1: mod_base = OTHER; note = 2'-O-methyladenosine
  modified_base 2: mod_base = cm
  modified_base 3: mod_base = um
  modified_base 63: mod_base = gm
  modified_base 64: mod_base = cm
  modified_base 65: mod_base = um
  modified_base 66: mod_base = cm
  modified_base 67: mod_base = cm
  modified_base 68: mod_base = cm
  modified_base 69: mod_base = um
  modified_base 70: mod_base = cm
  modified_base 71: mod_base = um
  modified_base 72: mod_base = um
  modified_base 73: mod_base = cm
  modified_base 74: mod_base = gm
  modified_base 75: mod_base = gm
  modified_base 76: mod_base = OTHER; note = 2'-O-methyladenosine
  modified_base 77: mod_base = gm
  modified_base 78: mod_base = gm
  modified_base 79: mod_base = gm
  modified_base 80: mod_base = OTHER; note = 2'-O-methyladenosine
  modified_base 81: mod_base = gm
  modified_base 82: mod_base = cm
  modified_base 107: mod_base = OTHER; note = any 2'-O-methyl ribonucelotide
  modified_base 107..109: mod_base = OTHER; note = linked via phosphorothioate bond
  modified_base 108: mod_base = OTHER; note = any 2'-O-methyl ribonucelotide
  modified_base 109: mod_base = OTHER; note = any 2'-O-methyl ribonucelotide
  source 1..109: mol_type = other RNA

SEQ ID NO: 19710 - RNA, 109 nt, synthetic construct; identical to SEQ ID NO: 19703
  modified_base 1..4: mod_base = OTHER; note = linked via phosphorothioate bond
  modified_base 1: mod_base = OTHER; note = 2'-O-methyladenosine
  modified_base 2: mod_base = cm
  modified_base 3: mod_base = um
  modified_base 6: mod_base = cm
  modified_base 8: mod_base = cm
  modified_base 9: mod_base = um
  modified_base 14: mod_base = um
  modified_base 15: mod_base = cm
  modified_base 27: mod_base = OTHER; note = 2'-O-methyladenosine
  modified_base 28: mod_base = gm
  modified_base 33: mod_base = OTHER; note = 2'-O-methyladenosine
  modified_base 34: mod_base = um
  modified_base 35: mod_base = cm
  modified_base 36: mod_base = OTHER; note = 2'-O-methyladenosine
  modified_base 37: mod_base = cm
  modified_base 42: mod_base = gm
  modified_base 43: mod_base = OTHER; note = 2'-O-methyladenosine
  modified_base 44: mod_base = cm
  modified_base 45: mod_base = um
  modified_base 48: mod_base = gm
  modified_base 49: mod_base = um
  modified_base 50: mod_base = cm
  modified_base 51: mod_base = gm
  modified_base 58: mod_base = gm
  modified_base 59: mod_base = um
  modified_base 61: mod_base = OTHER; note = 2'-O-methyladenosine
  modified_base 62: mod_base = OTHER; note = 2'-O-methyladenosine
  modified_base 63: mod_base = gm
  modified_base 64: mod_base = cm
  modified_base 65: mod_base = um
  modified_base 66: mod_base = cm
  modified_base 67: mod_base = cm
  modified_base 68: mod_base = cm
  modified_base 69: mod_base = um
  modified_base 70: mod_base = cm
  modified_base 71: mod_base = um
  modified_base 72: mod_base = um
  modified_base 73: mod_base = cm
  modified_base 74: mod_base = gm
  modified_base 75: mod_base = gm
  modified_base 76: mod_base = OTHER; note = 2'-O-methyladenosine
  modified_base 77: mod_base = gm
  modified_base 78: mod_base = gm
  modified_base 79: mod_base = gm
  modified_base 80: mod_base = OTHER; note = 2'-O-methyladenosine
  modified_base 81: mod_base = gm
  modified_base 82: mod_base = cm
  modified_base 83: mod_base = OTHER; note = 2'-O-methyladenosine
  modified_base 84: mod_base = um
  modified_base 106..109: mod_base = OTHER; note = linked via phosphorothioate bond
  modified_base 107: mod_base = OTHER; note = any 2'-O-methyl ribonucelotide
  modified_base 108: mod_base = OTHER; note = any 2'-O-methyl ribonucelotide
  modified_base 109: mod_base = OTHER; note = any 2'-O-methyl ribonucelotide
  source 1..109: mol_type = other RNA

SEQ ID NO: 19711 - RNA, 109 nt, synthetic construct; identical to SEQ ID NO: 19703
  modified_base 1..4: mod_base = OTHER; note = linked via phosphorothioate bond
  modified_base 1: mod_base = OTHER; note = 2'-O-methyladenosine
  modified_base 2: mod_base = cm
  modified_base 3: mod_base = um
  modified_base 33: mod_base = OTHER; note = 2'-O-methyladenosine
  modified_base 34: mod_base = um
  modified_base 35: mod_base = cm
  modified_base 36: mod_base = OTHER; note = 2'-O-methyladenosine
  modified_base 37: mod_base = cm
  modified_base 42: mod_base = gm
  modified_base 43: mod_base = OTHER; note = 2'-O-methyladenosine
  modified_base 44: mod_base = cm
  modified_base 45: mod_base = um
  modified_base 48: mod_base = gm
  modified_base 49: mod_base = um
  modified_base 50: mod_base = cm
  modified_base 51: mod_base = gm
  modified_base 58: mod_base = gm
  modified_base 59: mod_base = um
  modified_base 60: mod_base = OTHER; note = 2'-O-methyladenosine
  modified_base 61: mod_base = OTHER; note = 2'-O-methyladenosine
  modified_base 63: mod_base = gm
  modified_base 64: mod_base = cm
  modified_base 65: mod_base = um
  modified_base 66: mod_base = cm
  modified_base 67: mod_base = cm
  modified_base 68: mod_base = cm
  modified_base 69: mod_base = um
  modified_base 70: mod_base = cm
  modified_base 71: mod_base = um
  modified_base 72: mod_base = um
  modified_base 73: mod_base = cm
  modified_base 74: mod_base = gm
  modified_base 75: mod_base = gm
  modified_base 76: mod_base = OTHER; note = 2'-O-methyladenosine
  modified_base 77: mod_base = gm
  modified_base 78: mod_base = gm
  modified_base 79: mod_base = gm
  modified_base 80: mod_base = OTHER; note = 2'-O-methyladenosine
  modified_base 81: mod_base = gm
  modified_base 82: mod_base = cm
  modified_base 83: mod_base = OTHER; note = 2'-O-methyladenosine
  modified_base 84: mod_base = um
  modified_base 106..109: mod_base = OTHER; note = linked via phosphorothioate bond
  modified_base 107: mod_base = OTHER; note = any 2'-O-methyl ribonucelotide
  modified_base 108: mod_base = OTHER; note = any 2'-O-methyl ribonucelotide
  modified_base 109: mod_base = OTHER; note = any 2'-O-methyl ribonucelotide
  source 1..109: mol_type = other RNA

SEQ ID NO: 19712 - RNA, 109 nt, synthetic construct; identical to SEQ ID NO: 19703
  modified_base 1..4: mod_base = OTHER; note = linked via phosphorothioate bond
  modified_base 1: mod_base = OTHER; note = 2'-O-methyladenosine
  modified_base 2: mod_base = cm
  modified_base 3: mod_base = um
  modified_base 6: mod_base = cm
  modified_base 7: mod_base = gm
  modified_base 9: mod_base = um
  modified_base 14: mod_base = um
  modified_base 15: mod_base = cm
  modified_base 27: mod_base = OTHER; note = 2'-O-methyladenosine
  modified_base 28: mod_base = gm
  modified_base 42: mod_base = gm
  modified_base 43: mod_base = OTHER; note = 2'-O-methyladenosine
  modified_base 44: mod_base = cm
  modified_base 45: mod_base = um
  modified_base 48: mod_base = gm
  modified_base 49: mod_base = um
  modified_base 50: mod_base = cm
  modified_base 51: mod_base = gm
  modified_base 63: mod_base = gm
  modified_base 64: mod_base = cm
  modified_base 65: mod_base = um
  modified_base 66: mod_base = cm
  modified_base 67: mod_base = cm
  modified_base 68: mod_base = cm
  modified_base 69: mod_base = um
  modified_base 70: mod_base = cm
  modified_base 71: mod_base = um
  modified_base 72: mod_base = um
  modified_base 73: mod_base = cm
  modified_base 74: mod_base = gm
  modified_base 75: mod_base = gm
  modified_base 76: mod_base = OTHER; note = 2'-O-methyladenosine
  modified_base 77: mod_base = gm
  modified_base 78: mod_base = gm
  modified_base 79: mod_base = gm
  modified_base 80: mod_base = OTHER; note = 2'-O-methyladenosine
  modified_base 81: mod_base = gm
  modified_base 82: mod_base = cm
  modified_base 106..109: mod_base = OTHER; note = linked via phosphorothioate bond
  modified_base 107: mod_base = OTHER; note = any 2'-O-methyl ribonucelotide
  modified_base 108: mod_base = OTHER; note = any 2'-O-methyl ribonucelotide
  modified_base 109: mod_base = OTHER; note = any 2'-O-methyl ribonucelotide
  source 1..109: mol_type = other RNA

SEQ ID NO: 19713 - RNA, 119 nt, synthetic construct
  source 1..119: mol_type = other RNA
actggcgcttctatctgattactctgagcgccatcaccagcgactatgtcgtagtgggtaaagccgcttacggacttcggtccgtaagaggcatcagagnnnnnnnnnnnnnnnnnnnn

SEQ ID NO: 19714 - RNA, 119 nt, synthetic construct; identical to SEQ ID NO: 19713
  modified_base 1..4: mod_base = OTHER; note = linked via phosphorothioate bond
  modified_base 1: mod_base = OTHER; note = 2'-O-methyladenosine
  modified_base 2: mod_base = cm
  modified_base 3: mod_base = um
  modified_base 117: mod_base = OTHER; note = any 2'-O-methyl ribonucelotide
  modified_base 117..119: mod_base = OTHER; note = linked via phosphorothioate bond
  modified_base 118: mod_base = OTHER; note = any 2'-O-methyl ribonucelotide
  modified_base 119: mod_base = OTHER; note = any 2'-O-methyl ribonucelotide
  source 1..119: mol_type = other RNA

SEQ ID NO: 19715 - RNA, 122 nt, synthetic construct
  modified_base 1..4: mod_base = OTHER; note = linked via phosphorothioate bond
  modified_base 1: mod_base = OTHER; note = 2'-O-methyladenosine
  modified_base 2: mod_base = cm
  modified_base 3: mod_base = um
  modified_base 119..122: mod_base = OTHER; note = linked via phosphorothioate bond
  modified_base 120: mod_base = um
  modified_base 121: mod_base = um
  modified_base 122: mod_base = um
  source 1..122: mol_type = other RNA
actggcgcttctatctgattactctgagcgccatcaccagcgactatgtcgtagtgggtaaagccgcttacggacttcggtccgtaagaggcatcagagnnnnnnnnnnnnnnnnnnnnttt

SEQ ID NO: 19716 - RNA, 119 nt, synthetic construct; identical to SEQ ID NO: 19713
  modified_base 1..4: mod_base = OTHER; note = linked via phosphorothioate bond
  modified_base 1: mod_base = OTHER; note = 2'-O-methyladenosine
  modified_base 2: mod_base = cm
  modified_base 3: mod_base = um
  modified_base 4: mod_base = gm
  modified_base 5: mod_base = gm
  modified_base 6: mod_base = cm
  modified_base 7: mod_base = gm
  modified_base 8: mod_base = cm
  modified_base 9: mod_base = um
  modified_base 10: mod_base = um
  modified_base 11: mod_base = cm
  modified_base 12: mod_base = um
  modified_base 13: mod_base = OTHER; note = 2'-O-methyladenosine
  modified_base 14: mod_base = um
  modified_base 15: mod_base = cm
  modified_base 16: mod_base = um
  modified_base 17: mod_base = gm
  modified_base 18: mod_base = OTHER; note = 2'-O-methyladenosine
  modified_base 19: mod_base = um
  modified_base 27: mod_base = OTHER; note = 2'-O-methyladenosine
  modified_base 28: mod_base = gm
  modified_base 29: mod_base = cm
  modified_base 30: mod_base = gm
  modified_base 31: mod_base = cm
  modified_base 32: mod_base = cm
  modified_base 33: mod_base = OTHER; note = 2'-O-methyladenosine
  modified_base 34: mod_base = um
  modified_base 35: mod_base = cm
  modified_base 36: mod_base = OTHER; note = 2'-O-methyladenosine
  modified_base 37: mod_base = cm
  modified_base 38: mod_base = cm
  modified_base 44: mod_base = cm
  modified_base 45: mod_base = um
  modified_base 48: mod_base = gm
  modified_base 49: mod_base = um
  modified_base 50: mod_base = cm
  modified_base 51: mod_base = gm
  modified_base 57: mod_base = gm
  modified_base 58: mod_base = gm
  modified_base 59: mod_base = um
  modified_base 60: mod_base = OTHER; note = 2'-O-methyladenosine
  modified_base 61: mod_base = OTHER; note = 2'-O-methyladenosine
  modified_base 62: mod_base = OTHER; note = 2'-O-methyladenosine
  modified_base 63: mod_base = gm
  modified_base 64: mod_base = cm
  modified_base 65: mod_base = cm
  modified_base 66: mod_base = gm
  modified_base 67: mod_base = cm
  modified_base 68: mod_base = um
  modified_base 69: mod_base = um
  modified_base 70: mod_base = OTHER; note = 2'-O-methyladenosine
  modified_base 71: mod_base = cm
  modified_base 72: mod_base = gm
  modified_base 73: mod_base = gm
  modified_base 74: mod_base = OTHER; note = 2'-O-methyladenosine
  modified_base 75: mod_base = cm
  modified_base 76: mod_base = um
  modified_base 77: mod_base = um
  modified_base 78: mod_base = cm
  modified_base 79: mod_base = gm
  modified_base 80: mod_base = gm
  modified_base 81: mod_base = um
  modified_base 82: mod_base = cm
  modified_base 83: mod_base = cm
  modified_base 84: mod_base = gm
  modified_base 85: mod_base = um
  modified_base 86: mod_base = OTHER; note = 2'-O-methyladenosine
  modified_base 87: mod_base = OTHER; note = 2'-O-methyladenosine
  modified_base 88: mod_base = gm
  modified_base 89: mod_base = OTHER; note = 2'-O-methyladenosine
  modified_base 90: mod_base = gm
  modified_base 91: mod_base = gm
  modified_base 92: mod_base = cm
  modified_base 93: mod_base = OTHER; note = 2'-O-methyladenosine
  modified_base 94: mod_base = um
  modified_base 95: mod_base = cm
  modified_base 96: mod_base = OTHER; note = 2'-O-methyladenosine
  modified_base 117: mod_base = OTHER; note = any 2'-O-methyl ribonucelotide
  modified_base 117..119: mod_base = OTHER; note = linked via phosphorothioate bond
  modified_base 118: mod_base = OTHER; note = any 2'-O-methyl ribonucelotide
  modified_base 119: mod_base = OTHER; note = any 2'-O-methyl ribonucelotide
  source 1..119: mol_type = other RNA

SEQ ID NO: 19717 - RNA, 119 nt, synthetic construct; identical to SEQ ID NO: 19713
  modified_base 1..4: mod_base = OTHER; note = linked via phosphorothioate bond
  modified_base 1: mod_base = OTHER; note = 2'-O-methyladenosine
  modified_base 2: mod_base = cm
  modified_base 3: mod_base = um
  modified_base 4: mod_base = gm
  modified_base 5: mod_base = gm
  modified_base 6: mod_base = cm
  modified_base 7: mod_base = gm
  modified_base 8: mod_base = cm
  modified_base 13: mod_base = OTHER; note = 2'-O-methyladenosine
  modified_base 14: mod_base = um
  modified_base 15: mod_base = cm
  modified_base 16: mod_base = um
  modified_base 17: mod_base = gm
  modified_base 18: mod_base = OTHER; note = 2'-O-methyladenosine
  modified_base 19: mod_base = um
  modified_base 27: mod_base = OTHER; note = 2'-O-methyladenosine
  modified_base 28: mod_base = gm
  modified_base 29: mod_base = cm
  modified_base 30: mod_base = gm
  modified_base 31: mod_base = cm
  modified_base 32: mod_base = cm
  modified_base 33: mod_base = OTHER; note = 2'-O-methyladenosine
  modified_base 34: mod_base = um
  modified_base 35: mod_base = cm
  modified_base 36: mod_base = OTHER; note = 2'-O-methyladenosine
  modified_base 37: mod_base = cm
  modified_base 38: mod_base = cm
  modified_base 44: mod_base = cm
  modified_base 45: mod_base = um
  modified_base 48: mod_base = gm
  modified_base 49: mod_base = um
  modified_base 50: mod_base = cm
  modified_base 51: mod_base = gm
  modified_base 57: mod_base = gm
  modified_base 58: mod_base = gm
  modified_base 59: mod_base = um
  modified_base 60: mod_base = OTHER; note = 2'-O-methyladenosine
  modified_base 61: mod_base = OTHER; note = 2'-O-methyladenosine
  modified_base 62: mod_base = OTHER; note = 2'-O-methyladenosine
  modified_base 63: mod_base = gm
  modified_base 64: mod_base = cm
  modified_base 65: mod_base = cm
  modified_base 66: mod_base = gm
  modified_base 67: mod_base = cm
  modified_base 68: mod_base = um
  modified_base 69: mod_base = um
  modified_base 70: mod_base = OTHER; note = 2'-O-methyladenosine
  modified_base 71: mod_base = cm
  modified_base 72: mod_base = gm
  modified_base 73: mod_base = gm
  modified_base 74: mod_base = OTHER; note = 2'-O-methyladenosine
  modified_base 75: mod_base = cm
  modified_base 76: mod_base = um
  modified_base 77: mod_base = um
  modified_base 78: mod_base = cm
  modified_base 79: mod_base = gm
  modified_base 80: mod_base = gm
  modified_base 81: mod_base = um
  modified_base 82: mod_base = cm
  modified_base 83: mod_base = cm
  modified_base 84: mod_base = gm
  modified_base 85: mod_base = um
  modified_base 86: mod_base = OTHER; note = 2'-O-methyladenosine
  modified_base 87: mod_base = OTHER; note = 2'-O-methyladenosine
  modified_base 88: mod_base = gm
  modified_base 89: mod_base = OTHER; note = 2'-O-methyladenosine
  modified_base 90: mod_base = gm
  modified_base 91: mod_base = gm
  modified_base 92: mod_base = cm
  modified_base 93: mod_base = OTHER; note = 2'-O-methyladenosine
  modified_base 94: mod_base = um
  modified_base 117: mod_base = OTHER; note = any 2'-O-methyl ribonucelotide
  modified_base 117..119: mod_base = OTHER; note = linked via phosphorothioate bond
  modified_base 118: mod_base = OTHER; note = any 2'-O-methyl ribonucelotide
  modified_base 119: mod_base = OTHER; note = any 2'-O-methyl ribonucelotide
  source 1..119: mol_type = other RNA

SEQ ID NO: 19718 - RNA, 119 nt, synthetic construct; identical to SEQ ID NO: 19713
  modified_base 1..4: mod_base = OTHER; note = linked via phosphorothioate bond
  modified_base 1: mod_base = OTHER; note = 2'-O-methyladenosine
  modified_base 2: mod_base = cm
  modified_base 3: mod_base = um
  modified_base 44: mod_base = cm
  modified_base 45: mod_base = um
  modified_base 48: mod_base = gm
  modified_base 49: mod_base = um
  modified_base 50: mod_base = cm
  modified_base 51: mod_base = gm
  modified_base 60: mod_base = OTHER; note = 2'-O-methyladenosine
  modified_base 61: mod_base = OTHER; note = 2'-O-methyladenosine
  modified_base 62: mod_base = OTHER; note = 2'-O-methyladenosine
  modified_base 63: mod_base = gm
  modified_base 64: mod_base = cm
  modified_base 65: mod_base = cm
  modified_base 66: mod_base = gm
  modified_base 67: mod_base = cm
  modified_base 68: mod_base = um
  modified_base 69: mod_base = um
  modified_base 70: mod_base = OTHER; note = 2'-O-methyladenosine
  modified_base 71: mod_base = cm
  modified_base 72: mod_base = gm
  modified_base 73: mod_base = gm
  modified_base 74: mod_base = OTHER; note = 2'-O-methyladenosine
  modified_base 75: mod_base = cm
  modified_base 76: mod_base = um
  modified_base 77: mod_base = um
  modified_base 78: mod_base = cm
  modified_base 79: mod_base = gm
  modified_base 80: mod_base = gm
  modified_base 81: mod_base = um
  modified_base 82: mod_base = cm
  modified_base 83: mod_base = cm
  modified_base 84: mod_base = gm
  modified_base 85: mod_base = um
  modified_base 86: mod_base = OTHER; note = 2'-O-methyladenosine
  modified_base 87: mod_base = OTHER; note = 2'-O-methyladenosine
  modified_base 88: mod_base = gm
  modified_base 89: mod_base = OTHER; note = 2'-O-methyladenosine
  modified_base 90: mod_base = gm
  modified_base 91: mod_base = gm
  modified_base 92: mod_base = cm
  modified_base 117: mod_base = OTHER; note = any 2'-O-methyl ribonucelotide
  modified_base 117..119: mod_base = OTHER; note = linked via phosphorothioate bond
  modified_base 118: mod_base = OTHER; note = any 2'-O-methyl ribonucelotide
  modified_base 119: mod_base = OTHER; note = any 2'-O-methyl ribonucelotide
  source 1..119: mol_type = other RNA

SEQ ID NO: 19719 - RNA, 119 nt, synthetic construct; identical to SEQ ID NO: 19713
  modified_base 1..4: mod_base = OTHER; note = linked via phosphorothioate bond
  modified_base 1: mod_base = OTHER; note = 2'-O-methyladenosine
  modified_base 2: mod_base = cm
  modified_base 3: mod_base = um
  modified_base 60: mod_base = OTHER; note = 2'-O-methyladenosine
  modified_base 61: mod_base = OTHER; note = 2'-O-methyladenosine
  modified_base 62: mod_base = OTHER; note = 2'-O-methyladenosine
  modified_base 63: mod_base = gm
  modified_base 64: mod_base = cm
  modified_base 65: mod_base = cm
  modified_base 66: mod_base = gm
  modified_base 67: mod_base = cm
  modified_base 68: mod_base = um
  modified_base 69: mod_base = um
  modified_base 70: mod_base = OTHER; note = 2'-O-methyladenosine
  modified_base 71: mod_base = cm
  modified_base 72: mod_base = gm
  modified_base 73: mod_base = gm
  modified_base 74: mod_base = OTHER; note = 2'-O-methyladenosine
  modified_base 75: mod_base = cm
  modified_base 76: mod_base = um
  modified_base 77: mod_base = um
  modified_base 78: mod_base = cm
  modified_base 79: mod_base = gm
  modified_base 80: mod_base = gm
  modified_base 81: mod_base = um
  modified_base 82: mod_base = cm
  modified_base 83: mod_base = cm
  modified_base 84: mod_base = gm
  modified_base 85: mod_base = um
  modified_base 86: mod_base = OTHER; note = 2'-O-methyladenosine
  modified_base 87: mod_base = OTHER; note = 2'-O-methyladenosine
  modified_base 88: mod_base = gm
  modified_base 89: mod_base = OTHER; note = 2'-O-methyladenosine
  modified_base 90: mod_base = gm
  modified_base 91: mod_base = gm
  modified_base 92: mod_base = cm
  modified_base 117: mod_base = OTHER; note = any 2'-O-methyl ribonucelotide
  modified_base 117..119: mod_base = OTHER; note = linked via phosphorothioate bond
  modified_base 118: mod_base = OTHER; note = any 2'-O-methyl ribonucelotide
  modified_base 119: mod_base = OTHER; note = any 2'-O-methyl ribonucelotide
  source 1..119: mol_type = other RNA

SEQ ID NO: 19720 - RNA, 119 nt, synthetic construct; identical to SEQ ID NO: 19713
  modified_base 1..4: mod_base = OTHER; note = linked via phosphorothioate bond
  modified_base 1: mod_base = OTHER; note = 2'-O-methyladenosine
  modified_base 2: mod_base = cm
  modified_base 3: mod_base = um
  modified_base 6: mod_base = cm
  modified_base 8: mod_base = cm
  modified_base 9: mod_base = um
  modified_base 14: mod_base = um
  modified_base 15: mod_base = cm
  modified_base 27: mod_base = OTHER; note = 2'-O-methyladenosine
  modified_base 28: mod_base = gm
  modified_base 33: mod_base = OTHER; note = 2'-O-methyladenosine
  modified_base 34: mod_base = um
  modified_base 35: mod_base = cm
  modified_base 36: mod_base = OTHER; note = 2'-O-methyladenosine
  modified_base 37: mod_base = cm
  modified_base 42: mod_base = gm
  modified_base 43: mod_base = OTHER; note = 2'-O-methyladenosine
  modified_base 44: mod_base = cm
  modified_base 45: mod_base = um
  modified_base 48: mod_base = gm
  modified_base 49: mod_base = um
  modified_base 50: mod_base = cm
  modified_base 51: mod_base = gm
  modified_base 58: mod_base = gm
  modified_base 59: mod_base = um
  modified_base 60: mod_base = OTHER; note = 2'-O-methyladenosine
  modified_base 61: mod_base = OTHER; note = 2'-O-methyladenosine
  modified_base 63: mod_base = gm
  modified_base 64: mod_base = cm
  modified_base 65: mod_base = cm
  modified_base 66: mod_base = gm
  modified_base 67: mod_base = cm
  modified_base 68: mod_base = um
  modified_base 69: mod_base = um
  modified_base 70: mod_base = OTHER; note = 2'-O-methyladenosine
  modified_base 71: mod_base = cm
  modified_base 72: mod_base = gm
  modified_base 73: mod_base = gm
  modified_base 74: mod_base = OTHER; note = 2'-O-methyladenosine
  modified_base 75: mod_base = cm
  modified_base 76: mod_base = um
  modified_base 77: mod_base = um
  modified_base 78: mod_base = cm
  modified_base 79: mod_base = gm
  modified_base 80: mod_base = gm
  modified_base 81: mod_base = um
  modified_base 82: mod_base = cm
  modified_base 83: mod_base = cm
  modified_base 84: mod_base = gm
  modified_base 85: mod_base = um
  modified_base 86: mod_base = OTHER; note = 2'-O-methyladenosine
  modified_base 87: mod_base = OTHER; note = 2'-O-methyladenosine
  modified_base 88: mod_base = gm
  modified_base 89: mod_base = OTHER; note = 2'-O-methyladenosine
  modified_base 90: mod_base = gm
  modified_base 91: mod_base = gm
  modified_base 92: mod_base = cm
  modified_base 93: mod_base = OTHER; note = 2'-O-methyladenosine
  modified_base 94: mod_base = um
  modified_base 116..119: mod_base = OTHER; note = linked via phosphorothioate bond
  modified_base 117: mod_base = OTHER; note = any 2'-O-methyl ribonucelotide
  modified_base 118: mod_base = OTHER; note = any 2'-O-methyl ribonucelotide
  modified_base 119: mod_base = OTHER; note = any 2'-O-methyl ribonucelotide
  source 1..119: mol_type = other RNA

SEQ ID NO: 19721 - RNA, 119 nt, synthetic construct; identical to SEQ ID NO: 19713
  modified_base 1..4: mod_base = OTHER; note = linked via phosphorothioate bond
  modified_base 1: mod_base = OTHER; note = 2'-O-methyladenosine
  modified_base 2: mod_base = cm
  modified_base 3: mod_base = um
  modified_base 33: mod_base = OTHER; note = 2'-O-methyladenosine
  modified_base 34: mod_base = um
  modified_base 35: mod_base = cm
  modified_base 36: mod_base = OTHER; note = 2'-O-methyladenosine
  modified_base 37: mod_base = cm
  modified_base 42: mod_base = gm
  modified_base 43: mod_base = OTHER; note = 2'-O-methyladenosine
  modified_base 44: mod_base = cm
  modified_base 45: mod_base = um
  modified_base 48: mod_base = gm
  modified_base 49: mod_base = um
  modified_base 50: mod_base = cm
  modified_base 51: mod_base = gm
  modified_base 58: mod_base = gm
  modified_base 59: mod_base = um
  modified_base 60: mod_base = OTHER; note = 2'-O-methyladenosine
  modified_base 61: mod_base = OTHER; note = 2'-O-methyladenosine
  modified_base 63: mod_base = gm
  modified_base 64: mod_base = cm
  modified_base 65: mod_base = cm
  modified_base 66: mod_base = gm
  modified_base 67: mod_base = cm
  modified_base 68: mod_base = um
  modified_base 69: mod_base = um
  modified_base 70: mod_base = OTHER; note = 2'-O-methyladenosine
  modified_base 71: mod_base = cm
  modified_base 72: mod_base = gm
  modified_base 73: mod_base = gm
  modified_base 74: mod_base = OTHER; note = 2'-O-methyladenosine
  modified_base 75: mod_base = cm
  modified_base 76: mod_base = um
  modified_base 77: mod_base = um
  modified_base 78: mod_base = cm
  modified_base 79: mod_base = gm
  modified_base 80: mod_base = gm
  modified_base 81: mod_base = um
  modified_base 82: mod_base = cm
  modified_base 83: mod_base = cm
  modified_base 84: mod_base = gm
  modified_base 85: mod_base = um
  modified_base 86: mod_base = OTHER; note = 2'-O-methyladenosine
  modified_base 87: mod_base = OTHER; note = 2'-O-methyladenosine
  modified_base 88: mod_base = gm
  modified_base 89: mod_base = OTHER; note = 2'-O-methyladenosine
  modified_base 90: mod_base = gm
  modified_base 91: mod_base = gm
  modified_base 92: mod_base = cm
  modified_base 93: mod_base = OTHER; note = 2'-O-methyladenosine
  modified_base 94: mod_base = um
  modified_base 116..119: mod_base = OTHER; note = linked via phosphorothioate bond
  modified_base 117: mod_base = OTHER; note = any 2'-O-methyl ribonucelotide
  modified_base 118: mod_base = OTHER; note = any 2'-O-methyl ribonucelotide
  modified_base 119: mod_base = OTHER; note = any 2'-O-methyl ribonucelotide
  source 1..119: mol_type = other RNA

SEQ ID NO: 19722 - RNA, 119 nt, synthetic construct; identical to SEQ ID NO: 19713
  modified_base 1..4: mod_base = OTHER; note = linked via phosphorothioate bond
  modified_base 1: mod_base = OTHER; note = 2'-O-methyladenosine
  modified_base 2: mod_base = cm
  modified_base 3: mod_base = um
  modified_base 6: mod_base = cm
  modified_base 8: mod_base = cm
  modified_base 9: mod_base = um
  modified_base 14: mod_base = um
  modified_base 15: mod_base = cm
  modified_base 27: mod_base = OTHER; note = 2'-O-methyladenosine
  modified_base 28: mod_base = gm
  modified_base 42: mod_base = gm
  modified_base 43: mod_base = OTHER; note = 2'-O-methyladenosine
  modified_base 44: mod_base = cm
  modified_base 45: mod_base = um
  modified_base 48: mod_base = gm
  modified_base 49: mod_base = um
  modified_base 50: mod_base = cm
  modified_base 51: mod_base = gm
  modified_base 63: mod_base = gm
  modified_base 64: mod_base = cm
  modified_base 65: mod_base = cm
  modified_base 66: mod_base = gm
  modified_base 67: mod_base = cm
  modified_base 68: mod_base = um
  modified_base 69: mod_base = um
  modified_base 70: mod_base = OTHER; note = 2'-O-methyladenosine
  modified_base 71: mod_base = cm
  modified_base 72: mod_base = gm
  modified_base 73: mod_base = gm
  modified_base 74: mod_base = OTHER; note = 2'-O-methyladenosine
  modified_base 75: mod_base = cm
  modified_base 76: mod_base = um
  modified_base 77: mod_base = um
  modified_base 78: mod_base = cm
  modified_base 79: mod_base = gm
  modified_base 80: mod_base = gm
  modified_base 81: mod_base = um
  modified_base 82: mod_base = cm
  modified_base 83: mod_base = cm
  modified_base 84: mod_base = gm
  modified_base 85: mod_base = um
  modified_base 86: mod_base = OTHER; note = 2'-O-methyladenosine
  modified_base 87: mod_base = OTHER; note = 2'-O-methyladenosine
  modified_base 88: mod_base = gm
  modified_base 89: mod_base = OTHER; note = 2'-O-methyladenosine
  modified_base 90: mod_base = gm
  modified_base 91: mod_base = gm
  modified_base 92: mod_base = cm
  modified_base 116..119: mod_base = OTHER; note = linked via phosphorothioate bond
  modified_base 117: mod_base = OTHER; note = any 2'-O-methyl ribonucelotide
  modified_base 118: mod_base = OTHER; note = any 2'-O-methyl ribonucelotide
  modified_base 119: mod_base = OTHER; note = any 2'-O-methyl ribonucelotide
  source 1..119: mol_type = other RNA

SEQ ID NO: 19723 - RNA, 109 nt, synthetic construct
  source 1..109: mol_type = other RNA
actggcgcttctatctgattactctgagcgccatcaccagcgactatgtcgtagtgggtaaagctccctcttcggagggagcatcagagnnnnnnnnnnnnnnnnnnnn

SEQ ID NO: 19724 - RNA, 109 nt, synthetic construct; identical to SEQ ID NO: 19723
  modified_base 1..4: mod_base = OTHER; note = linked via phosphorothioate bond
  modified_base 1: mod_base = OTHER; note = 2'-O-methyladenosine
  modified_base 2: mod_base = cm
  modified_base 3: mod_base = um
  modified_base 106..109: mod_base = OTHER; note = linked via phosphorothioate bond
  modified_base 107: mod_base = OTHER; note = any 2'-O-methyl ribonucelotide
  modified_base 108: mod_base = OTHER; note = any 2'-O-methyl ribonucelotide
  modified_base 109: mod_base = OTHER; note = any 2'-O-methyl ribonucelotide
  source 1..109: mol_type = other RNA

SEQ ID NO: 19725 - RNA, 112 nt, synthetic construct
  modified_base 1..4: mod_base = OTHER; note = linked via phosphorothioate bond
  modified_base 1: mod_base = OTHER; note = 2'-O-methyladenosine
  modified_base 2: mod_base = cm
  modified_base 3: mod_base = um
  modified_base 109..112: mod_base = OTHER; note = linked via phosphorothioate bond
  modified_base 110: mod_base = um
  modified_base 111: mod_base = um
  modified_base 112: mod_base = um
  source 1..112: mol_type = other RNA
actggcgcttctatctgattactctgagcgccatcaccagcgactatgtcgtagtgggtaaagctccctcttcggagggagcatcagagnnnnnnnnnnnnnnnnnnnnttt

SEQ ID NO: 19726 - RNA, 109 nt, synthetic construct; identical to SEQ ID NO: 19723
  modified_base 1..4: mod_base = OTHER; note = linked via phosphorothioate bond
  modified_base 1: mod_base = OTHER; note = 2'-O-methyladenosine
  modified_base 2: mod_base = cm
  modified_base 3: mod_base = um
  modified_base 4: mod_base = gm
  modified_base 5: mod_base = gm
  modified_base 6: mod_base = cm
  modified_base 7: mod_base = gm
  modified_base 8: mod_base = cm
  modified_base 9: mod_base = um
  modified_base 10: mod_base = um
  modified_base 11: mod_base = cm
  modified_base 12: mod_base = um
  modified_base 13: mod_base = OTHER; note = 2'-O-methyladenosine
  modified_base 14: mod_base = um
  modified_base 15: mod_base = cm
  modified_base 16: mod_base = um
  modified_base 17: mod_base = gm
  modified_base 18: mod_base = OTHER; note = 2'-O-methyladenosine
  modified_base 19: mod_base = um
  modified_base 27: mod_base = OTHER; note = 2'-O-methyladenosine
  modified_base 28: mod_base = gm
  modified_base 29: mod_base = cm
  modified_base 30: mod_base = gm
  modified_base 31: mod_base = cm
  modified_base 32: mod_base = cm
  modified_base 33: mod_base = OTHER; note = 2'-O-methyladenosine
  modified_base 34: mod_base = um
  modified_base 35: mod_base = cm
  modified_base 36: mod_base = OTHER; note = 2'-O-methyladenosine
  modified_base 37: mod_base = cm
  modified_base 38: mod_base = cm
  modified_base 44: mod_base = cm
  modified_base 45: mod_base = um
  modified_base 48: mod_base = gm
  modified_base 49: mod_base = um
  modified_base 50: mod_base = cm
  modified_base 51: mod_base = gm
  modified_base 57: mod_base = gm
  modified_base 58: mod_base = gm
  modified_base 59: mod_base = um
  modified_base 60: mod_base = OTHER; note = 2'-O-methyladenosine
  modified_base 61: mod_base = OTHER; note = 2'-O-methyladenosine
  modified_base 62: mod_base = OTHER; note = 2'-O-methyladenosine
  modified_base 63: mod_base = gm
  modified_base 64: mod_base = cm
  modified_base 65: mod_base = um
  modified_base 66: mod_base = cm
  modified_base 67: mod_base = cm
  modified_base 68: mod_base = cm
  modified_base 69: mod_base = um
  modified_base 70: mod_base = cm
  modified_base 71: mod_base = um
  modified_base 72: mod_base = um
  modified_base 73: mod_base = cm
  modified_base 74: mod_base = gm
  modified_base 75: mod_base = gm
  modified_base 76: mod_base = OTHER; note = 2'-O-methyladenosine
  modified_base 77: mod_base = gm
  modified_base 78: mod_base = gm
  modified_base 79: mod_base = gm
  modified_base 80: mod_base = OTHER; note = 2'-O-methyladenosine
  modified_base 81: mod_base = gm
  modified_base 82: mod_base = cm
  modified_base 83: mod_base = OTHER; note = 2'-O-methyladenosine
  modified_base 84: mod_base = um
  modified_base 85: mod_base = cm
  modified_base 86: mod_base = OTHER; note = 2'-O-methyladenosine
  modified_base 106..109: mod_base = OTHER; note = linked via phosphorothioate bond
  modified_base 107: mod_base = OTHER; note = any 2'-O-methyl ribonucelotide
  modified_base 108: mod_base = OTHER; note = any 2'-O-methyl ribonucelotide
  modified_base 109: mod_base = OTHER; note = any 2'-O-methyl ribonucelotide
  source 1..109: mol_type = other RNA

SEQ ID NO: 19727 - RNA, 109 nt, synthetic construct; identical to SEQ ID NO: 19723
  modified_base 1..4: mod_base = OTHER; note = linked via phosphorothioate bond
  modified_base 1: mod_base = OTHER; note = 2'-O-methyladenosine
  modified_base 2: mod_base = cm
  modified_base 3: mod_base = um
  modified_base 4: mod_base = gm
  modified_base 5: mod_base = gm
  modified_base 6: mod_base = cm
  modified_base 7: mod_base = gm
  modified_base 8: mod_base = cm
  modified_base 13: mod_base = OTHER; note = 2'-O-methyladenosine
  modified_base 14: mod_base = um
  modified_base 15: mod_base = cm
  modified_base 16: mod_base = um
  modified_base 17: mod_base = gm
  modified_base 18: mod_base = OTHER; note = 2'-O-methyladenosine
  modified_base 19: mod_base = um
  modified_base 27: mod_base = OTHER; note = 2'-O-methyladenosine
  modified_base 28: mod_base = gm
  modified_base 29: mod_base = cm
  modified_base 30: mod_base = gm
  modified_base 31: mod_base = cm
  modified_base 32: mod_base = cm
  modified_base 33: mod_base = OTHER; note = 2'-O-methyladenosine
  modified_base 34: mod_base = um
  modified_base 35: mod_base = cm
  modified_base 36: mod_base = OTHER; note = 2'-O-methyladenosine
  modified_base 37: mod_base = cm
  modified_base 38: mod_base = cm
  modified_base 44: mod_base = cm
  modified_base 45: mod_base = um
  modified_base 48: mod_base = gm
  modified_base 49: mod_base = um
  modified_base 50: mod_base = cm
  modified_base 51: mod_base = gm
  modified_base 57: mod_base = gm
  modified_base 58: mod_base = gm
  modified_base 59: mod_base = um
  modified_base 60: mod_base = OTHER; note = 2'-O-methyladenosine
  modified_base 61: mod_base = OTHER; note = 2'-O-methyladenosine
  modified_base 62: mod_base = OTHER; note = 2'-O-methyladenosine
  modified_base 63: mod_base = gm
  modified_base 64: mod_base = cm
  modified_base 65: mod_base = um
  modified_base 66: mod_base = cm
  modified_base 67: mod_base = cm
  modified_base 68: mod_base = cm
  modified_base 69: mod_base = um
  modified_base 70: mod_base = cm
  modified_base 71: mod_base = um
  modified_base 72: mod_base = um
  modified_base 73: mod_base = cm
  modified_base 74: mod_base = gm
  modified_base 75: mod_base = gm
  modified_base 76: mod_base = OTHER; note = 2'-O-methyladenosine
  modified_base 77: mod_base = gm
  modified_base 78: mod_base = gm
  modified_base 79: mod_base = gm
  modified_base 80: mod_base = OTHER; note = 2'-O-methyladenosine
  modified_base 81: mod_base = gm
  modified_base 82: mod_base = cm
  modified_base 83: mod_base = OTHER; note = 2'-O-methyladenosine
  modified_base 84: mod_base = um
  modified_base 106..109: mod_base = OTHER; note = linked via phosphorothioate bond
  modified_base 107: mod_base = OTHER; note = any 2'-O-methyl ribonucelotide
  modified_base 108: mod_base = OTHER; note = any 2'-O-methyl ribonucelotide
  modified_base 109: mod_base = OTHER; note = any 2'-O-methyl ribonucelotide
  source 1..109: mol_type = other RNA

SEQ ID NO: 19728 - RNA, 109 nt, synthetic construct; identical to SEQ ID NO: 19723
  modified_base 1..4: mod_base = OTHER; note = linked via phosphorothioate bond
  modified_base 1: mod_base = OTHER; note = 2'-O-methyladenosine
  modified_base 2: mod_base = cm
  modified_base 3: mod_base = um
  modified_base 44: mod_base = cm
  modified_base 45: mod_base = um
  modified_base 48: mod_base = gm
  modified_base 49: mod_base = um
  modified_base 50: mod_base = cm
  modified_base 51: mod_base = gm
  modified_base 63: mod_base = gm
  modified_base 64: mod_base = cm
  modified_base 65: mod_base = um
  modified_base 66: mod_base = cm
  modified_base 67: mod_base = cm
  modified_base 68: mod_base = cm
  modified_base 69: mod_base = um
  modified_base 70: mod_base = cm
  modified_base 71: mod_base = um
  modified_base 72: mod_base = um
  modified_base 73: mod_base = cm
  modified_base 74: mod_base = gm
  modified_base 75: mod_base = gm
  modified_base 76: mod_base = OTHER; note = 2'-O-methyladenosine
  modified_base 77: mod_base = gm
  modified_base 78: mod_base = gm
  modified_base 79: mod_base = gm
  modified_base 80: mod_base = OTHER; note = 2'-O-methyladenosine
  modified_base 81: mod_base = gm
  modified_base 82: mod_base = cm
  modified_base 106..109: mod_base = OTHER; note = linked via phosphorothioate bond
  modified_base 107: mod_base = OTHER; note = any 2'-O-methyl ribonucelotide
  modified_base 108: mod_base = OTHER; note = any 2'-O-methyl ribonucelotide
  modified_base 109: mod_base = OTHER; note = any 2'-O-methyl ribonucelotide
  source 1..109: mol_type = other RNA

SEQ ID NO: 19729 - RNA, 109 nt, synthetic construct; identical to SEQ ID NO: 19723
  modified_base 1..4: mod_base = OTHER; note = linked via phosphorothioate bond
  modified_base 1: mod_base = OTHER; note = 2'-O-methyladenosine
  modified_base 2: mod_base = cm
  modified_base 3: mod_base = um
  modified_base 63: mod_base = gm
  modified_base 64: mod_base = cm
  modified_base 65: mod_base = um
  modified_base 66: mod_base = cm
  modified_base 67: mod_base = cm
  modified_base 68: mod_base = cm
  modified_base 69: mod_base = um
  modified_base 70: mod_base = cm
  modified_base 71: mod_base = um
  modified_base 72: mod_base = um
  modified_base 73: mod_base = cm
  modified_base 74: mod_base = gm
  modified_base 75: mod_base = gm
  modified_base 76: mod_base = OTHER; note = 2'-O-methyladenosine
  modified_base 77: mod_base = gm
  modified_base 78: mod_base = gm
  modified_base 79: mod_base = gm
  modified_base 80: mod_base = OTHER; note = 2'-O-methyladenosine
  modified_base 81: mod_base = gm
  modified_base 82: mod_base = cm
  modified_base 106..109: mod_base = OTHER; note = linked via phosphorothioate bond
  modified_base 107: mod_base = OTHER; note = any 2'-O-methyl ribonucelotide
  modified_base 108: mod_base = OTHER; note = any 2'-O-methyl ribonucelotide
  modified_base 109: mod_base = OTHER; note = any 2'-O-methyl ribonucelotide
  source 1..109: mol_type = other RNA

SEQ ID NO: 19730 - RNA, 109 nt, synthetic construct; identical to SEQ ID NO: 19723
  modified_base 1..4: mod_base = OTHER; note = linked via phosphorothioate bond
  modified_base 1: mod_base = OTHER; note = 2'-O-methyladenosine
  modified_base 2: mod_base = cm
  modified_base 3: mod_base = um
  modified_base 6: mod_base = cm
  modified_base 8: mod_base = cm
  modified_base 9: mod_base = um
  modified_base 14: mod_base = um
  modified_base 15: mod_base = cm
  modified_base 27: mod_base = OTHER; note = 2'-O-methyladenosine
  modified_base 28: mod_base = gm
  modified_base 33: mod_base = OTHER; note = 2'-O-methyladenosine
  modified_base 34: mod_base = um
  modified_base 35: mod_base = cm
  modified_base 36: mod_base = OTHER; note = 2'-O-methyladenosine
  modified_base 37: mod_base = cm
  modified_base 42: mod_base = gm
  modified_base 43: mod_base = OTHER; note = 2'-O-methyladenosine
  modified_base 44: mod_base = cm
  modified_base 45: mod_base = um
  modified_base 48: mod_base = gm
  modified_base 49: mod_base = um
  modified_base 50: mod_base = cm
  modified_base 51: mod_base = gm
  modified_base 58: mod_base = gm
  modified_base 59: mod_base = um
  modified_base 60: mod_base = OTHER; note = 2'-O-methyladenosine
  modified_base 61: mod_base = OTHER; note = 2'-O-methyladenosine
  modified_base 63: mod_base = gm
  modified_base 64: mod_base = cm
  modified_base 65: mod_base = um
  modified_base 66: mod_base = cm
  modified_base 67: mod_base = cm
  modified_base 68: mod_base = cm
  modified_base 69: mod_base = um
  modified_base 70: mod_base = cm
  modified_base 71: mod_base = um
  modified_base 72: mod_base = um
  modified_base 73: mod_base = cm
  modified_base 74: mod_base = gm
  modified_base 75: mod_base = gm
  modified_base 76: mod_base = OTHER; note = 2'-O-methyladenosine
  modified_base 77: mod_base = gm
  modified_base 78: mod_base = gm
  modified_base 79: mod_base = gm
  modified_base 80: mod_base = OTHER; note = 2'-O-methyladenosine
  modified_base 81: mod_base = gm
  modified_base 82: mod_base = cm
  modified_base 83: mod_base = OTHER; note = 2'-O-methyladenosine
  modified_base 84: mod_base = um
  modified_base 106..109: mod_base = OTHER; note = linked via phosphorothioate bond
  modified_base 107: mod_base = OTHER; note = any 2'-O-methyl ribonucelotide
  modified_base 108: mod_base = OTHER; note = any 2'-O-methyl ribonucelotide
  modified_base 109: mod_base = OTHER; note = any 2'-O-methyl ribonucelotide
  source 1..109: mol_type = other RNA

SEQ ID NO: 19731 - RNA, 109 nt, synthetic construct; identical to SEQ ID NO: 19723
  modified_base 1..4: mod_base = OTHER; note = linked via phosphorothioate bond
  modified_base 1: mod_base = OTHER; note = 2'-O-methyladenosine
  modified_base 2: mod_base = cm
  modified_base 3: mod_base = um
  modified_base 33: mod_base = OTHER; note = 2'-O-methyladenosine
  modified_base 34: mod_base = um
  modified_base 35: mod_base = cm
  modified_base 36: mod_base = OTHER; note = 2'-O-methyladenosine
  modified_base 37: mod_base = cm
  modified_base 42: mod_base = gm
  modified_base 43: mod_base = OTHER; note = 2'-O-methyladenosine
  modified_base 44: mod_base = cm
  modified_base 45: mod_base = um
  modified_base 48: mod_base = gm
  modified_base 49: mod_base = um
  modified_base 50: mod_base = cm
  modified_base 51: mod_base = gm
  modified_base 58: mod_base = gm
  modified_base 59: mod_base = um
  modified_base 60: mod_base = OTHER; note = 2'-O-methyladenosine
  modified_base 61: mod_base = OTHER; note = 2'-O-methyladenosine
  modified_base 63: mod_base = gm
  modified_base 64: mod_base = cm
  modified_base 65: mod_base = um
  modified_base 66: mod_base = cm
  modified_base 67: mod_base = cm
  modified_base 68: mod_base = cm
  modified_base 69: mod_base = um
  modified_base 70: mod_base = cm
  modified_base 71: mod_base = um
  modified_base 72: mod_base = um
  modified_base 73: mod_base = cm
  modified_base 74: mod_base = gm
  modified_base 75: mod_base = gm
  modified_base 76: mod_base = OTHER; note = 2'-O-methyladenosine
  modified_base 77: mod_base = gm
  modified_base 78: mod_base = gm
  modified_base 79: mod_base = gm
  modified_base 80: mod_base = OTHER; note = 2'-O-methyladenosine
  modified_base 81: mod_base = gm
  modified_base 82: mod_base = cm
  modified_base 83: mod_base = OTHER; note = 2'-O-methyladenosine
  modified_base 84: mod_base = um
  modified_base 106..109: mod_base = OTHER; note = linked via phosphorothioate bond
  modified_base 107: mod_base = OTHER; note = any 2'-O-methyl ribonucelotide
  modified_base 108: mod_base = OTHER; note = any 2'-O-methyl ribonucelotide
  modified_base 109: mod_base = OTHER; note = any 2'-O-methyl ribonucelotide
  source 1..109: mol_type = other RNA

SEQ ID NO: 19732 - RNA, 109 nt, synthetic construct; identical to SEQ ID NO: 19723
  modified_base 1..4: mod_base = OTHER; note = linked via phosphorothioate bond
  modified_base 1: mod_base = OTHER; note = 2'-O-methyladenosine
  modified_base 2: mod_base = cm
  modified_base 3: mod_base = um
  modified_base 6: mod_base = cm
  modified_base 8: mod_base = cm
  modified_base 9: mod_base = um
  modified_base 14: mod_base = um
  modified_base 15: mod_base = cm
  modified_base 27: mod_base = OTHER; note = 2'-O-methyladenosine
  modified_base 28: mod_base = gm
  modified_base 42: mod_base = gm
  modified_base 43: mod_base = OTHER; note = 2'-O-methyladenosine
  modified_base 44: mod_base = cm
  modified_base 45: mod_base = um
  modified_base 48: mod_base = gm
  modified_base 49: mod_base = um
  modified_base 50: mod_base = cm
  modified_base 51: mod_base = gm
  modified_base 63: mod_base = gm
  modified_base 64: mod_base = cm
  modified_base 65: mod_base = um
  modified_base 66: mod_base = cm
  modified_base 67: mod_base = cm
  modified_base 68: mod_base = cm
  modified_base 69: mod_base = um
  modified_base 70: mod_base = cm
  modified_base 71: mod_base = um
  modified_base 72: mod_base = um
  modified_base 73: mod_base = cm
  modified_base 74: mod_base = gm
  modified_base 75: mod_base = gm
  modified_base 76: mod_base = OTHER; note = 2'-O-methyladenosine
  modified_base 77: mod_base = gm
  modified_base 78: mod_base = gm
  modified_base 79: mod_base = gm
  modified_base 80: mod_base = OTHER; note = 2'-O-methyladenosine
  modified_base 81: mod_base = gm
  modified_base 82: mod_base = cm
  modified_base 106..109: mod_base = OTHER; note = linked via phosphorothioate bond
  modified_base 107: mod_base = OTHER; note = any 2'-O-methyl ribonucelotide
  modified_base 108: mod_base = OTHER; note = any 2'-O-methyl ribonucelotide
  modified_base 109: mod_base = OTHER; note = any 2'-O-methyl ribonucelotide
  source 1..109: mol_type = other RNA

SEQ ID NO: 19733 - DNA, 40 bp, synthetic construct
  source 1..40: mol_type = other DNA
actcttctggtccccacagactcagagagaacccgccacc

SEQ ID NO: 19734 - DNA, 39 bp, synthetic construct
  source 1..39: mol_type = other DNA
atggcccctgctgccaagagagtgaagctggatagcaga

SEQ ID NO: 19735 - DNA, 2937 bp, synthetic construct
  source 1..2937: mol_type = other DNA
caggagatcaagcggattaataaaattcggagaagactggtgaaggattctaacacaaagaaggctggcaagacacggggccctatgaagacactgctggtgagagtgatgacacccgacctgagagaaagactggaaaacctgagaaagaagcctgagaatatcccccagcccatcagcaacacaagccgggccaacctgaataagctgctgaccgactacaccgaaatgaagaaggccatcctgcacgtgtattgggaagagttccagaaagacccagtcggcctgatgagcagagtggctcagcctgccagcaagaagatcgatcagaacaagctgaagcccgaaatggacgagaaggggaacctgacaaccgccggctttgcctgtagccagtgcggccagcccctgtttgtgtacaaactggaacaggtgagcgaaaagggcaaggcttacacgaattacttcggcagatgcaacgtggccgagcacgagaagctgatcaagctggcccagctgaagcctgagaaggatagcgatgaggcagtgacatattccctgggcaagttcggacagcgggccctggatttttattccattcatgtgaccaaggaatccacccaccccgtcaagcctcttgcccaaattgccggcaacagatacgcctccagccccgtgggcaaggccctgagcgacgcctgtatgggcaccatcgccagcttcctgtctaagtaccaggacattatcatcgagcaccagaaggtggtgaagggcaaccagaagagactggagagcctgcgcgagctggccggcaaggaaaacctggagtatcctagcgtgaccctgcctcctcagcctcatacaaaggagggcgtggatgcctacaacgaagtgatcgcccgggtgcggatgtgggtgaacctgaatctgtggcagaagctgaagctgtctagagacgacgccaagcccctgctgagactgaagggcttccccagcttccctctggtggagagacaggcaaatgaagtggactggtgggacatggtgtgtaacgtgaagaagctgatcaatgagaagaaggaggacggcaaagtgttctggcagaatctggccggctacaagcgtcaggaggccctgcggccctacctgagcagcgaggaagacagaaagaagggcaagaagttcgcccggtatcagctgggggacctgctgctgcacctcgagaagaagcacggcgaagactgggggaaggtgtacgatgaggcctgggagcggatcgataagaaggtggagggcctgagcaagcacatcaagctggaggaggaacggagatctgaggacgcccagagcaaggccgccctgaccgactggctgagagccaaggccagcttcgtcatcgaggggctgaaggaggccgacaaggacgagttctgccggtgcgaactgaagctgcagaagtggtacggagatctgagaggcaaacctttcgccatcgaggccgagaacagcatcctggacatcagcggcttcagcaagcagtacaactgcgcctttatttggcagaaggacggagtgaagaagctgaacctgtacctgatcatcaactatttcaagggcggcaagctgagattcaagaagatcaagcctgaagccttcgaggccaacagattctacaccgtgattaacaagaaaagcggagagatcgtgccaatggaagtgaacttcaacttcgacgaccctaacctgatcatcctgcccctggcatttggcaagcggcagggcagagagttcatctggaacgacctgctgtctctggagaccggcagcctgaagctggccaacggcagagtgatcgagaagacactgtacaacagacgaaccagacaagacgagcccgccctgtttgtggccctgaccttcgagagaagagaggtgctggacagcagcaatatcaagcctatgaacctgatcggcgtggaccggggcgagaacatccctgccgtgatcgcccttaccgaccccgagggatgccctctgagccggtttaaagacagcctgggcaaccctacccacatcctgagaattggcgagtcctacaaggagaagcagagaaccatccaggccaagaaggaggtggagcagcggcgggctggcggctactcccggaagtacgccagcaaggccaagaacctggccgacgacatggttagaaataccgccagagacctcctgtactacgctgtgacccaggacgccatgctgatcttcgagaacctgagcagaggcttcggcagacagggcaagagaaccttcatggccgagagacagtacacccggatggaggactggctgaccgccaagctggcctacgagggcctgccctctaagacctacctgtccaagaccttggcacagtacaccagcaagacatgctctaactgcggcttcacaatcacgagcgccgactacgaccgggtgctggagaaactgaagaagaccgccacaggctggatgaccaccattaacggcaaggagctgaaggtggagggccagatcacctactacaacaggtacaaacggcagaacgtggtgaaggacctgagcgtggaactggatagactgagcgaggaaagcgtaaacaatgacatcagcagctggaccaagggccggagcggcgaggccctgagcctgctgaagaagagattctcccacagaccagtgcaggagaagttcgtgtgtctgaactgcggcttcgagacccacgccgacgagcaagccgccctgaacatcgcccggtcttggcttttcctgcggagccaggagtacaagaagtaccagacaaacaagaccacaggcaacacagacaagagagccttcgtcgagacctggcagagcttctacagaaagaagctgaaggaggtgtggaagcctgccgtg

SEQ ID NO: 19736 - DNA, 43 bp, synthetic construct
  source 1..43: mol_type = other DNA
ggaagccccgctgccaagagagtgaagctggactaatagataa

SEQ ID NO: 19737 - DNA, 111 bp, synthetic construct
  source 1..111: mol_type = other DNA
gctggagcctcggtggccatgcttcttgccccttgggcctccccccagcccctcctccccttcctgcacccgtacccccgtggtctttgaataaagtctgagtgggcggca

SEQ ID NO: 19738 - DNA, 80 bp, synthetic construct
  source 1..80: mol_type = other DNA
aaaaaaaaaaaaaaaaaaaaaaaaaaaaaaaaaaaaaaaaaaaaaaaaaaaaaaaaaaaaaaaaaaaaaaaaaaaaaaaa

SEQ ID NO: 19739 - DNA, 44 bp, synthetic construct
  source 1..44: mol_type = other DNA
aaataagagagaaaagaagagtaagaagaaatataagagccacc

SEQ ID NO: 19740 - DNA, 93 bp, synthetic construct
  source 1..93: mol_type = other DNA
gctgccttctgcggggcttgccttctggccatgcccttcttctctcccttgcacctgtacctcttggtctttgaataaagcctgagtaggaag

SEQ ID NO: 19741 - skipped

SEQ ID NO: 19742 - RNA, 3249 nt, synthetic construct
  source 1..3249: mol_type = other RNA
  modified_base 1..3249: mod_base = OTHER; note = Each t is m1f
actcttctggtccccacagactcagagagaacccgccaccatggcccctgctgccaagagagtgaagctggatagcagacaggagatcaagcggattaataaaattcggagaagactggtgaaggattctaacacaaagaaggctggcaagacacggggccctatgaagacactgctggtgagagtgatgacacccgacctgagagaaagactggaaaacctgagaaagaagcctgagaatatcccccagcccatcagcaacacaagccgggccaacctgaataagctgctgaccgactacaccgaaatgaagaaggccatcctgcacgtgtattgggaagagttccagaaagacccagtcggcctgatgagcagagtggctcagcctgccagcaagaagatcgatcagaacaagctgaagcccgaaatggacgagaaggggaacctgacaaccgccggctttgcctgtagccagtgcggccagcccctgtttgtgtacaaactggaacaggtgagcgaaaagggcaaggcttacacgaattacttcggcagatgcaacgtggccgagcacgagaagctgatcaagctggcccagctgaagcctgagaaggatagcgatgaggcagtgacatattccctgggcaagttcggacagcgggccctggatttttattccattcatgtgaccaaggaatccacccaccccgtcaagcctcttgcccaaattgccggcaacagatacgcctccagccccgtgggcaaggccctgagcgacgcctgtatgggcaccatcgccagcttcctgtctaagtaccaggacattatcatcgagcaccagaaggtggtgaagggcaaccagaagagactggagagcctgcgcgagctggccggcaaggaaaacctggagtatcctagcgtgaccctgcctcctcagcctcatacaaaggagggcgtggatgcctacaacgaagtgatcgcccgggtgcggatgtgggtgaacctgaatctgtggcagaagctgaagctgtctagagacgacgccaagcccctgctgagactgaagggcttccccagcttccctctggtggagagacaggcaaatgaagtggactggtgggacatggtgtgtaacgtgaagaagctgatcaatgagaagaaggaggacggcaaagtgttctggcagaatctggccggctacaagcgtcaggaggccctgcggccctacctgagcagcgaggaagacagaaagaagggcaagaagttcgcccggtatcagctgggggacctgctgctgcacctcgagaagaagcacggcgaagactgggggaaggtgtacgatgaggcctgggagcggatcgataagaaggtggagggcctgagcaagcacatcaagctggaggaggaacggagatctgaggacgcccagagcaaggccgccctgaccgactggctgagagccaaggccagcttcgtcatcgaggggctgaaggaggccgacaaggacgagttctgccggtgcgaactgaagctgcagaagtggtacggagatctgagaggcaaacctttcgccatcgaggccgagaacagcatcctggacatcagcggcttcagcaagcagtacaactgcgcctttatttggcagaaggacggagtgaagaagctgaacctgtacctgatcatcaactatttcaagggcggcaagctgagattcaagaagatcaagcctgaagccttcgaggccaacagattctacaccgtgattaacaagaaaagcggagagatcgtgccaatggaagtgaacttcaacttcgacgaccctaacctgatcatcctgcccctggcatttggcaagcggcagggcagagagttcatctggaacgacctgctgtctctggagaccggcagcctgaagctggccaacggcagagtgatcgagaagacactgtacaacagacgaaccagacaagacgagcccgccctgtttgtggccctgaccttcgagagaagagaggtgctggacagcagcaatatcaagcctatgaacctgatcggcgtggaccggggcgagaacatccctgccgtgatcgcccttaccgaccccgagggatgccctctgagccggtttaaagacagcctgggcaaccctacccacatcctgagaattggcgagtcctacaaggagaagcagagaaccatccaggccaagaaggaggtggagcagcggcgggctggcggctactcccggaagtacgccagcaaggccaagaacctggccgacgacatggttagaaataccgccagagacctcctgtactacgctgtgacccaggacgccatgctgatcttcgagaacctgagcagaggcttcggcagacagggcaagagaaccttcatggccgagagacagtacacccggatggaggactggctgaccgccaagctggcctacgagggcctgccctctaagacctacctgtccaagaccttggcacagtacaccagcaagacatgctctaactgcggcttcacaatcacgagcgccgactacgaccgggtgctggagaaactgaagaagaccgccacaggctggatgaccaccattaacggcaaggagctgaaggtggagggccagatcacctactacaacaggtacaaacggcagaacgtggtgaaggacctgagcgtggaactggatagactgagcgaggaaagcgtaaacaatgacatcagcagctggaccaagggccggagcggcgaggccctgagcctgctgaagaagagattctcccacagaccagtgcaggagaagttcgtgtgtctgaactgcggcttcgagacccacgccgacgagcaagccgccctgaacatcgcccggtcttggcttttcctgcggagccaggagtacaagaagtaccagacaaacaagaccacaggcaacacagacaagagagccttcgtcgagacctggcagagcttctacagaaagaagctgaaggaggtgtggaagcctgccgtgggaagccccgctgccaagagagtgaagctggactaatagataagctggagcctcggtggccatgcttcttgccccttgggcctccccccagcccctcctccccttcctgcacccgtacccccgtggtctttgaataaagtctgagtgggcggcaaaaaaaaaaaaaaaaaaaaaaaaaaaaaaaaaaaaaaaaaaaaaaaaaaaaaaaaaaaaaaaaaaaaaaaaaaaaaaaa

SEQ ID NO: 19743 - RNA, 3241 nt, synthetic construct
  source 1..3241: mol_type = other RNA
  modified_base 1..3241: mod_base = OTHER; note = Each t is m1f
aaataagagagaaaagaagagtaagaagaaatataagagccaccatggcccctgctgccaagagagtgaagctggatagcagacaggagatcaagcggattaataaaattcggagaagactggtgaaggattctaacacaaagaaggctggcaagacacggggccctatgaagacactgctggtgagagtgatgacacccgacctgagagaaagactggaaaacctgagaaagaagcctgagaatatcccccagcccatcagcaacacaagccgggccaacctgaataagctgctgaccgactacaccgaaatgaagaaggccatcctgcacgtgtattgggaagagttccagaaagacccagtcggcctgatgagcagagtggctcagcctgccagcaagaagatcgatcagaacaagctgaagcccgaaatggacgagaaggggaacctgacaaccgccggctttgcctgtagccagtgcggccagcccctgtttgtgtacaaactggaacaggtgagcgaaaagggcaaggcttacacgaattacttcggcagatgcaacgtggccgagcacgagaagctgatcaagctggcccagctgaagcctgagaaggatagcgatgaggcagtgacatattccctgggcaagttcggacagcgggccctggatttttattccattcatgtgaccaaggaatccacccaccccgtcaagcctcttgcccaaattgccggcaacagatacgcctccagccccgtgggcaaggccctgagcgacgcctgtatgggcaccatcgccagcttcctgtctaagtaccaggacattatcatcgagcaccagaaggtggtgaagggcaaccagaagagactggagagcctgcgcgagctggccggcaaggaaaacctggagtatcctagcgtgaccctgcctcctcagcctcatacaaaggagggcgtggatgcctacaacgaagtgatcgcccgggtgcggatgtgggtgaacctgaatctgtggcagaagctgaagctgtctagagacgacgccaagcccctgctgagactgaagggcttccccagcttccctctggtggagagacaggcaaatgaagtggactggtgggacatggtgtgtaacgtgaagaagctgatcaatgagaagaaggaggacggcaaagtgttctggcagaatctggccggctacaagcgtcaggaggccctgcggccctacctgagcagcgaggaagacagaaagaagggcaagaagttcgcccggtatcagctgggggacctgctgctgcacctcgagaagaagcacggcgaagactgggggaaggtgtacgatgaggcctgggagcggatcgataagaaggtggagggcctgagcaagcacatcaagctggaggaggaacggagatctgaggacgcccagagcaaggccgccctgaccgactggctgagagccaaggccagcttcgtcatcgaggggctgaaggaggccgacaaggacgagttctgccggtgcgaactgaagctgcagaagtggtacggagatctgagaggcaaacctttcgccatcgaggccgagaacagcatcctggacatcagcggcttcagcaagcagtacaactgcgcctttatttggcagaaggacggagtgaagaagctgaacctgtacctgatcatcaactatttcaagggcggcaagctgagattcaagaagatcaagcctgaagccttcgaggccaacagattctacaccgtgattaacaagaaaagcggagagatcgtgccaatggaagtgaacttcaacttcgacgaccctaacctgatcatcctgcccctggcatttggcaagcggcagggcagagagttcatctggaacgacctgctgtctctggagaccggcagcctgaagctggccaacggcagagtgatcgagaagacactgtacaacagacgaaccagacaagacgagcccgccctgtttgtggccctgaccttcgagagaagagaggtgctggacagcagcaatatcaagcctatgaacctgatcggcgtggaccggggcgagaacatccctgccgtgatcgcccttaccgaccccgagggatgccctctgagccggtttaaagacagcctgggcaaccctacccacatcctgagaattggcgagtcctacaaggagaagcagagaaccatccaggccaagaaggaggtggagcagcggcgggctggcggctactcccggaagtacgccagcaaggccaagaacctggccgacgacatggttagaaataccgccagagacctcctgtactacgctgtgacccaggacgccatgctgatcttcgagaacctgagcagaggcttcggcagacagggcaagagaaccttcatggccgagagacagtacacccggatggaggactggctgaccgccaagctggcctacgagggcctgccctctaagacctacctgtccaagaccttggcacagtacaccagcaagacatgctctaactgcggcttcacaatcacgagcgccgactacgaccgggtgctggagaaactgaagaagaccgccacaggctggatgaccaccattaacggcaaggagctgaaggtggagggccagatcacctactacaacaggtacaaacggcagaacgtggtgaaggacctgagcgtggaactggatagactgagcgaggaaagcgtaaacaatgacatcagcagctggaccaagggccggagcggcgaggccctgagcctgctgaagaagagattctcccacagaccagtgcaggagaagttcgtgtgtctgaactgcggcttcgagacccacgccgacgagcaagccgccctgaacatcgcccggtcttggcttttcctgcggagccaggagtacaagaagtaccagacaaacaagaccacaggcaacacagacaagagagccttcgtcgagacctggcagagcttctacagaaagaagctgaaggaggtgtggaagcctgccgtgggaagccccgctgccaagagagtgaagctggactaatagataagctgccttctgcggggcttgccttctggccatgcccttcttctctcccttgcacctgtacctcttggtctttgaataaagcctgagtaggaagtctagaaaaaaaaaaaaaaaaaaaaaaaaaaaaaaaaaaaaaaaaaaaaaaaaaaaaaaaaaaaaaaaaaaaaaaaaaaaaaaaa

SEQ ID NO: 19744 - RNA, 20 nt, synthetic construct
  source 1..20: mol_type = other RNA
taatctccatcctcgtcctg

SEQ ID NO: 19745 - RNA, 20 nt, synthetic construct
  source 1..20: mol_type = other RNA
ccaagaagccagggaagagg

SEQ ID NO: 19746 - RNA, 20 nt, synthetic construct
  source 1..20: mol_type = other RNA
acatatcttttatgacctct

SEQ ID NO: 19747 - RNA, 20 nt, synthetic construct
  source 1..20: mol_type = other RNA
ctggcttcttggtgaagatg

SEQ ID NO: 19748 - RNA, 20 nt, synthetic construct
  source 1..20: mol_type = other RNA
tggtgaagatgagcagtgac

SEQ ID NO: 19749 - RNA, 20 nt, synthetic construct
  source 1..20: mol_type = other RNA
gccgttgctccaaggtatgg

SEQ ID NO: 19750 - RNA, 20 nt, synthetic construct
  source 1..20: mol_type = other RNA
ttcttggggatcaggaggcc

SEQ ID NO: 19751 - DNA, 2934 bp, synthetic construct
  source 1..2934: mol_type = other DNA
caggagatcaagcggattaataaaattcggagaagactggtgaaggattctaacacaaagaaggctggcaagacaggccctatgaagacactgctggtgagagtgatgacacccgacctgagagaaagactggaaaacctgagaaagaagcctgagaatatcccccagcccatcagcaacacaagccgggccaacctgaataagctgctgaccgactacaccgaaatgaagaaggccatcctgcacgtgtattgggaagagttccagaaagacccagtcggcctgatgagcagagtggctcagcctgccagcaagaagatcgatcagaacaagctgaagcccgaaatggacgagaaggggaacctgacaaccgccggctttgcctgtagccagtgcggccagcccctgtttgtgtacaaactggaacaggtgagcgaaaagggcaaggcttacacgaattacttcggcagatgcaacgtggccgagcacgagaagctgatcctgctggcccagctgaagcctgagaaggatagcgatgaggcagtgacatattccctgggcaagttcggacagcgggccctggatttttattccattcatgtgaccaaggaatccacccaccccgtcaagcctcttgcccaaattgccggcaacagatacgccagcggccccgtgggcaaggccctgagcgacgcctgtatgggcaccatcgccagcttcctgtctaagtaccaggacattatcatcgagcaccagaaggtggtgaagggcaaccagaagagactggagagcctgcgcgagctggccggcaaggaaaacctggagtatcctagcgtgaccctgcctcctcagcctcatacaaaggagggcgtggatgcctacaacgaagtgatcgcccgggtgcggatgtgggtgaacctgaatctgtggcagaagctgaagctgtctagagacgacgccaagcccctgctgagactgaagggcttccccagcttccctctggtggagagacaggcaaatgaagtggactggtgggacatggtgtgtaacgtgaagaagctgatcaatgagaagaaggaggacggcaaagtgttctggcagaatctggccggctacaagcgtcaggaggccctgcggccctacctgagcagcgaggaagacagaaagaagggcaagaagttcgcccggtatcagctgggggacctgctgctgcacctcgagaagaagcacggcgaagactgggggaaggtgtacgatgaggcctgggagcggatcgataagaaggtggagggcctgagcaagcacatcaagctggaggaggaacggagatctgaggacgcccagagcaaggccgccctgaccgactggctgagagccaaggccagcttcgtcatcgaggggctgaaggaggccgacaaggacgagttctgccggtgcgaactgaagctgcagaagtggtacggagatctgagaggcaaacctttcgccatcgaggccgagaacagcatcctggacatcagcggcttcagcaagcagtacaactgcgcctttatttggcagaaggacggagtgaagaagctgaacctgtacctgatcatcaactatttcaagggcggcaagctgagattcaagaagatcaagcctgaagccttcgaggccaacagattctacaccgtgattaacaagaaaagcggagagatcgtgccaatggaagtgaacttcaacttcgacgaccctaacctgatcatcctgcccctggcatttggcaagcggcagggcagagagttcatctggaacgacctgctgtctctggagaccggcagcctgaagctggccaacggcagagtgatcgagaagacactgtacaacagacgaaccagacaagacgagcccgccctgtttgtggccctgaccttcgagagaagagaggtgctggacagcagcaatatcaagcctatgaacctgatcggcgtggaccggggcgagaacatccctgccgtgatcgcccttaccgaccccgagggatgccctctgagccggtttaaagacagcctgggcaaccctacccacatcctgagaattggcgagtcctacaaggagaagcagagaaccatccaggccaagaaggaggtggagcagcggcgggctggcggctactcccggaagtacgccagcaaggccaagaacctggccgacgacatggttagaaataccgccagagacctcctgtactacgctgtgacccaggacgccatgctgatcttcgagaacctgagcagaggcttcggcagacagggcaagagaaccttcatggccgagagacagtacacccggatggaggactggctgaccgccaagctggcctacgagggcctgccctctaagacctacctgtccaagaccttggcacagtacaccagcaagacatgctctaactgcggcttcacaatcacgagcgccgactacgaccgggtgctggagaaactgaagaagaccgccacaggctggatgaccaccattaacggcaaggagctgaaggtggagggccagatcacctactacaacaggtacaaacggcagaacgtggtgaaggacctgagcgtggaactggatagactgagcgaggaaagcgtaaacaatgacatcagcagctggaccaagggccggagcggcgaggccctgagcctgctgaagaagagattctcccacagaccagtgcaggagaagttcgtgtgtctgaactgcggcttcgagacccacgccgacgagcaagccgccctgaacatcgcccggtcttggcttttcctgcggagccaggagtacaagaagtaccagacaaacaagaccacaggcaacacagacaagagagccttcgtcgagacctggcagagcttctacagaaagaagctgaaggaggtgtggaagcctgccgtg

SEQ ID NO: 19752 - DNA, 2934 bp, synthetic construct
  source 1..2934: mol_type = other DNA
caggagatcaagcggattaataaaattcggagaagactggtgaaggattctaacacaaagaaggctggcaagacaggccctatgaagacactgctggtgagagtgatgacacccgacctgagagaaagactggaaaacctgagaaagaagcctgagaatatcccccagcccatcagcaacacaagccgggccaacctgaataagctgctgaccgactacaccgaaatgaagaaggccatcctgcacgtgtattgggaagagttccagaaagacccagtcggcctgatgagcagagtggctcagcctgccagcaagaagatcgatcagaacaagctgaagcccgaaatggacgagaaggggaacctgacaaccgccggctttgcctgtagccagtgcggccagcccctgtttgtgtacaaactggaacaggtgagcgaaaagggcaaggcttacacgaattacttcggcagatgcaacgtggccgagcacgagaagctgatcctgctggcccagctgaagcctgagaaggatagcgatgaggcagtgacatattccctgggcaagttcggacagcgggccctggatttttattccattcatgtgaccaaggaatccacccaccccgtcaagcctcttgcccaaattgccggcaacagatacgccagcggccccgtgggcaaggccctgagcgacgcctgtatgggcaccatcgccagcttcctgtctaagtaccaggacattatcatcgagcaccagaaggtggtgaagggcaaccagaagagactggagagcctgcgcgagctggccggcaaggaaaacctggagtatcctagcgtgaccctgcctcctcagcctcatacaaaggagggcgtggatgcctacaacgaagtgatcgcccgggtgcggatgtgggtgaacctgaatctgtggcagaagctgaagctgtctagagacgacgccaagcccctgctgagactgaagaagttccccagcttccctctggtggagagacaggcaaatgaagtggactggtgggacatggtgtgtaacgtgaagaagctgatcaatgagaagaaggaggacggcaaagtgttctggcagaatctggccggctacaagcgtcaggaggccctgcggccctacctgagcagcgaggaagacagaaagaagggcaagaagttcgcccggtatcagctgggggacctgctgctgcacctcgagaagaagcacggcgaagactgggggaaggtgtacgatgaggcctgggagcggatcgataagaaggtggagggcctgagcaagcacatcaagctggaggaggaacggagatctgaggacgcccagagcaaggccgccctgaccgactggctgagagccaaggccagcttcgtcatcgaggggctgaaggaggccgacaaggacgagttctgccggtgcgaactgaagctgcagaagtggtacggagatctgagaggcaaacctttcgccatcgaggccgagaacagcatcctggacatcagcggcttcagcaagcagtacaactgcgcctttatttggcagaaggacggagtgaagaagctgaacctgtacctgatcatcaactatttcaagggcggcaagctgagattcaagaagatcaagcctgaagccttcgaggccaacagattctacaccgtgattaacaagaaaagcggagagatcgtgccaatggaagtgaacttcaacttcgacgaccctaacctgatcatcctgcccctggcatttggcaagcggcagggcagagagttcatctggaacgacctgctgtctctggagaccggcagcctgaagctggccaacggcagagtgatcgagaagacactgtacaacagacgaaccagacaagacgagcccgccctgtttgtggccctgaccttcgagagaagagaggtgctggacagcagcaatatcaagcctatgaacctgatcggcgtggaccggggcgagaacatccctgccgtgatcgcccttaccgaccccgagggatgccctctgagccggtttaaagacagcctgggcaaccctacccacatcctgagaattggcgagtcctacaaggagaagcagagaaccatccaggccaagaaggaggtggagcagcggcgggctggcggctactcccggaagtacgccagcaaggccaagaacctggccgacgacatggttagaaataccgccagagacctcctgtactacgctgtgacccaggacgccatgctgatcttcgagaacctgagcagaggcttcggcagacagggcaagagaaccttcatggccgagagacagtacacccggatggaggactggctgaccgccaagctggcctacgagggcctgccctctaagacctacctgtccaagaccttggcacagtacaccagcaagacatgctctaactgcggcttcacaatcacgagcgccgactacgaccgggtgctggagaaactgaagaagaccgccacaggctggatgaccaccattaacggcaaggagctgaaggtggagggccagatcacctactacaacaggtacaaacggcagaacgtggtgaaggacctgagcgtggaactggatagactgagcgaggaaagcgtaaacaatgacatcagcagctggaccaagggccggagcggcgaggccctgagcctgctgaagaagagattctcccacagaccagtgcaggagaagttcgtgtgtctgaactgcggcttcgagacccacgccgacgagcaagccgccctgaacatcgcccggtcttggcttttcctgcggagccaggagtacaagaagtaccagacaaacaagaccacaggcaacacagacaagagagccttcgtcgagacctggcagagcttctacagaaagaagctgaaggaggtgtggaagcctgccgtg

SEQ ID NO: 19753 - DNA, 36 bp, synthetic construct
  source 1..36: mol_type = other DNA
ggaagccccgctgccaagagagtgaagctggactaa

SEQ ID NO: 19754 - DNA, 80 bp, synthetic construct; identical to SEQ ID NO: 19738
  source 1..80: mol_type = other DNA

(The sequence listing continues in the following parts.)

1. A system comprising a chimeric engineered CasX protein and a guide ribonucleic acid (gRNA), wherein the gRNA comprises a scaffold sequence comprising a sequence selected from the group consisting of SEQ ID NOS: 464-466, or a sequence having at least about 90% sequence identity thereto, and a targeting sequence complementary to a lipoprotein (a) (LPA) gene target nucleic acid sequence.

2-5. (canceled)

6. The system of claim 1, wherein the targeting sequence of the gRNA comprises a sequence selected from the group consisting of the sequences of SEQ ID NOS: 762-903 or a sequence having at least about 80% identity thereto.

7-33. (canceled)

34. The system of claim 1, wherein the gRNA is chemically modified.

35. The system of claim 34, wherein the chemical modification to the gRNA is an addition of a 2′O-methyl group to one or more nucleotides of the gRNA.

36. The system of claim 34, wherein the chemical modification to the gRNA is a substitution of a phosphorothioate bond between two or more nucleotides of the gRNA.

37. The system of claim 1, wherein the chemical modification is an addition of a 2′O-methyl group to the 3 nucleotides of the 5′ and 3′ ends of the gRNA and wherein each of the modified nucleotides is linked to the adjoining nucleotide by a phosphorothioate bond.

38. The system of claim 34, wherein the chemically modified gRNA comprises a sequence selected from the group consisting of SEQ ID NOS: 19855-19862, or a sequence having at least about 80% sequence identity thereto.

39. (canceled)

40. The system of claim 34, wherein the chemically modified gRNA comprises a sequence of SEQ ID NO: 19855.

41. The system of claim 1, wherein the gRNA is capable of forming a ribonucleoprotein (RNP) with the chimeric engineered CasX protein and binding the target nucleic acid.

42. (canceled)

43. The system of claim 1, wherein the chimeric engineered CasX protein comprises a sequence selected from the group consisting of SEQ ID NOS: 4-7, or a sequence having at least about 90% sequence identity thereto.

44-47. (canceled)

48. The system of claim 1, wherein the chimeric engineered CasX protein comprises one or more nuclear localization signals (NLS).

49. The system of claim 48, wherein the NLS is a simian virus 40 (SV40) NLS or a c-MYC NLS.

50. A nucleic acid comprising a sequence that encodes the gRNA of claim 1.

51-68. (canceled)

69. A lipid nanoparticle (LNP) comprising:
a. a chimeric engineered CasX variant protein or a sequence encoding the chimeric engineered CasX variant protein; and
b. a gRNA comprising a targeting sequence complementary to an LPA gene target nucleic acid sequence or a sequence encoding the gRNA.

70. A lipid nanoparticle (LNP) comprising the nucleic acid of claim 50.

71. (canceled)

72. The LNP of claim 69, wherein the LNP comprises a component selected from the group consisting of one or more ionizable lipids, one or more helper phospholipids, one or more polyethylene glycol (PEG)-modified lipids, and/or cholesterol or a derivative thereof.

73. A vector comprising the nucleic acid of claim 50, wherein the vector is selected from the group consisting of a retroviral vector, a lentiviral vector, an adenoviral vector, an adeno-associated viral (AAV) vector, a herpes simplex virus (HSV) vector, a plasmid, a minicircle, a nanoplasmid, a DNA vector, and an RNA vector.

74-76. (canceled)

77. A pharmaceutical composition comprising
the system of claim 1.

78. (canceled)

79. A method of modifying an LPA target nucleic acid sequence in a population of cells, the method comprising introducing into cells of the population:
a. system comprising a chimeric engineered CasX protein and a guide ribonucleic acid (gRNA); or
b. a lipid nanoparticle (LNP) comprising a chimeric engineered CasX variant protein or a sequence encoding the chimeric engineered CasX variant protein; or a sequence encoding the gRNA;
wherein the gRNA comprises a scaffold sequence comprising a sequence selected from the group consisting of SEQ ID NOS: 464-466, or a sequence having at least about 90% sequence identity thereto, and a targeting sequence complementary to a lipoprotein (a) (LPA) gene target nucleic acid sequence.

80-96. (canceled)

97. A method of treating an LPA-related disease in a subject in need thereof, comprising administering to the subject a therapeutically effective dose of:
a. a system comprising a chimeric engineered CasX protein and a guide ribonucleic acid (gRNA); or
b. a lipid nanoparticle (LNP) comprising a chimeric engineered CasX variant protein or a sequence encoding the chimeric engineered CasX variant protein; or a sequence encoding the gRNA;
wherein the gRNA comprises a scaffold sequence comprising a sequence selected from the group consisting of SEQ ID NOS: 464-466, or a sequence having at least about 90% sequence identity thereto, and a targeting sequence complementary to a lipoprotein (a) (LPA) gene target nucleic acid sequence.

98-121. (canceled)
